United States Patent Application Publication US 2005/0228172 A9 - sequence listing, part 195

SEQ ID NO: 881716 - DNA, 604 bp, Homo sapiens
aatctatcagcagcatgacttgatgtatttgattaacccattcttgagaaaatgggtaaactttaattgttaatggtgaaaaataaaatgtataacaatactgcattatagaaaggttcttaaactatacctgtcatcacctaatatttttcatacttgtctttaatccacatagagctttaattgayactactatttttaacatgaaagacagtagaatttttcattctgaaactgtaattttaaatatgattttgaaagtagattctagaaaattacaaggaatattaaaaatgttgggcagtattcaaaaagagttctttcaaaatccttatttacagtttatcttgtattcaatatagaaaaggcaaacaatgcagagatacacaataatttgaacctaatatggagatatatgaaaactgtgtttttttctatgatcgataaaatatatctattaactttaaagaaaaacaaatttaaaatgcaatgttaaatgctgataaaaataatttttaagctcttgtacacagtgttgtatactttaaatctaatatcccttttaatcttcacaattgccaatgaagtagatgctcctgtcact

SEQ ID NO: 881717 - DNA, 604 bp, Homo sapiens
aatctatcagcagcatgacttgatgtatttgattaacccattcttgagaaaatgggtaaactttaattgttaatggtgaaaaataaaatgtataacaatactgcattatagaaaggttcttaaactatacctgtcatcacctaatatttttcatacttgtctttaatccacatagagctttaattgatactactatttttaacatgaaagacagtagaatttttcattctgaaactgtaattttaaatatgattttgaaagtagattctagaaaattacaaggaatattaaaaatgttgggcagtattcaaaaagagttctttcaaaatccttatttacagtttatcttgtattcaatatagaaaaggcaaacaatgcagagatacacaataatttgaacytaatatggagatatatgaaaactgtgtttttttctatgatcgataaaatatatctattaactttaaagaaaaacaaatttaaaatgcaatgttaaatgctgataaaaataatttttaagctcttgtacacagtgttgtatactttaaatctaatatcccttttaatcttcacaattgccaatgaagtagatgctcctgtcact

SEQ ID NO: 881718 - DNA, 693 bp, Homo sapiens
aaaatgcagcacaagaacttcgtgaagcatacacaagtttccacagctgaatcgatcaggcagaagaaagtatatcagtgattacttaatgaaataaagcgagaagacaagattagagaaaacagagtgaaaagaaatgaacaaagcctccaagaaatacgagactatgtgaaaagaccaaatctatgtttgattggtgtacctgaaagtgacggggagaatgacaccaagttggaaaacactctgcaggatattaatcaggagaatttctgcaacctagcaaggcaggccaacattcaaattcaggaaatacagagaccaccacaaacgtattcctcgaaaagagcaaccccaagacacagaatcgtcagactgatcaaggttgaaatgaaggaaaaaaggttaagggtagctggagagaaaggtcaggttacccacaaagggaagcccatcaggctaacagcagctctctcagcagaaactctacaagccagaagagagtgggggccaatattcaacattcttaaaraaaagaattttcaacccagaatttcatatccagccaaactaagcttcataagtcaaggagaaataaaatcctttacaggcaagcaaatgctgagagagtctgtcaccaccaggcctgccttacaagagctcctgaaggaagcactaaacatggaaaggaacaac

SEQ ID NO: 881719 - DNA, 596 bp, Homo sapiens
agaaaaggctagacctcttcctggcccaagttaaattcttttttgtttgtttgttttaatagcttttgtttttatcactttttatttttttatatggtaataaaccttaagttttagggtacctggtgcgcaatgtgcaagtttgttacatatgtatacatgtgtcatattcrtttgctgcacccattaacttgtcaattacattaggtatacttcataatgctatccctcccctctccccccaccccacaacaggagctggtgtgtgatgttccccttcctgtgtccaagtgttctcgttgttcaattcccacctatgaatgagaacatgcaatgtttggttttttgtccctgtgatagtttgctgagaatgatggtttccagctgcatccatgtccctgcaaaggacatgaactcatcattttttatggctgcatagtattccatggtgtatatgtgccacattttcttaatccagtctatcattgttggacatttgggttggtccgaagtctttgctattgtgaatagtgccacaataagcatacgtgtcatgtgtctttatagcagcatgatttataattctttgggtatat

SEQ ID NO: 881720 - DNA, 680 bp, Homo sapiens
tctttaagatgcagttctttgcctgctgttctcactttctcttcctttacttcttctccagcttcttcacctagctaacttctatttgatgattcaaatataactttctctaggaaggctttcctggtcactgttaacatcttcccccyaccttacctcctgtttgattctctttcccattatttttgtgatagttgaaagctgtactttcccacatacaccacactacattataatttctcctcatcttcaacttctttatattgaaaatcactcaaaaccatacagttatatggaaattacattacctgctcctgaatgacttctgggtaaataatgaaattaagacagatatcaagaaatgttttgaaactaatgagaacaaatatgccacatactagattctctaggacaaaccaacagcagtgttagaatgaaagttgacagtactcaatgcccacgttaaaaaattagaaagatctcaaattaacaacctaacatcacatttagtggagctagaaaaacaagagaaaatcaaccccaagggtagcagaatacaataaataaccaaaataagagctttactgaaggaaattgagatgtgaaaaattatgcaaaagatcaatgaatctaggagctgtttctctgaaagaattaataagacagatatactgctagct

SEQ ID NO: 881721 - DNA, 601 bp, Homo sapiens
ggccaacatcatcctgataccaaaacctggcagaaatacaacaaaaaaagaaaacctcaggccaatatccttgatgaacatagatgcaaaaattctcaacataatatgagcaaactgagtccagcagcacaacaaaaagcaaatccaacacaatcaagtagactttatccctaggatataaggttggttcaaaatacccaaaccaatacagtgattcactatacacacagaactaaaagcaaaagccacatgctcatctcaatagatgcagaaaaggcttttgataacattcaacatcccttcatgttaaaaaccttcaacaaactaggcattgaaggaagatacctcaaaataataagaaccatctatgtaaaccctacaaccaacatcatactaaatgggcacaagctagaagcattctccttgaaaaccagwacaagacaaggatgacttcactaaccaatcatattcaacacagtagtgaaagtcctagccagagcaacaggtcaaaagagggaaataaaatatatcaaaataggaagagaggatgtcaaaccatccctgtttacagacaatataattctatacctaaataacccca

SEQ ID NO: 881722 - DNA, 575 bp, Homo sapiens
ggtatatacccggtaatgggattgctgggtcaaatggtatttctggttctaaatccttgaggaattgccacattgtcttccacaatggttgaactaatttacattcccaccagcagtataaaagcgttcctatttctccacagtctctccagcatctgttgtttcctgactttttaataattgccatcctaactggcatgagatggtatctcattgtgcttttgatttgcatttctctgatgatcagtsatgttgggctttttttcgtatgtttgctggccacgtaactgtcttcttttgagaaatgtctgttcatatcctttgcccactttttgatggggttgtttgtttttttcttccacatacattttgaagttgcttcattgtacttattttactcttatgtccttaaaaaattcatgaccaatttaaattgtacttttgtgaagacatatttgatcaagtgcaggtgttccgattgctaaatgcaggaaacagaatgtaaatagtgaaagcccagggtcatttttctctaacagagctctcgccattcccactttccttctgggtaaaaa

SEQ ID NO: 881723 - DNA, 611 bp, Homo sapiens
aaattgacaccgtaatgtcacagttaaaagaactagagaagcaagagcaaacacattcaaaagctagcagaaggcaagaaataactaagattagagcagaactgaaggaaatagagacacaaaatcccttcaaaaaatcaatgaatccaggagctggttttttgaaaagatcaacaaaattgatagactgctagcaagactaataaagaaggaaagagagaagaatcaaatagacacaatcaaaaatgacaaaggagatatcacyaccaattccacagaaatacaaactaccatcagagaatactataaacacctctacgcaaataaactagaaaatctagaagaaatggataaattcctcgacacatacagaagacagagtggtgagaaacctaagatataaagcaagacaaaggcaaagcagactgttgcttatccacaccttgctcatgttttgactttctaagttgtaaagtgtgaagaccttgttacagagattaataagatatggccttcaaatagtttcctctgcctttctccttctttataactaaacaagctgtacattttctcccccctgtaagtttagtttaaaaatgagcaaagaatag

SEQ ID NO: 881724 - DNA, 611 bp, Homo sapiens
aaattgacaccgtaatgtcacagttaaaagaactagagaagcaagagcaaacacattcaaaagctagcagaaggcaagaaataactaagattagagcagaactgaaggaaatagagacacaaaatcccttcaaaaaatcaatgaatccaggagctggttttttgaaaagatcaacaaaattgatagactgctagcaagactaataaagaaggaaagagagaagaatcaaatagacacaatcaaaaatgacaaaggagatatcactaccaatyccacagaaatacaaactaccatcagagaatactataaacacctctacgcaaataaactagaaaatctagaagaaatggataaattcctcgacacatacagaagacagagtggtgagaaacctaagatataaagcaagacaaaggcaaagcagactgttgcttatccacaccttgctcatgttttgactttctaagttgtaaagtgtgaagaccttgttacagagattaataagatatggccttcaaatagtttcctctgcctttctccttctttataactaaacaagctgtacattttctcccccctgtaagtttagtttaaaaatgagcaaagaatag

SEQ ID NO: 881725 - DNA, 605 bp, Homo sapiens
tatacctaatgtaaatgacaagttaatgggtgcagcaaaygaatatgacacatgtatacatatgtaacaaacttgcacattgcgcacaggtaccctaaaacttaaagtataataacaaataaaaaaataaaaaatgataaaaacaaaagctattaaaacaaacaaacaaaaaagaatttaacttgggccaggaagaggtctagccttttctcatcgctcctgggaggtatttatttcccttggtggtttggactagacagatattaacactgatttaccatggggactgaccatatcagaaagaccaatggtgtgatttaaggtacagacattgaatcatggggtactagtaaacctagagattaaatcaaccatgtagacatttatcaattatgcctatataatgaggccccagtgaaaactttgagcctcgcagggtacgatggcatgcacctgtagtctcaactacttcagatgctaaggtgggatgatctcttgagcacaggagattgggtccagcctgggcaacatggcaagacctgtccctaagaagaaatcaaccaatcaattaatcaatcaatcaatctctgaacctcaaacctgtg

SEQ ID NO: 881726 - DNA, 694 bp, Homo sapiens; identical to SEQ ID NO: 870601

SEQ ID NO: 881727 - DNA, 617 bp, Homo sapiens
tgggatatttacacatcaattctgccagtcattcactgcaggctgcttcctggtggcattaattctctggcacttttaacctgtcatgcacctgggttgcagtgtaggcttgaactacaaaagaaagctctgaggcaaagagaggtttatgcagacaagagccaggccggggaacataaaaatgacagagccctgggaggtttgagtggggcatctacagcttctcctacaagctcctaataggaatgtgagttgctttggctaccatctggttcccctctcttcctctttattgtagagtttcattgatcattccttgtctgttcacaggctccctcttattttcttctgttttgtttgctaagttctgtgtatttgaaatgtaaatttcaaaagctgttgtacttggttatgaaatagaagtaaatttttttttttttttttttttttttttgcttaatgcctttatgggctatccccaraaaaatgtttgtagattcaatgcaaacgttgtttcaaagccatttctgatactttctttttctagcatttgttatcaataaaatgagattgttggataattgagttctgcatggatgagctattaataaagaaat

SEQ ID NO: 881728 - DNA, 633 bp, Homo sapiens
cagcatcaaggccctcactggatgctgtccctacaatcttggacttcccagcttccagaatcatgagccaagtaattttctgtttattttaaattacccagtctcaggtattatgttattgtagcacagaacagactaagacaagtggcataaattctgttccttgttcataaaaatggccatcggaaatctacaaataatcccaagccataagaacttaatgcctctctttagtcgaaatttccattatatgtaataggtcaaggtatttctagggtcacacaaaagtacacctagagaatcatctttctttctgagctacacctctatttgattcatcttrtcatttactgactctttgatatttgaaaatttagctacttcatggccgtctccaatgaacatctcccattatctaatggaaaaaatagtaataatagcatgcattatcaagtgtttagtatggatcaatgactatgttaggtgctttggctgcatccttactgatcctcactagagccctacaaagaaggtattagaattttcattttatgtatcaagaaaacaagactcaaggacattaactttccaaaggatgttcataaagtaaatgactggtaatatttgaacctg

SEQ ID NO: 881729 - DNA, 624 bp, Homo sapiens
tttgctcagccagagagaaatactggcactttcaatgattcattttcttgtagaagatacatcttagaacttttgttgtatgttttctgaatcctgagagcggtatgctgatccagattgttgttgagagctgaggctatggataatgatgtgtttgtatggtgttcayattaaagggaatgtagctgaaagaggatggtgggaagaagttatgaacacaacagataggctaggcagaatgttctggtgtcgaaaccattgctatataattttatcattcttatcatctgtcctccaagattatatgtaaaagaactaaaagaataactttctctgcagatgattcttggttgtaaataccattgtttgattctcccagttatgagagggaatccttttccagtacaggaggaagtactgtatcaagccaccctgacaccctgagtactcttgggagactcttctttggagagaatggactctaggagtccccttcatggatcttagaaaaaaagatcactcgattatctaactctagttcggatctttagttctgggcttgaagctggttggagggcatcttcactgaattccttcctatcatatcagctgaactcgttacct

SEQ ID NO: 881730 - DNA, 610 bp, Homo sapiens
catccatggcttccagcatgagagttcagcattaaggattctggttttagaccatgggtcagaaaacttttttaaaaaagggtcagataacatacattttaagcttttcagggcattggtctctgctgttgtaacttgaaagcagccgtagataatgtgtaaacaatgggcatgggtgcattccaataaaacatttaccaaaacaggatgaagtctggatttggcccactggttgtagtttgccaaccctcttgatcataatttctttgaggagaaatatatttgtttccacatcctcagcctaacacaatgcatggcatataatagacactcgagagatgtttggtgaatgagaacattcagtaattaattaaaaagtaatgaaataagatatttcagaaaaggagaacattgaaaagygagaaactaaggaaatagccatggggatggaaagaataagacttggatacccactgattatgggacgtatgtgacaagtataggaaacacttctggctgaaatgatttgtaactcaccaattaattacagaacaaagatgtctaggactagtgtcaaatcagcaaatatttgacaagcacttgcttattt

SEQ ID NO: 881731 - DNA, 605 bp, Homo sapiens
catagataattttatttagacttcaaaaaagatctgtaaaatggttattatcattccattttaagatgacataattaagattgagagggtaaattttcgtaagtctcataagtaacagaactagaattagaattcagattgctttgacgtcaaaacccattatttctcctagttgtactcttcttgactcatattacrtattttgtcccacaaggataacataaacaaatctgtcaagtgccttactgggttacagatacactatgcacagtacttcttcttaaagggatcatataatccagtggtttccaaggccagctagataatagaatcacctgagaataatcataaacatatagattcctggggtgcgcccttatctctgctaatttagaagctatagagaagtgcttggacatctgtattcttttcatctcttttagatacttgtgatatagaaaaaccactgttgaaatctccccttaatgcaggacttcctaaacttttctgcacattagactcacataggaggcttccaaaactactggaagccccagatactgtgctttggcaccactgcctcaatatataaattccctttataa

SEQ ID NO: 881732 - DNA, 555 bp, Homo sapiens
tttgccccccagcatgacttgatttcagttgtagtactaaatggtgggcaaggatggagttgtctatgattctctttttaccctctgcctaggacctgaattttcaggttggctagtgaaggcccttttttttttttttttttttttttttttttttgagatggagtcttgctctgtcgttcargctggagtgcggtggcgcgatctcggctcactgcaacctccacctcccttgttcaagcaattcccttgccttagcctcccgtgtggctgggattatgggcgcacgccaccatgcccggctaatttttttatatttttagtagagacggggtttcaccatgttggccagactggtcttgaacccctgaccttaggcaatctgcctgcctcggactcccaaagtgctaggattacaggactgagccaccgcacctggccgaaggactttttgtaaaaacaaaacaaaacaaaaaaaaaaacaagcatcttttgcaactcagtctgtatgtagcccttattttatgaatgttctttattatattgatattttaa

SEQ ID NO: 881733 - DNA, 615 bp, Homo sapiens
aaactctggtttggagatgtcaagtaggatttaatagagaaagatctaagttctttgaattttgtgtttcatgttgtaactccatatctagtcatttagacatttatgttttataaagagtcttttgatctgattatgcctacatggctgaattctcttataaaacacggaaggtggttcgcaactcttctcttagtgtgcaaaggggaactcagtggagttggacgggggatgcataggacagtggggcaggtgaactggacagaaatccaggaatccagagagaaaaatctatctcaatttgcagtttaaattgacctttcaagtaagaattgcctttaaggaaatgcttttgtgtcaaaatggtttaaaacaactattttaaaccaatgttccccatcctgtgcactggggacacctagggacaggaatttatttctactttcttttttyttttcttttttttttttttttgagatggagtctcgctctgcccaagctggagtgtagtggcgcgatctcggcttactgcaaactcagcctcttgggttcaagggattcttctgcctcagcctcctgggtcgctgggactacaggcctgcaccaccacgcccg

SEQ ID NO: 881734 - DNA, 519 bp, Homo sapiens
ttaagcacacatgaaatcttggggacaaagattatgttaggacagggctttttgatctcagtcctgttgacattttgggccggattattctttgttgtaggtgactgtcttgtgtgttggaaatgtagcaacacgctgctctcaccagacagcagtagcacccccatccaagccccaacacccagaattgcctccctatgatcccacccatcccctggaagggagacaaaattgttyctcttctagaatcagtagtttagaaaaatcaacttctagatgtttcacctctacatgaagtgtttctttcaacagatatgtccgagaaagtggggtgtgaataaagtatcctttaataaggcaacacaaacatatagctgagcttcgtgactcaagcacatttctgataattttgaagtttgatgttagaaatggtgttttaatctgtgttgagatgttctgaactgcaaaatgagtgacatgaataatggcagttttcattacacaaatgtacattttcat

SEQ ID NO: 881735 - DNA, 604 bp, Homo sapiens
gtttcagttctcaagagaaatgctttcagcttttgccggttaagtatgatgctggcttgtcatagaaggctttaattattttgaagtatgttaatttcgttcctagtttgttgagggtttttaacatgaagggatgttgaatttcagcagcagtcttttctgtgtctattgagataaycatgtgttttttccttttacttctgcttatgtgatttattgatttgcatattctgaaccaaccttgcatctcaagaataaagtgtatttcatcatggtgtattagctttttcaaaaaaaatttggtgggtacatataagtgcatgtatttatagggtacatgatatttttgtacaggtatgcaaaatgtaataaccacagcatggaaaattgggtatccattcccacaagcatttatctttcctgttacaaacaatccaattatactactttagttatatcaaaatgtacaattaaattattattgactattgcctccctgttgtgctatcaaataatatgtcttattcattctacttttttgcacccattaaccatccctacctactccccacccacctactacccttcccaggctccagtaatc

SEQ ID NO: 881736 - DNA, 604 bp, Homo sapiens
gtttcagttctcaagagaaatgctttcagcttttgccggttaagtatgatgctggcttgtcatagaaggctttaattattttgaagtatgttaatttcgttcctagtttgttgagggtttttaacatgaagggatgttgaatttcagcagcagtcttttctgtgtctattgagataaccatgtgttttttccttttacttctgcttatgtgatttattgatttgcatattctgaaccaaccttgcatctcaagaataaagtgtatttcatcayggtgtattagctttttcaaaaaaaatttggtgggtacatataagtgcatgtatttatagggtacatgatatttttgtacaggtatgcaaaatgtaataaccacagcatggaaaattgggtatccattcccacaagcatttatctttcctgttacaaacaatccaattatactactttagttatatcaaaatgtacaattaaattattattgactattgcctccctgttgtgctatcaaataatatgtcttattcattctacttttttgcacccattaaccatccctacctactccccacccacctactacccttcccaggctccagtaatc

SEQ ID NO: 881737 - DNA, 604 bp, Homo sapiens
gtttcagttctcaagagaaatgctttcagcttttgccggttaagtatgatgctggcttgtcatagaaggctttaattattttgaagtatgttaatttcgttcctagtttgttgagggtttttaacatgaagggatgttgaatttcagcagcagtcttttctgtgtctattgagataaccatgtgttttttccttttacttctgcttatgtgatttattgatttgcatattctgaaccaaccttgcatctcaagaataaagtgtatttcatcatggtgtmttagctttttcaaaaaaaatttggtgggtacatataagtgcatgtatttatagggtacatgatatttttgtacaggtatgcaaaatgtaataaccacagcatggaaaattgggtatccattcccacaagcatttatctttcctgttacaaacaatccaattatactactttagttatatcaaaatgtacaattaaattattattgactattgcctccctgttgtgctatcaaataatatgtcttattcattctacttttttgcacccattaaccatccctacctactccccacccacctactacccttcccaggctccagtaatc

SEQ ID NO: 881738 - DNA, 650 bp, Homo sapiens
ggtctgtctacttcagtgtgtttttgtagtggctggtaacagtttttccttcccatgtttagggcttccttcaggagtccttgcaaggcaggcctggtagtgacaaaatccctcagcatttgcttgtctgaaaaggattttatttctcctttgcttatgaatcttagtttggccagatatgaaattctgggttggaaattcttttctttaagaatgttgaatattggcccctgatctcttctggcttgtagagtttctgctgagaggtctgatgttagtctgatgagcttccctttggagagtgacatggcctttctctctgactgcccttaacattttttccttcatttcaacattggagaatctgatgattatatatcttggggtagatcttctcatggagtatcatactgtggttctttggatttcctgaatttgaatgttggcytgtcttgctaggttggggaagttctcctggatgatatcctgaagtgtgttttccaacttggttccattctccccatctttttcaggtactccaattagtcataggttcagtctttttacatagtcccatagttctcagaggttttgtttgttctttttcattcttttttctctaatcttgtctgcctgcctaatttcagcaa

SEQ ID NO: 881739 - DNA, 582 bp, Homo sapiens
aaatacttgttatattgttatatgttatttttttaaattttattattatactttaagttttagggtacatgcgacaacgtgcaggtttgttacatatgtatacatgtgccatgttggtgtgctgcacccattaactggtcatttagcattaggtatatctcctaatgctatccctcccccctcccccaaagttatatgttattttcaagattaaatgtggtatagtactgatagtgaaacatgaattggatgacctagtttacctttttttttttttagtatttaaatagaaacacattgtaaaagcacgaaacatatcagcataggtagatcttgaaagcataaagttaggaaacactgaatgctatataacatatggacattagatggtaagtaacatgtatattttttttcctccataygtttctgtatgtaaaaattacttttattctatataactgcaactataaggtactctcaccacatacacacaggagaaaatcaactatgtgagagaatgagataatttgtttgactgaagtaatcacttcactgtgtatatctatatcaaaacatcatgtt

SEQ ID NO: 881740 - DNA, 619 bp, Homo sapiens
atatacacatagcataaaaattttcttaatattaaacaattttaatgatcaatgggaaaaattgtaataaggcagaaaatgatgaactaattatgtcaacagatgatacacagtaagaaagcataaatgacaagcatataaaaatatattctatctctttggtgatactgaaaatgccaaataaaacagtaagattaaatttctcatatatttcattagcgatagttaataaagatgatatacacaatgtcaattgaagtgtgagaaaatatttcttatagactgctggcgagaagatacttgtatatccggttcagatttaaatkgggcacagtgagacttctgtctccagccactatggagtaacttgaatcagatttgtcctcttcctgcaagccaaaagaaaactgtacaaaacatataaaacaattttttgtcagatcttggatatttgtgcagcattctggtcaatgttaaaaaaaaatgagatgattaccacaaactgggtgacataaaacaacagtgaattattctctcagagttttggaggctgtaagcccaggagcataaagaaccctccattgcctctttctctcttttgttcccagatattcctggt

SEQ ID NO: 881741 - DNA, 607 bp, Homo sapiens
gataaaatccaggactttctaatattgtgtagaacataactatactaaaattacgttgtttagctgaaattcacatttagttgagtgctccatgtttctacttgctaaatctgaccaccttattcagaagacatacaaaaccttctcaaattaactactaatttgatggcagactcatccctgtattttatagttatgcttttccccctcgtagtcatgtgtgaggttattttgataccatatgaatttccacttcccatcagccatttaacttactaagcaaatgattgttcatatctttgtctagtcaatatatcattagacttcatgaaatatttcttttctaactctaccattgcttttatgctaaaattcttctgaaaaggagaactttcttttgtcaattggggctattaagtcatgtgctcaaactgaagttcctaatagaaaggcaggataaatgcytcaacagcaataacaactatttattacgtgcctacgaagcactgaataaatcaaagatcattgcccatgtgaattttacatcgtaatgggcacaattaacaacaattagcagaataaaccaataaattatgttataaggcta

SEQ ID NO: 881742 - DNA, 661 bp, Homo sapiens
cccctgtgaaagtagtttggagatttctcaaagaatttaaaacagaactattattaaacccagcaataccaatacatactgggtatgtacccaaaataatagtctattcattctaccataaagacaaatgcatgataccagcctgggcaactaggtaaaacccagtctctgttaaaaaaaawaataataattaataaaataaaaaattacctgggcacagtggcatgtgcctgtagttcctctgggaggcagaggtgggaggatcacttgagtccagaatgtcaaggctgtagtgagctaagatcacaccactgccctccagcctggtaacaaagtgaaaccctgtctcaaaaaagacaaaacaaaagaaaaagacacatacatgtgtatgtttactgcagcacttttcacaatagcaagggcacggaatcaacctagatgcccatcaatggtggatagaataaagaaaatatggtacatatgcatcatggaatactatgccgctataaaaaaggaacaaaatcatgtctttcacagcaacatggatgtagttggaggccattgtcctaagtgaaataatgcaggaacagaaaaccaaataccacatattctcacttataagtgggagctaaacatttgagtacgcatgaatacaaacagg

SEQ ID NO: 881743 - DNA, 641 bp, Homo sapiens
gatgtaagtccttagagatgtgattgatgtggtaacagtaagcgggtgataggacaaccatcttggcatcacaatattcggcacatagtaaaccctcaataaacagtacttattactattatcatattaaaggtgggagagttctgagaaaatagaaaacagagatgtgagctgatggtcaaattcctgcagacttttatggcaatatagctttcacacacacacaaaatgaagatagggaaaagtataatgaggaattcaaatcttatcaaggccagttggaagtacggrttggctggagaggggctaagacttgtatgagggacatgcagggatcacaggcaggcagtgaggaggtaaataaaaccaacctgtaggaaaaactgagttcaaactactctgaagcttcaaggcaaaacctacaggatcagaggaagagggagataagcatgaaaggagaaaaggatttagggtacaaggactgtttgggtacctacatatgtggctgaggggttggggctttttggcagtgagaggcaatccctacttggagctacgatagatgatacagtttcagagcttaaatgaactgaaattcatgtaagatgatctcatcctgtctccccattctacaagatgag

SEQ ID NO: 881744 - DNA, 647 bp, Homo sapiens
tgattttatatcttgcaactttactgaatttatcagttctaatagtttttttggtggagtttttaggtttttccaaatataagatgatacatcgtctataaacaaggataatttgacttattccttcctaacgtggatgccctttttttctttccattttctgattgctctagcaatcagattgctctcccagtactatgttgaatagcagtggtgaaagtaagcatccttgtcttgttccagatcttagcggaaaggcattaattttttcccattcagtatgatactaattgtggatctgtcatatgtggcttttattgcattgargtgtgtttcctctacaccaagttttttgagggtttttatcatgaggggatgttgaactttatcaaatactttttcagcatcaattgaaatgattgtatgatttttgtccttcattccgttgataggatggagcatatcaattgatttgtgtatgttgaaccatccttgcttccctgggataaatcctatttagtcatgatgaataatctttttaatgtgttgatgaattcagtttgctagtattttgttgagaatttttgcatcaatgtttatcagggatattgacccgtagttttctttttttgatgtgtgtttttctg

SEQ ID NO: 881745 - DNA, 626 bp, Homo sapiens
tctgttatggtcagcattcctggctcattcaattattatgtgcttattttaaaggaattgttatgataatgttaaacaaaatgagtttcatgtttacttcttattactttgtcatttcaatgtatcttaccccaacacacttatctccccctgttgggtaatctgaaagtcaggacacttgtggttgcctgtataaagtgtgatccaaattgacccaataaagagataatttattggcttgcataactgaaatgtctagggagagaactggctctgctatcactgtactgttggaatcagatgatgttttcagggctcaatttattctctatytctggctctgccttctgctatgttggcgtcagtctcaggtccacctggtagcaagatgatgggaacaggtccagctcatacatccattcaagtttacattcagcaggagattcaatctactcccccaacggctcaaacaaatacaattaataatgatgtattgttcttgaaaaatgctaagcaagcggataagtgctctcaacccaaaaagtgataactctgtgaggtaatgtatttgttaattagctagagtaaaccattccactttttatatatacacacacatatatgtg

SEQ ID NO: 881746 - DNA, 631 bp, Homo sapiens
cctaaatgaactgaaggaaatcaaagaaaggtaacagccttttcttctcagctaagaatctgcgaaggaagagagaagagcatttctacttattaatattgcagaaaaaataatcaaaacagcattagagtggactctgtggcaggagttagttgtgaacaattgcgaatgctgtaaccttccaacaatgtgcatgccacttcaaagtctgggaccctgagctctgtaagcattaaagagtgaaaatattaactacctattttaattctcttgagtttcctggggattcgacaagcaagtggatatgaaagactcggaaataaataaagcacacgaataattatacaaagaaaccatgcacataaagctgtgatttaaattgctaggctggtgactgatggcttcaagcttcttattctagcttcatttcaatttgttcctcatcagtacctgccacctaggtaatttgggagcagrtggcaagaggaatggaggatgttccattcaaaactgccgcctacctgcctctcactctgggccatgaaagcctccctgcgtactctctaatccctcatcactagcccagaaaagtgatctttattgctcatgatataacccttattgcctaatt

SEQ ID NO: 881747 - DNA, 673 bp, Homo sapiens
tcaaatgcaataattctacagaagtaaaaacatgcaagaatcaaaagaagcaaaatggttacagagagataaacaatttaaaagacaaatggttacaaaaagagcaacggtaccaggcgcaaagctctaaatctttcattataattagatatagggagtatgcgggacccgaactcaaggctttatgttgttatctctttaagaaaaatcctgggaacttcatacattgttggtgctagtaccttatcagttaactgggctcctttgaaatactgaggatctgcttacacaggtcaactcctcgcggaagggggttgggtaaggagcccttagtgtcttgtaaattaaggggtcaactggagtttgtccggctttcccagctagagagagtcttatttacacgggaagcaaggctaggtgattaaagagacaagcaggataaaattccaagtagcgagttagagtaaaaacaaggttaggcatttcagtggaaacccmtaagtttcattggccatggccagaaacctgcagttgtctccatgtttaggtgctacccaccaagggtcccaacttggaaaagaaaagagagagagagtccctgtatggagcagaaaggaaagggagaaaaatgaatctcaaactttgggcttacctcttcctcctggctggttcg

SEQ ID NO: 881748 - DNA, 608 bp, Homo sapiens
gtagattgcaaaaattttcttccattctgtcagttgcctgttcactccgatgacactttctttttctgtgcagaagctcttgggtttaattaggtcacatttgtcaattctgacttttgttgcaattgcttttggcatttttgtcgtgaagtctttgcccatgcctatgtcctgaatggtattgcttaggttttcttctagggtttttatggttttgggttttacatttaagtcttaatccatcttgagttaatttttgcaaaggtgtarggaagaggtgcagtttcagtttgctgtatatggctagccagttttctcagtatcatttatcaattgcttgtttttgttcggtttgttgaagatcagaaggttgtagatgtgtggtgttatttctgaggtctctgttctgttccattgttctatatgtctgttttggtacaagtaccatgctgttttggtttctgtagccttgtagtatagtttgaagtcaggtagggtgatgccttcattttgttcattttgcttaggattgtctttgctatacaggcacatttttggtaccaaatgaaatttcaagtagtttttttctaattctgtgaagaatgtca

SEQ ID NO: 881749 - DNA, 656 bp, Homo sapiens
ctatgcacgtgagctattattagtaactcaaggatttcaacatcaaaaaagtatattcagacttcgaaggcatcactaaattttgcctttagtaccatcatacttcacttgaattctctaaactccgtggcctacarggagttatatggccttctgtgcattggaatcatagtataatcaatccttttgtttctccacatgtattaggtatctctacactgggatttgctgtctgtcttgctattaaaaatagggaagagaatcattgctgatatttctgctagggaaagctagaaatctagttgtgattgttttcaaacagcctgagagcatggcactgataattttagaattaaattatgttttaccatgtaaattagaaagtgcttttgtgatgagtttttctaatacagttcctgaagaggagttgatgctgcacagtgaattgagggccaaatcagcaatacaacctgggtcgcctggatttcagcgcatggcctttccaagataacatgctactctctcggtatgtaaaaagaaattttttaaagcaaaattgcaattgtctatagtcagaattgttgggtcctctctcattcctcatccaaggcaatgtgccctttgaagttcagtttgagtctcactttcttcatgca

SEQ ID NO: 881750 - DNA, 662 bp, Homo sapiens
actttttaacaatagccattctggtgaggttgcagtgaaccaagattgcaccgctgcactccagcctgggagacagagtgagactctgtcttgagggaaaaaaaaaaaggtattctgactggcatgagatggtattgatttgtggctttgatgaacatttctttaatgatcagtgatgttgagctttttttcttatgtttgttggctggaggtatatattcttttgagaagtgtattttcatgtcctttgcccactatttaatgaaattgttttttttcttgtaaatttgtccaagttcattgtagactctggatattagatgtttgtcagatggatagattgcaaacattttctcccattctgtaggttgtccgtttactctgataatagtttcttttgttgttcagaagctctttagtttaattagatcccatatgtcaatttttgcttttgttgsaattgcttttagtgtcttcatcatgaaatctttgcccatgcctatgtcctgaatggtattgcctagatcttctcctaggtttttttttttttttatagttttgagttttacatttaagtctttaatccatcttgagctgatttttatatatggtgtaaggaaagggtctagttttaatcttctgcatattgctagccagttatc

SEQ ID NO: 881751 - DNA, 635 bp, Homo sapiens
aagatacaaaagacagtatccttgccttagaagagctcagtctttttagaaagacaggtaagtagatgattataatataagagctaagataaagatatgaatagagttatatgactttgtcccactgtctctatgtyccttctgtccagcacactgtccagaacacagaggcgtttggtaattttattgttgctgcttttgttttaaccaatcacagtgttctttctatagacagaattttcccaataatgggccattctccctttcttctgctccatcttttcttgctccattattttcttccataactcttgagtctcctggacatataacctcaaaaaaaaaaaataatcaagagcatggacgaaaatcacaagggtaacaaactgacatgctagctctgagtccctcctcaatctttgcataaaaatcacaggaggtgctgttgctgcctctttccacatgttctgtagccctgagtgccaagatacatctgcccctgatggccccaatttgtagtttttccagctgtttctgcttctgctgccttggctactggtaatataggcaggtctcgctaatagtacttaagatcaatactgatgttttatccaaatatggtcaagttaatgcta

SEQ ID NO: 881752 - DNA, 598 bp, Homo sapiens
aatagtaataaaatattttagaaatctgtaaatatatatttatttgcctaagccagaatactaaatagtaaatgggtaatttgagcagactagaaccaattatcatatatattaacatatatatgacacattatatgtctatatctttatacaatcattacatgagattttacgttgtccttaaaataacaggtctctgaagagtagcttaaagaaaaataatgctgctttttgaaacaaattttttcagcaatgagctgtatttttatttttaataagttctctttttagagtaaaatgtaaatgacaacatttgcctytagattagcattcactcagggctatgttcttttctttccctgtctcttcacatacctctctttgctactcttctacatgatcaagtagtcatgacaccgtgacttatcatctatctcccatcaattcagccatcgttccactctgttccattagtatttcctgctgtgaaaatccctgtagaatctatggtaaactctcagaagtttccacattctgctttggaaagcagtgacccacgatgttattaaaaatcagtaacttacaaagggttttttcc

SEQ ID NO: 881753 - DNA, 625 bp, Homo sapiens
ttatcaaacaggcttgaaacagatgggacattataaagccagaacccttctttcctgaaactttcttctagtgctggttttcccatattatcaccagcttattactggttaatgtgcttctcttctgcaaattttgcttattcagattcacttaacatgaaccatgcacacaatattacatatcaatcctatgtctttcatccatgatatatataatttttagtaaacatgtccaagctgttttctatattaagtaatatgtctaagatatcaatgcagaacaataataactgacttaaaaatcatccacaaaactcaaacattgttcaaagaattttttattgkttattatctaaagataaataagtatgccttgcatttggattggggttttcttcccatattcaaaatgctttcttatcatccacctcctatatctctacaacatccctgaaggagggcagggcaagaagggtacacaaaacaatggactaagatagaatgaggtcttctggttcattgttaaactacgaagtttaagatttagagcagaagatacaaggattagcaggactgtttctatcttaagtagttgtcagtctagaaggggagaaaaatatgtaaa

SEQ ID NO: 881754 - DNA, 555 bp, Homo sapiens
aacattcaactcctcattacttatgcaaatttctgcagccagcttgaatttctcctcagaaaatgggtttttgtttttctatcattgtcaaattttacgaacttttatgctctgctttccttataaaactgaatgcctttaacagcacccaartcacatcttgaatgctttgctgcttagaaatttcttctgccagataccctaaatcatgtctctccagttcaaagttccacaaatctctaagacaggggcaaaatgccaccagtctttttgccaaaacataacaaaagtcacctttgctccagttcccaacaagttcctcatctccatctgaggccacctcagcctggactttattgtgcatatcactgtcagcattttggtcaaagccattcaacaagtctctaagaagttccaaactttcccatatttttctgtcttcttctgagccttctaaactgttccaacccatgcctgttacccagttccaaagttgcttcaacattttcaggtatctacagcagtgcccaactttactggtaccgatttactgta

SEQ ID NO: 881755 - DNA, 555 bp, Homo sapiens
aacattcaactcctcattacttatgcaaatttctgcagccagcttgaatttctcctcagaaaatgggtttttgtttttctatcattgtcaaattttacgaacttttatgctctgctttccttataaaactgaatgcctttaacagcacccaagtcacatcttgaatgctttgctgcttagaaatttcttctgccagataccctaaatcatgtctctccagttcaaagttccacaaatctctaagacaggggcaaaatgccaccagtctttttgccaaaacataacaaaagtcacctttgctccagttcccaacaagttcctcatctccatctgaggccacctcagcctggactttattgtgcatatcactrtcagcattttggtcaaagccattcaacaagtctctaagaagttccaaactttcccatatttttctgtcttcttctgagccttctaaactgttccaacccatgcctgttacccagttccaaagttgcttcaacattttcaggtatctacagcagtgcccaactttactggtaccgatttactgta

SEQ ID NO: 881756 - DNA, 610 bp, Homo sapiens
tgcattatacaaaaattaactcaagatggattagacacttaaatgtaaaacttcaaaccataaaagccatagaagaacacctagacaatatcattcaggaccttggcatggacaaagatttcatgacgaaaatgccaaaagcaattgaaacaaaagccggacaaatgggatctatttaaactaaagagcttctgcacagcaaaataaactatcatcagagtgaacaggcgacctacagaatrggagaaaaatgttgtaatctacccatctgacaaaggtctaatatccagaatctacaaggaacttaaacaaatttacaagaaaaacaaacaatcccatcaaaaagtgggcaaagggtatgaacagacacttctcaaaagaagacatttatgcagccaacaaacatatgaaaaaagctcaacatcactgatcattagagaaatgaaaatcaaaactacaatgagataccatcttatgccagtcagaatggtgattattaaaaagtcaagaaacaacagatggtggtgaggctgtggaaaagtaggaatgcttttacgctgttggtgggaaagtaaattagtttaaccattgtgggagacagtgtggcaat

SEQ ID NO: 881757 - DNA, 649 bp, Homo sapiens
tggtcatctcgccccaattaaaggcaacacattgcaaaaattctctaagcctggagttctgatggtctaaattgcactggggtatgaagggctggtcaaagtatttgcattttgaaggcactgttagagagaagccagtgctaaccggtgttgcaaatgtacatacttccagggaacatgaagtgggctgggtgggagacatcagggagtagtggagcctgtggctaactggagcacatgcccctcctaaagacattcacattcagatgtttccaaaatagcgttccatccaactaaatcacttgggccactagtataggagctctgaccaaggaaatgggtttcagcctggttagtggagctgtctgagtggcaaagaaggtcttaatcagaatgtaaaatagtgactcccaaactctcagatgtataakaattccctgagaaggggaacaccagctccttgaccctgccctcaaagactgggagtctatagctcttgggtggtacccaagaggctgtatttttaataagctctccaggggaaactgaggcaggttgtcttctggttctaagttggctaccctgagctggtaaggccaccccagtgtgctggactgggtccttacccttgctcagcagataactggag

SEQ ID NO: 881758 - DNA, 717 bp, Homo sapiens
ttggtcttttcacatagtcccatatgtcttggaggctttgttcatttctttttactcttttctctaaacttctcttctcactttatttcattaatttgatcttcaaccactgataccctttcttccactagattgaatcggctactgaagcttgtgaattcttcacgtagttcttgtgccttggttttcagctccatcaggtcatttaaggtcttctcttcactgtttattctagttcgccattcgtctaatcttttttcaaggtttttagcttccttgcaatgggttcaaacatcctcctttagcttggagaagtttgttattaccgaccttctgaagcctacttctgtcagctcgtcaaagtcattctccatcccgctttgttccattgctggcaaggagttgcgatcctttggaggagaagaggtgctccagtttttagaattttcagcttttctgctctggtttctccccacctttgtggttttatctacctttggtctttgttggtggtgacctacagatggggttttggtgtggatgtcctttttgttgatgttgatgctattcctttcygtttgttagttttccgtctcacagtcaggtctctcagctgcaggtctgttggagtttgctggaggtccactccagaccctgtttgcctgggtatcaccagcggaggctgtagaacagcaaatattgctgctagatccttcc

SEQ ID NO: 881759 - DNA, 581 bp, Homo sapiens
agtatagactaagggactggtacactgaaaaactaccttctgtttcagcagagggtaatcagggtgtcagcaatgctgttgttactactaaggtcaccaaggacctagaccaagaagttccatccagcaacaccttattacagtgtacagaggtcaacagtaagaggtaaaagaaaaagataaccttttatcagacttttacattacattgmtaatttttattacagaatatttttcattcttttattttgatccactgatatttatttctgattctgactctgcctactgttattcaccctacttgttaattctaatctattctttttatttgtaaaagcataacttttctgaggcatagttgtgtgtgtatatgtgtatttaacctattctagaaacattaaattagaagagatagagattacagattataatagcatgtaaagagtttcatacagttaatacctgagagtctgcacagtggggaactctgaagtaatatgtaaggtgtcaagaacaagcaggtcaggactgtggcactcaaagggcaggtaactagcttttcagtaacatttttaagt

SEQ ID NO: 881760 - DNA, 665 bp, Homo sapiens
tacggcagtaactgtcacatagtaaatattcagcaaatattcttttgagagaatgaatgaagatgcaatactattaaatacattcacaatttctcaccttgttcttttcactcaacacaatcactttgggttgttttttggtgtgtgtgacaagtattcttctaaaagaaattatgatttctttaaggaatctagtctaaatacacatgaaaggaaagggactactgaactaaattatttcagcaagacatttagagagtattagtgattttataataaataatgctattgtgatttaagtgttcaaagaaaaaagwtgatgattttcccatttgtagttcaaaaaaaagatttcattaatcacattatgagtcaaacccaaggatgattatcgatgactagaactattagaaaaagcattcgacaggtaggcagtaaagaagggtgggaagttcagagtaatcacataaacaaagaaaggaactatctagaaggcagacccatcaggggagggaaatttcaagggaagaagactggaccctgttacctaggaaataagtaaggccacagcacggggagaaaaaaagacttgatacttttcagagtacaaaaaatctgtctttgttaatgcaaatgcatgtaatgcacagtagtttgagagaggc

SEQ ID NO: 881761 - DNA, 570 bp, Homo sapiens
tttatttatttatttacttttccccagtattttatttattgggttgatggttcaggcttcagggaagtagagaaggtgtccttgggtatgaactggttgtggctaaagcaggtgggtcaatgtaatacccaatggtgggcagaggttcagcattgaacaggtttctgagggagctctcggtgagatgctgcaaagtcttctcagtgggaagagcgggagctacctcagctgccctgctaggccagcaggaaagstatccacttcccagacacactcctatctcagtgttctggctgttcaggtcagacaggcacctcttttcatttgtaagaatgttgatgttccaagtagggaagatttgtgactctgcctattgtgcaagctgagcctggaagatgctcttcctgtgaggatgcaatcaccctgaagtattccagagaggctggttataggtgtacccacaccacatacctgtgtgagaagcccccgctatgcctgcagtggtgaatgaggaagataagaagcccccttctccataacccttcatgaggaccagggctgccttactgt

SEQ ID NO: 881762 - DNA, 610 bp, Homo sapiens
tcaatgaataggtaaaatttgaggaaagaagctggtagtttcaggttttgtgttatgttctttctttgaataaaatttaggacagaatgaaattactttattcactctttcaattttcttctttgaaaatgttaagattataatgcttattatgccactgacttactgatttggactgatgattttaagaattgattagagctttggggaagattaatcttctggaagaatttttattgttacattatattagctaaattatagttgatttcttgattttatatttcagccaggcctttttttcattaagctaatgtaactccaggttaagtcactgtattgaagtaggattgattttcttgagctgtggaacataagtcttttcccactaggtaaacaatagcaattaaatgaaatttggcatagaagggaaatgattttyccacagttttgtcccaccagcatacaaactggtctgatgcctcacaagccagagggcttagtgcagctttggtgatataccactcagcataatctggttgtcaaaaagctgtgcctggagcttgtgctgagaaagatcattagcatcctttggtgggagatatattac

SEQ ID NO: 881763 - DNA, 598 bp, Homo sapiens
cccagcccccgggatgtttttctgtctcctcgagacctcctgcactccccagctacactggctgcttctcacctttgatttttaactaccacccacccagatgcaaagaacttggaacatacacctccagcctgactttcccctgaactctagaccatgcatctgaccacctcctagacttctgtccctagaagctccatggaccggcagctcagactcaacatgccccacctggaacccatcatttccccctagccggctccctgtgtactcctgacctcaagggctgacaccactatcttctgcagagtcacactgactccccttcccctcgtgatctgctgtgggttgaatcatgccctccaaaaagacaagttgaaattctaagtcttcatacctgtaactgrcacagtatttggaaatagagactttgcagatgtaattaagatgtaaatcaactcatgcctgtaatcccagtgttttgggaggcagaggcaggacaattgcttgaagtcgggaattcaagaccaacctgggcgacatagcaagacacacctctacaaaaaaaaaaaaaaaaaaaaaaattatctgggcattg

SEQ ID NO: 881764 - DNA, 614 bp, Homo sapiens
ggaaaggacaaagtctgacttactgaaattttgcagtctaggtgaaaggaggttttttcagtgaggatctttatgaggactggctgagaataatgatagtttaggattggtgaaaacagtaaggagaatattttgaagagagagtgagtcatgaatcctaggcagtaatttgttgatgatttcgattgaaaaggtaatgggtcttgagaaatcctgtaataaaaaatagtcctttggaacctttatcttcctgcaagagtcttttgaagtaggaaagttatgctaacaaaggctatgaaagagtgaaatcatgttaagatgggtttgcttcttagtgtccaagcagtgtgaaggcatctttaaacagtatctgacacataccatacacatagatgtaastgttgttttcatgtttattgatattgttaaattaagcatgccaaattttgtgtaagtccttcaagcgattaacatgattcttttttttttctctttctctattttgagaaagataagtctgtgttcttctgtgtccctctcctggtcatagtaatatttccccatccagtttagctatggtaagcaactgacactttgtgccgaggaccgcacag

SEQ ID NO: 881765 - DNA, 633 bp, Homo sapiens
ttttgttgcaattgcttttggcatttttatcatgaagtctttgcccatacctacatcctgaatggtattgactatgtgttcttctagggttttcatggttttgcgttttacatttaagtctttaatccatattgagttaatttttgtataatgtgaaggaaagggtctagtttcagttttctgcatatggctagccagttttcccagcaccatttattgagtaggagatcctttccccactgcttgtttttgtcaggtttgttgaagawcagatggttgtaggtgtgtggtgctaattctgaggtctctgttctgttccattggtctatatgtctgttttggtaccagtatcatgctgttttgcttactgtagccttgtagtatagtttgaaatcaggtagcatgacacctccagctttgttctttttgctaagaattgtcttggctatatgggatcttctttgattccatatgaaatttaaagtagcttttcctcgttctgcaaagaatgtcagtggtagtttgatggaaatagcatcgaatctataaattgatgcaaacatctttaataatatactggcaaaccaaattcagcagcacatccaaaatcttatcagccacgctcaagttgga

SEQ ID NO: 881766 - DNA, 632 bp, Homo sapiens
aaaaatacattttttaaataatttaggagctctagtccttttttagggaaaagctgtaagctatgtcagacctattggggtatcttttatttaatatactcaaatgactgttagttttacatttcaagctttaaggtgggtaggtattaaaataatgtttatcactaatgacccatcaacaacaacaaaaatccacgatacatagttatgcacaaatattccaaattatttaaatataaatagtatgctagaaagtattgtacaatgtagggaaatattaacattattgttacstcaacagttgatgatagcaattgactagagaaacggcttgcccaagctgtgctttttttgaatgcaatttcagtaatatagaagtgcatattctaagaaatatgggaaaatgtatgaaattgttacataaactgctttgactaaagtagagattgtgatgaagtataatctcctcaagtaaacagttattatgttaagaatggagaagtaatcacacaatttaaatgttttgctttggcagttccactcatattttccaaccctgcgtttccctaaggtgatgcattcctgctggtctgcagcttacagaaacaggcaaggggccagtacatacagga

SEQ ID NO: 881767 - DNA, 620 bp, Homo sapiens
gacaaagtaaaagaaatagcccacgtgttatgtatgtgtcctgatagacaaaactgaggtacatgagataacaaagtatctattacatgaatctattatatatataaaatttaaaaattaacatgataaaataagcacttctaatcatactgaaagtgtattttgctaaagagtttagttcaaatattagtggctatggagaaatttcctgcaattgaaatcactttaaaatktatttagcattctacaatcaatctacataattcaccagattaacagaataaaggataaaatatacaattatctcaatatatgcataaaatgcacttgatgaaacccaatacccattcttatttttaaaaatgtcaacaaactagagggaaatcttttatctggtgaaaactgtcaatttttttaaagctgccattttaacatcatacttaagagtaaaatattcaacatcttctccatgagtttcagagcagggcaaggatgtccaatattgcaatttctattcaacacttaactgagcatttcagccattgcaataaggcaaaacaagagaaaagttatgagaaaatgacataaagttgtcattaatttcaactaacacaattgtg

SEQ ID NO: 881768 - DNA, 628 bp, Homo sapiens
aataattaaaatattcccaaaatattacatgggacacactcattctaaaatattatttattatttatctgaaattcacacttaactaggcatcttgcatttttatttgctaaacccaaaaacacaacatatgtagagatcccttcccctcaccttagaggaaagcctgcttgatgacaaaaatatgaatttaccagaaacctcacttagccctcatattcataggtgaggagctatagtcaagaaacctatccaatgcaaagaaaaccctcaccagctacctagtcagccagccattcctcgataaacgcaaawaaccaaacaaaaattgccaacatttgaggaaaggcaaaataggccataataagaaagaaaacaattactggacttggtaatgtgggcagtagaagaacatgtaaaaagaagctctagttaatattctcctagatatattaaagaagagtccacccataaatcgaagagatgatgtgaaatagtcataaaacaggaaaaagtatatagaaatcaaaattttaatttataaaagataaagtactgattttaatattaaatggctatagtggaatacagcattaggaatttataagttcaaggtgagaaactattcc

SEQ ID NO: 881769 - DNA, 606 bp, Homo sapiens
cctgagtgacagtgtgagagaccctgtcaaaagaaagaaagaaacagagagagagagagaaggaaggaaggaaggaaggaaggaaggaaggaaggaaggaaggagagaaggaaagaaatagtcaaatagacaaataggcaatgttacccttttggagaagcacttttgtttttgcagaagattttaattctgtaattgctttaaagtcaatgatatataggaaatatcactagtaatggctgacactgaaatcactgctatatccattaagctgtatttcttgctctttgacyggattcatagtaacacacactttgtacaggcataatttttcaggtgcctaatgtattcctaagtattaaagagtgctgtttttaaaagttgtttctttgggttaaacgggggttttaaatttattcatatttattgagcagtacagtatctataccataataataatatattataaaagaggtataaggcaaattaccaaatatcaataaattaatatttttggaggcaaaagtgttatattgcctaatactttgatggatattctaatttttttaatttttaattttatgagtacatagtaggtatatatat

SEQ ID NO: 881770 - DNA, 586 bp, Homo sapiens
tgccattcattagggttctacccttgtgacccaagatcctgcctccaaataccatcaccacaggggttaagatttcaacaaatgaatatgacatggacactaatattcagaccatagcaccactataatcacttctttgcatataccctaaacgttttttcctctttatcaattgatgaacaaaatgtcaactctagttatataatgcaattctcctacttcaggcctgcacccctacaggtgaacatacttaatatgtttgttcagacttccatactggcttgttttattttaaattcattagcatcagcctccagtgagttcttaatgctacaaaataatcatattatgttwccctgacttataccttctctcaacccactggatgattctttcatactttcccttaaggtttaatagctttctctcatctgtattctcaggagataactctgactataaaagtagaagcgatcaacatgaactttcaaaaactccctctgtgatatctccctagctgcctggatctgtagtcatatgctctgccatcactcctttacctctggataaacatctgttctctttg

SEQ ID NO: 881771 - DNA, 644 bp, Homo sapiens
tcataagatctcgtgagaaatcactatcatgagaacatcatgaaggaaactgcccccatgatccagtcacctcccaccaggtcccttctctgacaacatggaggttacaattccagatgatatttgggtggggacacagagccaaaccatatcattccacccctggccccttccaartctcatgtccttctcacatttcaaaaccaatcatgacttctcaacagtttctcaaagtcttaacttattccagcattaactcaaagtccaagtccaaagtctcatctgagacaaggcccttctgcctatgagcctgtaaaatcaaaagcaaattaagtacttctgagatacattgggggtacgggcattggataaatgctcccattgcaaaagggagaaattgaccagaacaaaggggctgcaggtcccatgcacatccaaaacccaacagggcactcattaaatcttaatggtccaaaataatctcctttgacaccatgtctcacatccaggacaagctgatgtaagagctgggctcccaaggccttgggcagctctgtccctgtggctctgcagggtccaacccctgcggctgcttttttgggctggcgttgagtgcctgtcgcttttgcacgtgcacagtacag

SEQ ID NO: 881772 - DNA, 644 bp, Homo sapiens
tcataagatctcgtgagaaatcactatcatgagaacatcatgaaggaaactgcccccatgatccagtcacctcccaccaggtcccttctctgacaacatggaggttacaattccagatgatatttgggtggggacacagagccaaaccatatcattccacccctggccccttccaagtctcatgtccttctcacatttcaaaaccaatcatgacttctcaacagtttctcaaagtcttaacttattccagcattaactcaaagtccaagtccaaagtctcatctgagacaaggcccttctgcctatgagcctgtaaaatcaaaagcaaattaagtacttcygagatacattgggggtacgggcattggataaatgctcccattgcaaaagggagaaattgaccagaacaaaggggctgcaggtcccatgcacatccaaaacccaacagggcactcattaaatcttaatggtccaaaataatctcctttgacaccatgtctcacatccaggacaagctgatgtaagagctgggctcccaaggccttgggcagctctgtccctgtggctctgcagggtccaacccctgcggctgcttttttgggctggcgttgagtgcctgtcgcttttgcacgtgcacagtacag

SEQ ID NO: 881773 - DNA, 637 bp, Homo sapiens
taaaatttgaaggcccaaggaagaataaaatatcccataaaatttgattaggctcacaaaataaatctgacacaggtaaaagatgcattttcggaatgagaggcatacttgaaaaataaaaacatttgtaatataaccctaaaataatttttttttwaaaaattggacatcttacattgcagtctgaaaacaaagttgttaggttttatgattccttgaaactgaatattatacattttaaggttattttaaattagaatatatttattttcctctcactacatttatagtatttttatgctgtggtgctaagactataggttttgctttcatgtacagcaatatgattttaacagggcttaatctgcagaaaactactgtcctttaatgactctctttctaaagtgtactttacagacaacaattcctactctatcttgcatccagggttggtcctgttactattttccaccaagggcatatgtacagattgcttactaagtgagtatactttctccattctcttttgtctcattagagacaatgcagagtttggtagaaccacaagatgaatgagatctgggttcttgaatcactacatggaagaaagccactcaccttgacacatcaggtctaa

SEQ ID NO: 881774 - DNA, 654 bp, Homo sapiens
  misc_feature 23: n = A,T,C or G
tgcctccagcattgttcttttgncttaggattgtcttggccatttgggctcttttttggttccatatgaactttaaagtagttttttccaattctgtgaagaaagtcattggtagcttgatggggatggcattgaatctataaattaccttgagcagtatggccattttcatgatactgattyttcctatccatgagcatggaatattcttcaatttgtttgtgtcatcttttatttcattgagcagtggtttgtagttctccttgaagaggtcgttcacatcccttgtaagttgtattcctgggtattttattctctttgtagcaattgtgaatgagggtacactcatgatttggctctctgtctgtctgttattggtgtataagaatgcttgtgatttttgcacattgattttgtatcctgcgactttgctgaagttgcttatcagcctaaggagattttgggctgagatgatgggattttctaaatatacaatcatgtcatctgcaaacagggacagtttgacttcctcgtttcctaatcgaataccttttatttctttctcttgcctgatttccctggccagaacttccaacactgtgttgaataggagtggtgagagagggcatccctgtcttgtgccagttttcaaag

SEQ ID NO: 881775 - DNA, 655 bp, Homo sapiens
gcttggtgcagagctgagttcaagtcctggatatccttgttaaccttccgtctcgttgatctgtctaatattcacagtggggtattaaagtctcccattattattgtgtgggagtgtaagtctctttttagatctctcaggacttaccttatgaatctgggtgctcctgtattggatgcatatatatttaggatacttagctcttcttgttgaattgatccctttaccattatgtgatggacttctttgtttcttttgatctttgttggtttaaaatctgttttatcagagactgggattgcaactcctgcttttattttyttttgctttccatttgcttggtacatcttcctccgtccctttattttgagcctgtgtgtgtctctgcacgtgagataggtcttagaggagagtttcttatgattgagggcacttgccccaattcttctctattactctataaaaaaatggaatcataaaattttctttcagattgttaaatattcttcaacttaattttaatagctaatggcaattgccatgtatggatggatatgagaaagttttcagaaaaatgagatatttatcttgaggaagatttggctggtgggaggaggagacataatagcttttttcagatattcagtgtaagtga

SEQ ID NO: 881776 - DNA, 660 bp, Homo sapiens
tatatgtcttacaaatgatcttttatgatttgatgatgaaagttggagtcctatttttgaaatagacaagagaatgaaaaaaaaatcattgaatttttagagaaacaatgtagttaatggaaagagcaattggctatgtttttgcatctttgtgaccttaagccaaagtttcttttttggtccttagtttccttacctgaaaagtggaataatttctggcacatatggtttggtacatcacatgaaatatatatatgaagkgcccggttttgtgtctaatatatagtgctgactcagaattttataattcttaatgaggttaggaaaaaaaagaaaagaaatttaatgattaaatatctaaatatcatttctcccacttctctcttctcagtcagaatatatttctccaattcttagtcacttggcctgtcactcagaagccataatagcactaaagtcaattttgctaggctctagagaatttaacctgagcttcaaattagttctccttttgtattctgcagcaggaaacaaccacttcctagacttgggtgggagaataaatattatgaacttgtctaggaataagtcaaccctatcaatgaaaagatcatgattttaactgagtaatttaggacagaggttggcaaactatggccc

SEQ ID NO: 881777 - DNA, 574 bp, Homo sapiens
gaaatgattaagatacatatatattgtattcacagatttcataatgtattaagagggtgtgatacaacataaatggctatacatcaaagaagaaaataataaggatctgaggagagaatacattcaaatggcatgggtgttaggaagagcgataagagaaaagacaaaataatttaggggagrcatgcactttgattccttagtatatagatatgaaatgaatgagtaaatagatttggatgcattttttatgcatttgcaactacaagagaggtagaaatctgcgtagtaaaagccaaaaattaactagaagaagttctcctatatttggaggagtaaaactgcaaataaatcatttgctatgtttaaattaatatattttaaaactgctgtttgaaatttaacattttagaattcacataattcattctatgcacctatttgttcaaagaaaaggaagaaaagaacaatgtaggactctagaaagactgccagaggaaggtactgggatttgctcccatgcagtgtcttccttgaatttcactttgcctttgaggatgagaacagggcttga

SEQ ID NO: 881778 - DNA, 533 bp, Homo sapiens
tagctggttattttgctcgttagttgatgcagtttcttcttagcctcgatggtctttacaatttgtcatgcttttgcagtgggtggtactggttgttcctttccatgtttaatgcttccttcaggagctcttgtagggcaggtctggtggtgacagaatctctcagcatttgcttktctgtaaaggattttatttctccttcacttatgaagcttagtttggctggatatgaaattctgggtttaaaattcttttctttaagaatgctgaatattggcccccactctcttctggcttgtagagtttctgctgagagatccgctgttagtctggtgggttgccctttgtgggtaacccgatgtttctctctggctgcccttaacattttttccttcatttcaactttggtgaatttgacaattatgtgtcttggagttgctcttctcaaggagtatctttgtggcgttctctgtatttcctgaatttgaatgttggcctgccttgctagattggggaagttttcctggataata

SEQ ID NO: 881779 - DNA, 689 bp, Homo sapiens
ataaactcccaaagaacatgcaattgtttatactgactcatgggcaataactcatagtttggcaatatgtttattgttttgaaaggaactggtttgctagagtgctgacagaattgtatagaaatttatgtagatgcatctctcataaaggacccagcaaatgataatgctttctcccatgtgaatgttcaacaatatttttcctaatataggggcagctctcaacagtcaagtaaccgaaatggtccagtgtgaatgtaagtcttcttcctcagcagagcagcttagccaatgggttyatagacacaatggccatgatagcagaaatgagtttatacatgggctcaaaaattaggatatgctctaactgaggcttctctggctattactgttgaccactgaccaacttgccagccttaatgacatactctgttaacttgatatgagaacatatttcagggtatcagccaaccatttggcatgactaattacatttgacttctagatatctgtttttctgatttcatactgatttggacttggatttacattctctgcctgctttgcttttgccaacaagagcatctaaggacttactgagtatcttattcaccatcacagaataccttatatttccccccaaaaattattttactgtaaattatggtataactcaatggtccttattc

SEQ ID NO: 881780 - DNA, 610 bp, Homo sapiens
tgcttttgacacttctgaagttgctgaaacttattttgcaacctaacatatggtctatcctagagaatgtttcatgtactgattagaagaacatgtgttctgcagcagttgaataaaatgttctataattatcagttaggtccatttgatctagagtataactccatgtttctttgacaaatttctattgggatgatattttcattaattacagtgggatattgaaktcccctaatattaaggtatgttagtctatgtcttttttagtattaatgtttgttttatatatttaatatgactggtgttggatgcatatatattcataactgttatatcctcttgctgaattgattgctttatcattatatagtgaccttttattctcttttcacaaggctatattatctgttacaagtacaaccacttttaatctttcttgatttccatttgcatgtgatttttttccccattcctttacttttagtctacatgtgtctttatagctgaagtggatatctagtagacacatacagttaggtcttgttattccatccatttggccactccgtcttctaattggagctattagttcacttacatttgataatat

SEQ ID NO: 881781 - DNA, 657 bp, Homo sapiens
aaatttcaaggaaagaaaacttcaggccaatattactcatgaacagagatgcaaaattcctcaaccaaatatcattacattgaatccagcaatatgtaaaaagaattgtacaccttgaccaagtaggatttattccagataggcaagtctgattcatcatgcaaatatcagttaatgtagtctatcatatcaacaggctaagcaagaaaaatcacatgatcatatagatgcagaragatcaatttacaaaatccaacttttagtaaactgtgaataaaaggaaacttcctcaacttgataaaacttaactacaaaaagcctacagctaacatcatacctaaaagtgttttgatttttaatccactcagccactttttatcttttgatttgtaactctaattcatataatcttaaaataattattgatagggaaatatgtactattgccactttgttaactgttttctgtttgtcttatagttcttttgtccctatttttctcgctttaaatcttcctttatatttcatgcttgttgttgttgttgttgctgttgttttggtactgatggacttcgttcttctctctctctctctcttagcttttatttttgattcgggaatacatgtgaaggtttgttacataggtaaattcatgtc

SEQ ID NO: 881782 - DNA, 657 bp, Homo sapiens
aaatttcaaggaaagaaaacttcaggccaatattactcatgaacagagatgcaaaattcctcaaccaaatatcattacattgaatccagcaatatgtaaaaagaattgtacaccttgaccaagtaggatttattccagataggcaagtctgattcatcatgcaaatatcagttaatgtagtctatcatatcaacaggctaagcaagaaaaatcacatgatcatatagatgcagaaagatcaatttacaaaatccaacttttagtaaactgtgaataaaaggaaacttcctcaacttgataaaacttaactacaaaaagcctacagctaacatcatacctaaaagtgttttgatttttaatccactcagccactttttatcttttgatttgtaactctaattcatwtaatcttaaaataattattgatagggaaatatgtactattgccactttgttaactgttttctgtttgtcttatagttcttttgtccctatttttctcgctttaaatcttcctttatatttcatgcttgttgttgttgttgttgctgttgttttggtactgatggacttcgttcttctctctctctctctcttagcttttatttttgattcgggaatacatgtgaaggtttgttacataggtaaattcatgtc

SEQ ID NO: 881783 - DNA, 635 bp, Homo sapiens
tttttttttgagatggagtctcactctgttgcccaggctggagtgcaatagtgtgatctcagctcactgcaacctccacctccctggttcaagcaattcttctgcttcaccctcccaagtagctggaattacaggtgtgcactgccatgcctggctaatttgtgtgtgtgtgtgtatttttagtagagatggggtttcgccatgttggccaggctggtctcaaactcctgacctcaggtgatccaccctcctcgacctcccaaactgctcagattacaggcatgagccaccatgcctggccgcatctccatttctttatatgccaagcaaggataagaattccaaactctatagactttttaaaawtttttttaaatttttaaattttaaaatttaaggccaggctggagtgcagtggcacgatcttggctcactgcaacctctccctcctctgcaaccactgcaacctcgctgcctcccaagtgattctcctgtctcagcctcccgagtagtgtgattacaggtacccaccaccacgcctggctaatttttgtatttttagtagagattgggtttcaccatgttgccccggctggtcttcaactcctgaccatatgtgatccacctgcctcaac

SEQ ID NO: 881784 - DNA, 667 bp, Homo sapiens
aatatccagtatacttatatgatataaagcagccaaaaagtgcacgtatcattatttactttgttcttgtttcttacattccatcttgttattaatagagggccactaattataaattcttttacagatatagatattattgaaacttggttgaccattgaacaacgtgaaggttaagaatgccaatccttgcacagatgaacacatgagtataactttgctcccccaaaacttaactactaatagcctaccattgaccagaagccttatcaatagcataaacagtcaattaacacatatttcatgtattatatactatattcttacaataaagtaaaccaaagacaagaaaacgttataaagaaaatcataaagaagagaaaatatatttactattaattaagtggaagtggagcatcatagaggtcttcattctctctatacattgattgaggaggaggaggaggaagagaaggagtcgatcttttygtctcagaggtggcagagtcagaagaaaatccatatataagcagatctgtacagttcaaacttagtgttgttcagggtcagctatatatatctccgatgctagtctttttcccattcaatgatctcctgacttcctcatgcgtgattaaagacacatttattctgaaatttttctatt

SEQ ID NO: 881785 - DNA, 584 bp, Homo sapiens
agccagactaatgaagaaaggagacaagaatcagatagacacaataaaaaatgataaagggggtatcaccactgatcccacagaaatacaaactaccagcagagaatactataaaccctctatgcaaataagctagaaaatctagaagaaatggataaattcctggacacatacaccctgccaagactaaacaaggaagaagtcaaatccctgaattgaccaataacaagttctgaaattgaggcagtaatgaatagcctaccaaagaaaaaaagcacaggaccagacagattcacagccgaattctaccacaggtacaaagaggagctggtaccattcyttctgaaactattccaaacaatagaaaaagagggaccctccctaactcattttatgagtccagcatcatcctgatacctttgtttatatttaccagatataaaattttctaaatgtgaggtgctagagatgtgtgtgattttttttacttgctattttagaaaaattactattttaaagtcataaccataaatattgaaattcaaaattttcacacgttataactttttcagaggataaaaagg

SEQ ID NO: 881786 - DNA, 601 bp, Homo sapiens
cacatgccaggaaatatctgagagccaagactagacctacatcatcttaagaagtccttttttatttatttatttcgttgtacacatgtaccctaaaacttaaagtaaaataataaaaaaagaagtccttcttaaaattctcattctattaaacagaagatactaagcttacctgagtgtaagtgtgaggccatacaacagaaaatgaaaaggagacaaattccttcctagataatctggggattatctcagtccttcactttactccttgtctgagacatcatagccctgtggatcatcagggttgatcagcctggctggttagtcctgcatctcttcatcccttgctgcatcttctatggacagagtgaacaatgttcttaagccaggctttcctatgtagctgcatatccctgctagatgcccacaacaaccagctctattyaaaatcacagaaaacacagggttatcacattttcaagaatctaagattctaaagtagtgcttcaaagagtatatggcttatattccaatgagattctggaaaagatcagaagtatgagcttaagttcagctctagaatccctaaaagatccaatta

SEQ ID NO: 881787 - DNA, 628 bp, Homo sapiens
atccagcagcaagttgaaaaacttatccaccatgatcaagtaggctttatccctgggatgcaagcttagttcaacatacacaaatcaataaatgtgattcattatgtaaaccagaactaaagacaaaaacaacgctattatatcaatagatgcagaaaaggcttttgataaaattcaacgtccattcatgtttaaaaaaactcttaataaactctgtattgaaagaacatacctcaaaataataagagccacatatgacaaacccacagccaacattatattaaatgggtgaaacctggaagcattccttttgaaaactggcaaaagacaaggatgtcctctctcaccactccattcaacatagtattggaagttctgaccagggtaatcaggcaagaggaagaaataaagggctcccaaacaggaagagagraagtcaagatccctgtttgcagataaagtgatcttatgtatagaaaaccctatagtcttatcccaaaaacttcttaagctgataaacaatttcagcaaattgtcaggatacaaaattaatgtgcagaaataactagcattcctatacaccaacaacagtcaagccaagagtagaattagaaacaaactcccattc

SEQ ID NO: 881788 - DNA, 652 bp, Homo sapiens
caaaggacatgataaaactcttttcaaaggaagacatgcatgtagccaacaagcatatgaaagaaagcccaacatcactgatcattagggaaatacaaatcaaaaccacaatgagataccatttcacaccagtcagaatggctgtcattaaaaagtcaaaaaaaaaaaaaaccacccagatgcttgtgaggttgtggagaaaaaggaacacttatacactgttggtggtagtgtaaattagttcaaccattgtgggagacagtgtgtgattcctcatagacctaaagacagaaataccattcaaaccagcagtctcattactggatatatacccaaaggaatataaatcattctattttaaagatacaggcatacatatgttcactgcagcactattcrctatagcaaagacacggaatgaccatcaataatagactgaataaggaaatgtggtacatatacaccatggaatactatgcagccataaaaaaagaatgagaccatgtcctttgcagggacatggatggagctggaggccattatccttagcagaccaacgtaggaacagaaaaccaaataccacatgttttcacttaaaagtgggagttgaattatgagagaaatggacacatagagagaaacaacatacact

SEQ ID NO: 881789 - DNA, 630 bp, Homo sapiens
aaccatctcaaaactgtagtactgaccctaaatgcatgactcaaacattttgatatagttgttaagatgaaatttccacataaaaacagcaatgctattagatcagcatatttactaggcagtattcccaagggtacagtatcaatgacatctgtccagaatgcaacatctttataacaggagtccttaggtctttcaggacatttctatttttaaatttgctggctaataagaacaaaccttagttaaaaataacaagaataaagcaaagctctagaactacaaattaacagttgagatagcttcaaagactatgatgtttttgaaattccacttactgtgcttsctttttaaaatgagaatctgtatgtgtgtattccaagataggggattattcagtaagactgtcattaccacactaagcaatggatctacaagcatagaagtcagcttgctaatattctccaaggtgtctattatgatcccatttctcaaaggcgtatggtagggaagaggaccatatccttcttatattcaaaacaacataacatttacttcccctcttacaataaaaaccagtaagagttaagatatatcacattatatttctgacaaatatttccacccaca

SEQ ID NO: 881790 - DNA, 635 bp, Homo sapiens
tgaacgtggggtgtttgggaaaggatagacctaaaagggatggcaaggaaatcctctcctccttgattgctaggagaaagctgtgccaagtgaaatcgagggtcgcaggcatgtgacagcctttgccatcatgtgacttgactctatagaagctgtttctgacatcatcatttaacagtagaataataggttttattttgacaacagaagattattgcatgatcaggcttattaaacaccctttaaggctttatgtctggaaagcttaaatctrattcttcgtattgtagcactaatgttttatgtttatctgtctcttgcagctttgtaggcagccaatcccagagaagcagacgggatggctagttcagcccgggagcacctgctttttgtgaggcgtcgaaatccccagatgcggtacacattgagcccagagaacctccagagccttgccgcccagagctccatgccagagaacatgaccctgcagcgggccaacagcgacaccgacctggtgacttctgagagccgctccagcttaactgccagcatgtacgagtacacgctggggcaagcccagaacctcattatcttctgggacattaaagaggaggtggaccccagtgattggattg

SEQ ID NO: 881791 - DNA, 635 bp, Homo sapiens
tgaacgtggggtgtttgggaaaggatagacctaaaagggatggcaaggaaatcctctcctccttgattgctaggagaaagctgtgccaagtgaaatcgagggtcgcaggcatgtgacagcctttgccatcatgtgacttgactctatagaagctgtttctgacatcatcatttaacagtagaataataggttttattttgacaacagaagattattgcatgatcaggcttattaaacaccctttaaggctttatgtctggaaagcttaaatctgattcttcgtrttgtagcactaatgttttatgtttatctgtctcttgcagctttgtaggcagccaatcccagagaagcagacgggatggctagttcagcccgggagcacctgctttttgtgaggcgtcgaaatccccagatgcggtacacattgagcccagagaacctccagagccttgccgcccagagctccatgccagagaacatgaccctgcagcgggccaacagcgacaccgacctggtgacttctgagagccgctccagcttaactgccagcatgtacgagtacacgctggggcaagcccagaacctcattatcttctgggacattaaagaggaggtggaccccagtgattggattg

SEQ ID NO: 881792 - DNA, 588 bp, Homo sapiens
gtacctagagtagtgcctggcacataaaaggagcacaacaaagatgtgctgatgaaacctttagtgtttgttccttcttgctgatttatatttctccggtgacattgaatgatacttcatttgtacccaaaggctactgtgctacatgcatatcatttacatcttaaataaacagatgacattgaatttgctcctgttgcttacatgctgcagacaaatggctgatctcattagacaaatggatatggttaaactataatctaaaaaaataagagcagagaaacaatttaggtaggcaactgaggtytgaaataattatgtgctatgcttaatcatagggtagtttgaatttttcaagtgtatttgtttttcatatttccttttattttgaaaagttttttttttttttttaaatacagaagtctggagactattgtaagaatttctatgtacctaccatccatgtctatctgaagattctgctcctcctgttaatgctgttgatgggtagtgtgaccatataatttatcatccaaactggaacacttttgggagtgcaagagggcagtgttaatttcacaggaacaa

SEQ ID NO: 881793 - DNA, 631 bp, Homo sapiens
ttcatcaaatactagttacaagtacattctcacgaatgctcttgaatctttcacccaaacagaaaattaaaaataacttgaagcctctacttagtgttccctttttccaactcactgcttcttccacagggtgtagacactatcctaaagattttgattatcattttctagctttttttccccgttgtttgtcacataaacacatatgcctaaacaatrtataactccattttgctttatcttggcctttaacaaagatgttatactacatacagtatttggggaataacatttatcactattaaatgtctaggacttgaacatattgatgattcaatttgttcaagcttgttcaatttattcagtttatttcatagttgcatattttatcaactggataatagtctctttattcttttacatctttatcagatttattttgttttaattaaatttgtattgagatagtttcacctagagtatacaaaataatgcagagatcccttatacacttttcccagtttcccccaatgctaacattttgcaacactacagtatatcacagccagaatactgacacacaatacttaacatttccccagttttacttatactttgtatgtgtgtatat

SEQ ID NO: 881794 - DNA, 631 bp, Homo sapiens
ttcatcaaatactagttacaagtacattctcacgaatgctcttgaatctttcacccaaacagaaaattaaaaataacttgaagcctctacttagtgttccctttttccaactcactgcttcttccacagggtgtagacactatcctaaagattttgattatcattttctagctttttttccccgttgtttgtcacataaacacatatgcctaaacaatatataactccattttgctttatcttggcctttaacaaagatgttatactacatacagtatttggggaataacatttatcactattaaatgtctaggacttgaacatattgatgattcaatttgttcaagcttgttcaatttrttcagtttatttcatagttgcatattttatcaactggataatagtctctttattcttttacatctttatcagatttattttgttttaattaaatttgtattgagatagtttcacctagagtatacaaaataatgcagagatcccttatacacttttcccagtttcccccaatgctaacattttgcaacactacagtatatcacagccagaatactgacacacaatacttaacatttccccagttttacttatactttgtatgtgtgtatat

SEQ ID NO: 881795 - DNA, 522 bp, Homo sapiens
agcacaggttacccattattaagaaaagacagaaaaaacactgaagaaaaacaaacagaacctcagagacatataggccagcatccaacatcccagaatacacacagtgggagtggcaggaggaaagaaaacaaagrcgcagaaaaagcatttcagcaaatagtggcccagagcttccaaaatgtgatgaaaaacagaatatgcagatatctacacctaaacttctaaaagacaagacaaaatcttgacagcagcaagagaaaaatgactgatcacatataaaggagcatcaatatgattaacagccaaattcatgcatgagacagaggaggctggagagtggtagtataagatcctcaagggctgaaagaaaaaaaaaactgtaaaccaagaattcaatatccagcaaaactatccttccgaactgaaggtgaaattgagaaattcccagatgaaaaaaagacagagaatgcgttgctaacagacttgctttacaagagataccaaaggaagtccttgagg

SEQ ID NO: 881796 - DNA, 522 bp, Homo sapiens
agcacaggttacccattattaagaaaagacagaaaaaacactgaagaaaaacaaacagaacctcagagacatataggccagcatccaacatcccagaatacacacagtgggagtggcaggaggaaagaaaacaaagacrcagaaaaagcatttcagcaaatagtggcccagagcttccaaaatgtgatgaaaaacagaatatgcagatatctacacctaaacttctaaaagacaagacaaaatcttgacagcagcaagagaaaaatgactgatcacatataaaggagcatcaatatgattaacagccaaattcatgcatgagacagaggaggctggagagtggtagtataagatcctcaagggctgaaagaaaaaaaaaactgtaaaccaagaattcaatatccagcaaaactatccttccgaactgaaggtgaaattgagaaattcccagatgaaaaaaagacagagaatgcgttgctaacagacttgctttacaagagataccaaaggaagtccttgagg

SEQ ID NO: 881797 - DNA, 579 bp, Homo sapiens
gctttgctatatcttatagttttggcatactgtgtttttgtcttcatctatctctaaatattttctctaaagttgctttgtgatttcttttttgatctattggttgtttagaattgtgttatttaatttctacaaactagtacttttttggttccttttgttatgaatttttaacttcatcccattgtggtaggagaagatactttgcatgatatctatcattttaaatctactgagactaattcaaggcctaacatattgtctatcttagaagatgtccatgtgcatttgaaaagaatgtgtactctattgttattargtagtgtgctgtatatgcctgttagatctacctggtttattgtgttgtctaagtcctctacttcttcatttatcttctgtctacctgttatattcaatatagagagtagggtattgaagtctcctataattactgtagaactgtttatatctttcatcatttctgtccatttttctttatatattttgatggtctgtaatcaggtaaattaatgtttgtaattgttagatcttgctgtattgaaacttttattaatatgt

SEQ ID NO: 881798 - DNA, 569 bp, Homo sapiens
aaaacctagacatcctccccaaggaatacagagaagctcatcaggaattaagtcctattttctgctggactttcatgtgctaagaaaattaaaaatgcaaacagcaagatgtccttgactgtgtaagagttctatcaagcataatgaatttgaagataccaaagaacaattatgatattgataataaaggaatacgtctccatttttatatttaatggtaaagtctagtactagttattaaaactgataaccaaatttagtatctagtaagtagtgcataatgtgcatggtctagtgccctcttctttctttcagacaaatcccaattttacattcaaaagggcatgtaatcagatgacagtgttattgtctgttgaagcctcataatttacttaaagttaaagtcacaattgtgctttgtatctcaktgtacttgatgatgagttcattagcctttcattctcagaaacaaagcttggctgaatggctggtcatttggcttcaaaacagaaatttggctgtgactcaagatctactttcttcaggtcttctttctccaggcctgctgt

SEQ ID NO: 881799 - DNA, 564 bp, Homo sapiens
catctgtaatcccagcactttgggaggccaaggcaggcagatcacctgaggtcaggagttcgagaacagcctggccaacatggtaaaaccctgtctctgctaaaaatacaaaaattagctgggcatggtggcaggtgcctgaagtctcagctactcagggaggctgaggcaggagaatcacttcaagccaggaggcacaagttgcagtgggctgagatggcaccaccgtactccagcctgggtgaaagagtaagactctctctcaaaaaacaaaacaaaataaaatttgtttttaatttttaaaatcacatcagccaccttctaattatgagtattacaaatttgcctcatgcttttttgtctcttgaaccagtcattctgagaactcataagtaaaattcagtcaagattttttaaaacgccrcataagtttaatgagagtaccaagtgtaaggagaagagatagagatggagcaaaaaaacaaagtttgaaggaatcatgactaaaaactttacagggtaggctggcaagatggccgaataggaacagctctggtctgcagc

SEQ ID NO: 881800 - DNA, 570 bp, Homo sapiens
acagctgaattctaccagaggtacaaagaggagctggtaccatgctttctgaaattattccaaacaatagaaaaagagggactcctccctaactcattttatgagaccaacatcatcctgataccaaaacctgccagagatattaaaaaaaaaggggggaatttcaggccaatatccctgatgaatatcgatgtgaaaatcttcaataaaatactggcaaaccaaatccagaagcacctcaaaaagctgatccaccacattcaagatggcttcattcctggcatgcaagatgggttcgacatatgcaaatcaataaatgtaatccatcacataaacagaataaatgacaaaaaccacatgattatctcaatagatgcagaaaaggccttcaataaaattcaacaayccttcatgccaaaaactctcaataaagtaggtattgatggaacacatctcaaaataataagagctatttatgaaaaacctacagccaatatcatactgaatgggcaaaggctggaaacgtgccctttgaaaaccagcacaagacaagcatgccctctctcacca

SEQ ID NO: 881801 - DNA, 622 bp, Homo sapiens
taatgcctatgccacttacctcacctaatctcattaggtaggcatgtatcatctcacatcataacaagaaatgtgagagcagtacaataaagtattttgagggagagagagagaccacattcacatcactttcattacagtttattataattattctattttattattagttattgctgttaatctcaaactgtgcctaatttataatttaaactttatgaaagatatgtatgtattgggaaaacataatatatacagggttttctactgtctgtggtttcaggcatccactgggggttttggaacatattccctgaagataagaggagactactatattgcattttggaaagaacatgagctttgacatcagacagatytgaattttaatcctgactgtcccacatataagttgctcagataaatggcagctgctgctgttgtagcaaatttactttaacaagagagtcaactaacttgattaagccagccttttctgagaaggtttcaccagtatttcattaaactttggcttccatctagttctttgcatatacccacagtctcctgagtaatttttgaatcatggtaattccttttggaaaagataaatgacttaaac

SEQ ID NO: 881802 - DNA, 634 bp, Homo sapiens
acatagatgatatgatttcatagtccttctgaaggaaaacatgaaaaatttgcatatgaataggcttaatgtatggttcaatatcttgtagaatgtctcttgtgtgacctttatgagttctatcattcacatcttgagtgtttagcttgtttaatcaaaacactctttagaacttacacacttcagttaaagaagccaaacacattttcactttcgtttttttcatagttctgttctcccatggaattttatatatttgaatatccactgagagttttttttttcttatagctgcttagttactttttggaggggctgttattcctgagatgaaaggtctgttttgaggtgtcatagtatgttcctwaaagaagattaatttcctatttcattattggactttatcacttcgtgacttatggactggtagggaaggaaatcccacagcttatttccagaacacagcctagttttagaaaaccattcttgggagaaaaagaaaaagaaaaagaaagaaataaaagctttttctttgatctctgttaagtcctgaatggtaactttaagatcatcacaaagtatgcatttattacttaaagaatctataaaacctttctcaagtaaaggccagttt

SEQ ID NO: 881803 - DNA, 605 bp, Homo sapiens
ctacatggatgaaactggaaaccatcattctcagcaaactatcacaaggacaaaaaaccaaacactgcatgttctcactcataggtgggaattgaacaatgagaacacatggacacaggaaggggaacatcacactccgggactgggggaagtggggagggatagcattaggagatatacctaatgctaaatgacaagttaatgggtgcagcacaccaacatggcacatgtatacatatgtaacaaacctgcacattgtgcacatgtaccctaaaacttaaagtataataataataaawaaaataaaataaaaaataaattttttgatcttccttccactccacttaaaagttgcagaaaatgggtaggactacctcaggcctaatccctcaatgccaccatctctactgccttcccagtatctttataatatggggcacctttgtggtagtgattctcctttcaaaatttccaggtaggaaacaaggtagaaatctcctttaaaatcacaaaaatcagtttctcttaaatttccaggaaaattctagcacattacttctacaccctaaaaattatcttggggaagtgctaagaaataagcatga

SEQ ID NO: 881804 - DNA, 612 bp, Homo sapiens
aactcatggttaaaaatttctcaaaatgaacagctaataagtgttgaagttaggatttgaaaccatagtgtatttatgcattcaaaatatcttaataactgaagatagttgatcttttattgacttaagactttaccaccgtaccattcaatggaaccctgtataaaaacaaagtatatgaaaacattatttaatgattttttttttttttttgagatggagtctcactctgtcgcccaggctggagtacagtggagcaatcttggccaactgcaagctctgcctcctaggttcacgcaattctcctgcctcagcctccgaagtagctgggactacaggtgcccatcaccatgcccggctaatttttttgtatttttagtagagatggggtttcaccgtgttagccargatgttcttgatctcctgacctcgtgatccactcgcctcggcctcccaaagttctggggattacaggcgtgagccaccgtgcccggccccctatttaatgatgttatttgaagttatgtatagaataaataaatgaatccttgacaattgttcttcaataatataattttaaaaactcatgaaaacaatttgacaaatataaaa

SEQ ID NO: 881805 - DNA, 632 bp, Homo sapiens
ccatgattcagtcacctcccaccaggttcctcccacaaaacgtgggaattcaagatgagatttaggtggggacagagccaaaccatatcagcatgtatgatccacataaaaaaataaattgcacttctatatactaacaacaatagtaaatgtattttaaaatatatatctatcattggtctcagcattaaatataaaagaatcctaaggttaagtataaacagagatgttcataatttttataaagaaaatttaaaactttattgaaaaatattaaagatgacctacataaaaataaatatattcattaacagtttcaatatcatggagatagcaattctcaataaaataatctatattttcagtgaaaacccaaaaagatcctgacagagattttaatgaaatttgacaagctgattctaaagttaatatgggaaaacaaaacataaaaaaagtmtttctgaagaacagaagaatttgctttatagtaaatcttataaacctgttttaatgaagaaagtgagtatctgtatgggagcagattaacaaagaaatagaatagaaagccaacaaagatacacacacatatgtggaaactggatctatgaaataagtggcatggcaggtaagta

SEQ ID NO: 881806 - DNA, 582 bp, Homo sapiens
ccatcttagttttatatttaaatagaatcagtgctcgctataatttctccattgctaagttattaaggtgattttttcttaaaagactggattttgctgctcaatagtagaaagggtggtggcttaatagttatagtagttttgttttagaaaggtcttatggggatgattccagtatgcatgcttgtctttcwtacttaaagaacaacctgactcagagtaaatatcctaagattaatttatctcattgataaatgtgttcacattgtttcaccatcttttggtataaatatgtggctttggttagagcctaaggccaaaatgatttttttccttgtctgtgacatgctttttctacctgaatatccatttgattctttttgtatttgaagttcagtagctttgtttgattataccttagtgttgtaattattcaatatgatttctcagaaacacattttatttcaatttgcatacccaagcctttatttcaaaaatgctttcctctttttttcttttgggagcacttattatgttgaagtttttctgttttgttttgttttctatatccattatctcaat

SEQ ID NO: 881807 - DNA, 630 bp, Homo sapiens
cccacctcttgcgtcagtatgacctggctgtgagacctggagtcaaaggagatcattttggagctttaaaatttgactacgccactggattttggacttgtgtgggccctgtaacctctttgttttgctcaatttctcccattggaatggctgtattaacccaatacctgtrccgcccattgtatttaggaagtaactagcttgtttttggttttacaggctcataggaaaagggacttgccttgtctcagagaagtctttggactgtggactttcaggttaatgctgaaatgagttaagactttgggggactgttgggaaggcatgattggttttgaaatgtgaggacatgagatttggaggggctagggatggaatgatgtggtttggctgtgtccccacccaaatctcaacttgaattttatctcccagaatttccatgtattgtgggagggacctggggaaggtaattgaatcatgggggctggtctttcccatgctattctcatgataatgaataagtctcatgagatctgatggttttatcaagggtttctgcttttgcatcttcctcatttttctcttgctgatgccatgtaagaagtgcctttcacctctcaccatgattct

SEQ ID NO: 881808 - DNA, 523 bp, Homo sapiens
gtctaagtcatgtagagaaccctaacagaaggagggtatgatgagattacgtggtcaatccacaatgtttccctcagtaggtatgaggaacaggattaaaaacatgtccattacaatcgtatttttccctccttatcctasgaagccaggtgattacttactgtgtactcaaacaagagaagagacatttgtttttctggataaatttattataggatacttgacaccaggggcaatgaatgacaagagtgaggcactgtactgaaaacagaggaatcaaatatagagaatgatgaaacttcacgctcctcttacaaagaaaaagcaggccatgcataagagggtttaaggggtaagaatctgaattatagctgctatggtctgaatgtgtccttcaaaatgtatgtgtccttcaaaatgtatgtgttggaaactcaatccctaatgcaatagtattgggaagtgaggcctaatgggaggtgtttaagtcgtgggggctctgcccttgtgaatggattaatga

SEQ ID NO: 881809 - DNA, 426 bp, Homo sapiens
aaattacccagtcttggctatgtctttattagcagtatgagaacagactaatacagtaacttggtaccagatagtagggagctgctgtaaagatacctgaaaatgtggaaatgaatttggaactgggtaacagtcagaagttagagcagtttggagggctcagaagaagatagaaaaatrtgggaaagtttggaacttcctaaagacttgtaggactcagaagacaagaagatgtgggaaagtttggaacttcctagagacttgttgaatgtctttaaccaaaatgctgatagtgatatggacaataaggtcttggctgagctggtgtcagatggagatgagaaacttgttggaaactgaagtaaaggtcactcttgctatacaaagagacacgacattttgccccttatctagagatctgtggaa

SEQ ID NO: 881810 - DNA, 525 bp, Homo sapiens
atacttgtgctttgaaaaatgatattcccaataaaatgagcagaactaaagtcatagcacagtgaattgtaactttaattaatgtttgtttcttttcttttctttattttattttattttttgagatggagtcttgctctgtcacctgtcaccaggctggagtgcaatggcacaatctcggctcactgcaacctccgcctctcgggttcaagcgattckcctgcctcagcctcctgagtagctgggattacaggcaaacgccaccacacccagctaatttttgtatttttagtagagacagggttcaccatgttggctaggatggtctcgatctgttgaccttgtgatctgcccaccttggcctcccaaagtgctgggattacagatgtgagccactatacctggccttcttttttaaaaaatataaaatgtattgaaattatggcaggtactagagctatgtcataaaatccacagcccttctctcaaagagtagcatgaatgacataaatagagagttcatag

SEQ ID NO: 881811 - DNA, 676 bp, Homo sapiens
cagaaaagctgaaaattctaaaaatcggagtgcctcttctcctcaaaaggatcacagctcctcaccaacaatggaacaaagctggatggagaatgactttgacgagctgacagaagtaggcttcagaaggtcggtaataacaaacttctctaagctaaaggaggatgttcaaacccatcgcgaggaggctaaaagtcttgaaaaaagattagacgaatggctaactagaataaacagtgtacagaagaccttaaattacctgatggagctgaaaaccatggcacgagaattatgtgatgcatgcacaagcttcaatccatagagtggaagaaagagtatcagtaattgaagatcaaattaatgaaataaagcaagaagacaagattagagaaaaaagagtaaaaagaaatgaacaaagcctccaagaaatatgggactatgtgaaaaggccaaatctatgtttgattggtgtacctgaaagtgccagagagaatgcaaccaagttagaaaacactcttcmggatatgatccaggagaacttccccaacctagcaaagcaggccaacattcaaattcaggaaatacagagaacaccacaaaaatactcctcgagaagagcaaccccaagacacgtaatagtcagattgaccaaagttgaaatgaaggaaaaaatgtt

SEQ ID NO: 881812 - DNA, 647 bp, Homo sapiens
acataagatttaaatgaagagcaactatgagattgaaatgtgatgggattccttggtgagcaagtaaaacagaccacagatgctactggacatcagagactgaaggggaccatcaaagggtccaggacaggctttatcaaggaagtgagatttgcccacctatgaaatcattgccctttataggattaaaagatttgcaataggtaaagatgttttccaaaacagtattgtaaatagttttctttctgtctctctgtcttcttcccctgtaaaggttttttttttttttttttttcattttttttgttgttttccttaataggtaattttttatatatatactttaagttctgggatacatgtgcagaacatgcaagtttgttacataggtatactcatgccatggtggtttgctgcacccatcaacycgtcatctacattaggtatttctcctaatgctattcctccctgagcccccaccccccgacaggccccagtgtgtgatatttccctccctgtgtccatgtgttctcattgttcagctcccacttatgagtgagaatatgcggtgtgtggttttcggttcctgtgttagtttgctgagaatgacggtttccaccttcatccatgtccctgcaaaggacatg

SEQ ID NO: 881813 - DNA, 641 bp, Homo sapiens
agaaattcaatgaagcttttaagttcagagtaaaagattctctcaaatgaaattcacaatttttctaatgttcttggcaactatacatttctatcatttttgttaccatatttctaatagttcaagctaaaaactaatattcaaacttaatattcaaccaccagtatttaaatgatcaggcccgatgtggtggctcatgcctgtaaacccagcagtttgggaagccaaagtggtggatcacttgaggtcaggagtttgagaccaacctgaccaacatggtgaaaccccgtctctrctaaaaatacaaaaattggctgggcatggtggcacatgcctgtaatcccagctactctagagtcttagacaggagaatcacttgaacccaagaggcggaggttgcagtgagcagagatcacgccattgcaccccggcctgggcaacaagagcgaacctccgtctcaaaagtaaataaataaataaataaataaataaataaataaaataaataaattataggtggacgttttctctgactactttgaggtttctttctcctctttttatctttatctattctagtatttgaatgaccattgttagaatgggctaaaagaagacaagacttgaagtctcagaaggga

SEQ ID NO: 881814 - DNA, 607 bp, Homo sapiens
cagtaagttcctcatctccatctgagaccacctcagcttggacttcattgtccacatcactatcagcattttggtcaaaaccattcaacaagtctctaggaagttccaaactttcccacatcttcctgttttcttctgaggcctccaaactgttccaacctctgcctgttacccagttccaaagttgcttccacattttctgcatctttatagcagtacctcattgcctcagtaccaatttactgtattagtctattttaacactgctataaagaactacgaattttaaagaaaagatrtttattggactcacagttccacatggctggggaggcctcagaaaacgtataatcatggtggaaggggaaacaggcatgtcttacatggcagcaggcaagagaatgtgtgaaggaagtgaaggggtaagagcaccttataaaactattggatctcatgagaacactcactatcacaagaacagtatgggggaaccacccccatgatcctatcatctcccaccacgtccctccctcaacacctggtgattactatttgaaatgatatttgggtgggaacacaaagccaatccatatcaggccatgtaata

SEQ ID NO: 881815 - DNA, 643 bp, Homo sapiens
tgtttttatgagtttgggcaaaactcttcttttttacaggcctcaatctaacaatttgtataaaaggagatcagtgaatatgttagtcaggactctgtctgaactaaatgtagaaatacacatcaaaatacattaagaaaatattaaatgtatatgttcataaaactgaaaattctaggcttataactcactctacgtggggctggatcaagaggcttgatttatgtaatcaggcatttttcttctccagcctcagttctgctcttttcatagttatgttcatttgattttttattggctctagggttttttatttcatcttctaaatgaagagttttcttccctgataattataataaaagctctgaaatggagcctcattgatctgacttgagtcatatactctaccttaatcattatacattagtttattaatttatttgctagttactatttgagctytactatgtgataggcactgttctaaacatttgtgatacaatgacgagcataatatacataaacatataaaatagctgcttttataaagcattcattctcatgaaacagtcaggcaatacagtaatgcatgaataaaaatataatattctgtcattcttgtcatgttacaaagaaaaataaa

SEQ ID NO: 881816 - DNA, 537 bp, Homo sapiens
ttgtgtagtttattatgaagtaccatttccaaactaactatcctagcagcgtcagctgccagctaacagcaagagctctgagggcatcactgaacagatagcaccttatgagttattatgattcaaaaatctcccttgctgttggatttaccaacacgtaggcttttatttcttcccattacatctgtttagccacagaaagcatcgggccatactcactgcagaagataagacttcctcagaatcttatttgtttagtgcactcaattttacttcactgtctcatcacttgagagactggttaaggcaagaaacccatttcttaacattttttttrttttcaaacatttgaaaagcaacaccaaaacgtatgcagttaattcctcaattctttcccttagtatagcactttttaaattacaaaaccacacttacatgtattctatctcactggatccccacaacatcactgtgaggtgggaagatcaggaattacaaaccaccgcttacagatgaagcaataagcttacagcagcc

SEQ ID NO: 881817 - DNA, 616 bp, Homo sapiens
atggtgttgggaaaaatggctagccatatgcagaaaactgaaactggactccttgagttaatacagaagttaactcaagatggattaaagactgaaacataagacctaaaaccataaaaatgctagaagaaaacctaggcagtaccattcaggacctagtcataggcacagacttcatgactaaaacaccaaaagcaatggcaacaaaagccaaaattgacaaatgggatctaattaaagagcttctgcacagtaaaagaaactatcatgagagtgaacaggcaagcttcagaatgggagaaaatttttgcaatctatccatctgacaaagggctaatatccagaatctacaaggaacttaaatttacaagaaaaaaaaacccatcaaaaatgagctaaggatatgaacagaaacatctcaaaagaagacatttatgcagccaagraacatatgaaaaaaaagctcatcatctctggtcattagagaaatgcaaatcaatatcacagtgagataccatctcatgccacttagaatggcaatcattaaaaagtcaggaaacagcagatgctggagaggaggtggagaagtaggaatgtaggaatgcttttacactgt

SEQ ID NO: 881818 - DNA, 599 bp, Homo sapiens
ccagctggagctacagagggtaattcatagagccaaaactaagtctcagactattctggactctttttccatcatcctcatggatatggtaatgtaacatgtggcacatccagacataaataaaacttgggaaggaagaattctgaaggattttgtccattctgggyacaagaatcttgaccataatagtgagtgtgcattcagctcaggtacctatgaaattttagagtcttttaattttggaatttatgaagacaaccaatggatttgttgagaacaactaagtcttctttccgaaatgagagtttaatacttacatattttctcatatacagttaaatgtagtaaagggtgttttgtatttaatatattatttattgtgtattccgcagtctttgtcctttccttactaaggaactagagaaagcccctaattagtatggcctaagaactgttcttgttcttgtaggttttagaaatcctcttgtcccagctctctgtgctagtattccacttctctttttgaggccttcacttctttttattttttctcttttataaaaagagacagggtcttgctgtattgcccaggctggtct

SEQ ID NO: 881819 - DNA, 599 bp, Homo sapiens
ccagctggagctacagagggtaattcatagagccaaaactaagtctcagactattctggactctttttccatcatcctcatggatatggtaatgtaacatgtggcacatccagacataaataaaacttgggaaggaagaattctgaaggattttgtccattctgggcacaagaatcttgaccataatagtgagtgtgcattcagctcaggtacctatgaaattttagagtcttttaattttggaatttrtgaagacaaccaatggatttgttgagaacaactaagtcttctttccgaaatgagagtttaatacttacatattttctcatatacagttaaatgtagtaaagggtgttttgtatttaatatattatttattgtgtattccgcagtctttgtcctttccttactaaggaactagagaaagcccctaattagtatggcctaagaactgttcttgttcttgtaggttttagaaatcctcttgtcccagctctctgtgctagtattccacttctctttttgaggccttcacttctttttattttttctcttttataaaaagagacagggtcttgctgtattgcccaggctggtct

SEQ ID NO: 881820 - DNA, 598 bp, Homo sapiens
gttgctccacatccttgccatcatttgatcttgtcagtgttctggattttgaccattataataggtgtatagtagtaactcattgttttaatatgtattttcctgatgacagatgatctgtaacatcttttcatttgtgtatttatcgtatgaacgtcttctttggtgaggtgtctgtgaaggcctttcgcgagttttaaaatcagcttgtttgttttcttatggttgacttgtaagagttmtttgcatattttgaataacagcccattatcagatgtgttttttgcaatatgttcccaaagtctgtggcttgtctcttcattctgtgacttttgtgaggcagaattttaaaattttaatgaaatacagcttatcaattaattccttcatggattgtgccttcagtattgtgccctattgccatcctcaagatcatgtaggctttctctttcattatcttctaggagctttacagttttacattttactttaggtatataatctattttgagtcaatttttgtaaaaatgttaaggtctatgtctacattctttgttttgttttttgcatgtggctctccatgtgtgctacaccattt

SEQ ID NO: 881821 - DNA, 671 bp, Homo sapiens
caccgtgtttatataataacatatatgaataggaattaaaactagattatgcagaaaaaaggaaaactcctttcttagaaatgtgccaaaattggccttttttaattcaatttactccttaagttattctatcatctgttcaatgaaaagtaatataggatctctcatgcccaattaatagaaatttctgacaacaaaatatgtggatactattgcaattctaaagaaattatttctgattttcacataagttagaaaaagtattctcatgggtcttargagtgtgttttttatttttctagattttctatttttaatttcctaaattcttcagtcagctcagttggcaggataggatgaagcagcttggacagggggtgtctacctggctcatcaggccatctccagcactgcataaaacagcatacattcagcttcaaatagaagttttatacacatttataaagttaattagttaattacagagcaagtgaaatctttattccacgtaaaactctctagacattgaagtgaaagatccatggtacacagaatgtccagtagcagaagcactgactcttggatccaggcagcagaatcccagcataggctccatgcagtagggaggggttgtgaagtccaccagaccttgataagccttcttgtccatc

SEQ ID NO: 881822 - DNA, 542 bp, Homo sapiens
tcaaaatttcaaaatatattaaaggctccagaaattagtctgatactggcataaagacggacacgtagctgcatcgaacagaacagagagcccagaaataaatccacgcacgtatggtttgaccttggtactttttgacgaagtaccaagaatatacaatggagaatggatagtckctaacaaatagtgccgggaacactgtaattaatatattcaccctgttttatagttgtttgaaatgaaagagctaatctgatgctaattattccatcatggcttaagagtttttagtttttaatcataaatgtgttttaaattttattgaatgcattcttttttacctataaaggttatcttgtgacctttaaaaaataaatgaataaaaaataaaattgaaccatcactttatactacacacaaaaagcaactcaaaatgttttaaagacttaaatgcaagacctgaaactgtaaaatttaaaaaaagaaaaaaaaaccccacaggggaccaggcactgtggctcatgcctgtaattccaacactt

SEQ ID NO: 881823 - DNA, 618 bp, Homo sapiens
aggcacctgccaccacgcccggctaattttttgtatttgtagtagagatgggcttttgccatgttggccagactggtcttgaactcctgacctcaggtgatccactcacctcggcctcccaaagtgctggggttgagcgagagaggaagagaggaagggaggaagggaggatggaaggaaggaagtcctgtttctgaagtgagaaagacrtgagttctgtttccatgtccacaactcactttatgcaaagccttaaacaaacttgaacttctctgaggtttagcttcccctcctctaaaaggggaacatgctggttgtcttgcagggttgatttagggatcaaacaaagtcaataggtgaaaataaaaagaaatggggtggaagtaattacgaatcagctcctaattaagaaataaacaatgtgtttctctttcctctccctaaattcagttgtttcccaggcattcgccccatgtgtggactgcagggataatgtgtctctggacagaagtctctctcgtttgactgctgtggattcccgcagactctagaacaccagtctccctcctctcctggccatcctgcagggagccacccttgtagtctttctagaaccca

SEQ ID NO: 881824 - DNA, 573 bp, Homo sapiens
ccgagagtagataaaatgatttataaaaggccaattacaaagtatacaaggtagacaacacacatgtcaaaaagttgatgtgctataatatagaaaacatcctaattggtaaagttcatgaatagacaaatcattagagagcaaatacaattaggaaataaatacatggaaaagtgttctgtgtgaccttgtatgaatgttatgaaggatcttttatgcaacattaagaagttgattcttatcctgtaagcaattgagtaccttccaaaaaggacttccttaaagtccttccataaagggactttaagraagtgagtagtttaattcctaaatggcttgttcagagaggagaataagagagcagcatggaagaacaaaagaatcggaaaggctatcgtaagaatccagttgaatgctgcagatgatgcttactaaatcttagtaaagcccagcatgttatgccattttgactgatgagatgtcatttggcaaagtctgctgttaggtgctgatttagaggacttatctcacctcatgatttacagtagaaaagggctcccagccagagtgtca

SEQ ID NO: 881825 - DNA, 596 bp, Homo sapiens
agttttttgttttctcagtgcatttaaaagttatgtttaccctatactacagtctattaagtgagcaatagcattatgtcaaaaaatgtgcataactttaatttaaaatactttattgctgaaaatgctaatgatcatctgagtctcagggaatcataatatttttgctggtggagggtcttgcatcgatgttgctggcttctgattggtcaggatgctcgttgctgaatattggggtggctgtkgcaatttctaaaaataagagaacaaggaagtttgctgtatctttgacttcctttcaccaaagatttctctacgatgggatgctgtttcatggcattttacccatagtacaacttctttcaaaattggactcagtcctttcaaattgtgccactgcttaattaactaattttatgaaagattctaaacctttgttatcatttcaacgtttgtgacatcttcaccaggagtagatttcttctcaagaaacaattttctttgcccatccacaagaagtaactcctcatctgtttatgttttatgaaatttcagcagttcagtcacctcttcaggctccacttctaattctcttg

SEQ ID NO: 881826 - DNA, 636 bp, Homo sapiens
tttacacatttacaaagttaccaaaatagtctccaaattcaaactgcaagtcaaaaattctagggcttgattttaatccatcgttccattttctaaggatcccaagttaccctgcagatctgcactcatcttaactcataaattgcccccaggacagagaggctcccatcttcctgtaaatcattcaagcttaacttcatgatagaaaacgttaatttgattgtatttttttagtcatactttaaattttaaaagaaagtgctgccctcttgtgaaatgagctagaagatttatcatttcactgacagttgtgtaaatactacaaagggattaaaagttaaattttaacattaaaacaaaaacagggtttatctcaaagttgtatgtgtttcccctgargtctctccccactgtgcttttctgctctgttggtgaatttcccaaccaaacaagaaatggatattagggtaaactgctcgtccttgcactataattgaaaaataatgaatgagtggtgtattttcactctattgggaatgaaaggctgtagtttctctatattactgaaggaataaagggaacaagagccagcaaaggagaagacgcatcagtgacaacatgggaagacacaagtca

SEQ ID NO: 881827 - DNA, 682 bp, Homo sapiens
aatcccagctactggggaggctgaggcaggagaatcacttgaacgcgggaggcagaggttgcagtgagccgagattgcacgttgcactccagcctgggtgacaagagcgaaactcggtctcaaaataaataaataaatgaaaaataaacgacaaaaaaaaatcactaaagtttgcaaatattttatctgagcctagtctcatatttatggaagaatccacttctcacgatatatcgttggcttccctgcagctctctgttgctattgagtaaaactctattgccttgaaaaagttattctaattactaatgaacacagatctctctttggaatgtcttggtcattaccccttggatcttargctaatggtatcacctttgtaccaggtcataggaccttctcagttaatcctattttccatgacagttatatatccaaaacagcacggtacaaaatttttaacaaaattaaatttttcatgcatcaaaattttatagcacatctgccaaaggtttgctatacacagaatcacagccctgatatccagcattggcatataataggtatgcaagagtacttgatgagatgaattaggatagaatagaactaccagtttgctaggcagggcattgataatagaacttcctttgctgtttcattatgaaactccaattccaggtct

SEQ ID NO: 881828 - DNA, 609 bp, Homo sapiens
tagatcagatgttaggccacaaaacaaaccttagcaaatgtaagagtattgaaatcatatcaagtgttctttcagatcacagtgggataaaaccagaaatcaataacaggagaaatcttggaaaataaacaaatatgtggaaattaaacaatatgctcctaaacagccactgggtcacagaaaaaattagaatgaaattttaaaatgccttcagacaaagaaaaatggaaacacagcataccaaaacttatgggatgcagcaaaattagcagaaagggggaaatttatagcaataaatgcctatatcaagaaagaagaaatatcatgaataarcaatctaatgttacacctcaaggaacaataaaaagaagaacaagctaatctgaaagtgaccagaaggaaggaaagaacaaagatcagagccaaaataaatggaatacagactagaaaaataaaagaaaaatttcaacaaaactaagagattcttttttgaaaaaaaaaaaatcaacagaccattagctagactaaccaagaaaaaaaaaaagacccaaagaagtaaatatcagaaatgaaaaaggagatattacaattgatactcccaaaatacaa

SEQ ID NO: 881829 - DNA, 609 bp, Homo sapiens
tagatcagatgttaggccacaaaacaaaccttagcaaatgtaagagtattgaaatcatatcaagtgttctttcagatcacagtgggataaaaccagaaatcaataacaggagaaatcttggaaaataaacaaatatgtggaaattaaacaatatgctcctaaacagccactgggtcacagaaaaaattagaatgaaattttaaaatgccttcagacaaagaaaaatggaaacacagcataccaaaacttatgggatgcagcaaaattagcagaaagggggaaatttatagcaataaatgcctatatcaagaaagaagaaatatcatgaataaacaatctaatgttacacctcaaggaacaataaaaagaagaacaagctaatctgaaagtgaccagaaggaaggaaagaacaaagatcagagccaaaataaatggaawacagactagaaaaataaaagaaaaatttcaacaaaactaagagattcttttttgaaaaaaaaaaaatcaacagaccattagctagactaaccaagaaaaaaaaaaagacccaaagaagtaaatatcagaaatgaaaaaggagatattacaattgatactcccaaaatacaa

SEQ ID NO: 881830 - DNA, 614 bp, Homo sapiens
taaaaaaaagaaaggggagaaaaccatacagtataaaaaacatgggaattggtaaaaagacatggcacaaatttaattggaaattcagaaaggatgaagacaaaaaatagagtaggtaaaatgttaaaatatctgagaatttttccaaacaaaaatattaagtcagattctataagcactacaatctgtaaatctataaaacacaaagaaaatcacatataggcacatcgtaatgaaacatctgaactccagagacaaaggggaaatttaaaaagcagaagagaaaaaaaaaatacattagattcaagtagcaaagaatagatccagctgccttctcaacataaatgattgaagccagaaaataaggcaatgatacctttaaaatattggaggggttggttgggaggcrgtgacggggttacaaacctgtcaaactagaatgttatatcagtaaaaatatcatttaaaagtgaagtcaaagtaaaagaatgtccattaaagcaaaactgagaaaatttttcacgagcaaatctatactgaaaagcataatgaagaaaattatttgaacagaagaaaattgatcccagaaagaaatacaggaagaagaaacaata

SEQ ID NO: 881831 - DNA, 615 bp, Homo sapiens
gaaaccccagaaattaaaagcatatagatccctcttaaaatcaaaggctctgttctgttttgcattgtggtatctgacaattttgagtttcaggggtatcagaaattacttctcactatgagagagctttggtgtgtaataactaggtaggaaatgtacttaaggggatggctaataatcgttatggaggaatacttgactctttgcacacttggatcacagaagcatgctcttggccaccaggaagatatggaaacatccccactcccactgacaggtgaggctcccatgggggatggtctaattacaccattgggtgataggctttgggtggccttgcaatgaaatgcacagtcggtaagagcactgccctgtcttctcccraagtatttcccactttttggggatccaggatccagtataaaatggcaccctgaattttggggatctgtctctgcttttggctgtgattaggtcccagaaatgcaagctttcctggccctgttcttccaagggctccacactgaagccagtaatgcaattaagaaactggcaaatgaaaaatcttataagtgctgaatcttctgtctgtctgcatttatatgtgttgtgtgt

SEQ ID NO: 881832 - DNA, 607 bp, Homo sapiens
tcaaaacctcttacagcaaaagcagtgctaagaggaaagtttatagcattaagtgtctacatcaaaaagtctaaaagagcacaaatagataatctaaggtcacacctcaagtaactatagaaacaagataaaaccaaacccaaatccagtagcagaaaagaaatatcaaagatcagagcagaactaaatgaaattaaaacaaacaaaaacaatacaaaaaataaatgaaacaaaaagctggttcttggaaaagataaaccaaattaatagaccattagtgagattaactaagaaaagaagagaaaaatccaaataagctcaattcgaaatgaaatggkagatattactaccaataccacagaactacaatgtatcattcaaagctactgtgaacactttgatgtgcacacactggataacctagaggagatagataaattcctgtaaatttaccaccctcctagattaaaccaggaagaaatagaaactcttaacacaccaataacaagcagagagattgaaatggcaataacaaaattgccaaaaaaagaagttcagaaccagatgtattcacggctgaatctatcagacattcaaagaaaaattg

SEQ ID NO: 881833 - DNA, 607 bp, Homo sapiens
tcaaaacctcttacagcaaaagcagtgctaagaggaaagtttatagcattaagtgtctacatcaaaaagtctaaaagagcacaaatagataatctaaggtcacacctcaagtaactatagaaacaagataaaaccaaacccaaatccagtagcagaaaagaaatatcaaagatcagagcagaactaaatgaaattaaaacaaacaaaaacaatacaaaaaataaatgaaacaaaaagctggttcttggaaaagataaaccaaattaatagaccattagtgagattaactaagaaaagaagagaaaaatccaaataagctcaattcgaaatgaaatgggagatattactaccaataccacagaactacaatgtatcattcaaagctactgtgaacrctttgatgtgcacacactggataacctagaggagatagataaattcctgtaaatttaccaccctcctagattaaaccaggaagaaatagaaactcttaacacaccaataacaagcagagagattgaaatggcaataacaaaattgccaaaaaaagaagttcagaaccagatgtattcacggctgaatctatcagacattcaaagaaaaattg

SEQ ID NO: 881834 - DNA, 668 bp, Homo sapiens
gacaatgtgacttcctcctttcctaattgaataccctttatttccttctcctgcctgattgccctggccagaacttccaacactatgttgaataggagtggtgagagagggcatccctgtcttgtgccagttttcaaagggaatgattccagtttttgcccattcagtatgatattggctgtgggtttgtcatasatagctgttattattttaagatacgtcccattaatacctaatttattgagagtttttagcatgaagggctgttgaattttgtcaaagggcttctctgcatctattgagataatcgtgtggtttttgtctttggttctgtttatatgctggattatgtttattgatttgcatatgttcaaccagccttgaatcacagggatgaagcccacttgatcatggtggataagctttttgatgtgctgctggattcggtttgccagtagtttattgatgatatttgcatcgatgttcatcagggatattggtctaaaattctctttttttgttgtgtctctgccaggctttggtatcagaatgatgctggcctcataaaatgagttagggaggattcctctttttctattgattggaatagtttcagaaggaatggtaccagctcctccttgtacctctggtagaattcggctgtgaat

SEQ ID NO: 881835 - DNA, 616 bp, Homo sapiens
aaatgattttcacatacgattacttttaatcatccaaatttaatcaaagtcgtcttgacttttataaatgcattgtttaaaaatgttaccttttttcctcatgcatttatagtctatatctaggttatttaattaaactatatccatttatttataataatacatattatgtactgcactgtttgcttattttatgcactggagcaaacaatttatatatgtttttctcgatgcattcttacaacaagcctaygaaataagtactattatcctttttttcatagataaggagaatgagatgattatatcactcaccaagggtcagctgggtagtatgggggttgaggagggataagggtgaaagattcaaacacaggtttttctaataccagggctataagccactatgtttctcaaaatctagtgtgcatcagagccaattggaaggcttgttagaacacagaacactcttttctcccccgacttgagcttctgactctgcaggtctgtggcagagcctaagaatctgcacttctaacaagttcccagcagatgatgcttctggcatgaaggccacacgctgagagccagtcactacaccatgctaaccaacctc

SEQ ID NO: 881836 - DNA, 614 bp, Homo sapiens
ctgtggagaaataacatatattttatatatttaaagaaaaagcaagcaataaaagtttacctcttttgctatgcacttgtaatcattgaatgtcattctacaacatcgatacttctttaaggagactttgtgatgagaataggttttggtgcataaggataaatcctagggttaaggaatgtgtcagatggttataatttgtccaaagatatgaacacaacaggagacatgaacatggagamatgtttcagaaagaagtgctggaaaaaataaggcaagttccatctgtttctaatggtcactgtgggctgaacaaatacgtcagattaactctaaaaaccctgagctattgacattatgaagaaagttggatctgaattaagaaaatatattctgaaatgttttttttttaaattaaatggtgactctgcacaggctttactcctgtgcagtttgtggtttgggtcctggcccctagatgagctggtttcctctcatctcagagctgcagccctctccattataaaacaaggatagcagggctattgccagaatgaatgagctcatacctcacataagaggcactaactaaagcaacagaatcactccttcac

SEQ ID NO: 881837 - DNA, 603 bp, Homo sapiens
agacagtaaaaatggctttggggtgactgggtttctgaagatgatcattcccaggttggctaaataggtttaaagctaaatctgctcacccttcaaaagtattccaagagctaccaatgtggaaatttctaaggagattacttgtggtttaggaagtgatagtgttgggctaaagaaaatattgccaagtccaggtgcctccccacttggtaatgagagcactgtcattcgtggaaatgacgtgagccgtgtgatctaaaaggctttaccatctacaagacttactgaagtaggaaattgcaggtgtttgktttgaatcttttgacttacccttccaggagtttttccacctcatgtctccccgcttccacactgggtagagtttttcattccagtcattttcatcagaagaccagccatttaattgattgtgctccctcatgtaagcagaaggtctttcattgcccagcacatcatgaaatcctgtatcaatattcgaaacaaattccattcttcatttagtaatcacctcacagtggttaaagaaactttttatttcttactgttgaaaagcacatacataatatattcagtgcatcaagt

SEQ ID NO: 881838 - DNA, 601 bp, Homo sapiens
cttgcaagtcaggcctggtggtgatgaaaacccattagcatttgcttgtctggaaaggattttatttatccttcacttatgaagcttagtttgactggattgaaattcttggtagaaaattcttttctttaagaatgtgaatattggcccccactctcttctggctcatagggtttctgctgagggatcagaagttggtctgatgggcttccctttgtaggtggcctgacctttctctctggctgctcttaacactttttccttcattttgaccttggagaatctgatgattatgtgtctttgggttgatcttctcatggagtatcttactggtgttctctgtatttcctgaatttcaatgctggtctatcttgctaggttggggaatttctcctggataatatcctgaagtgtgttttccaacttggttccattcttcccatcasttaaccaatcgtggatttggtcttttcacatagtcccatatttcttggaggctttgttcattccttatcattctaatttttctctaatcttgtctgtatgccttatttcagcaaggtggtcttcaatctctgatatcttttcttccatttgattg

SEQ ID NO: 881839 - DNA, 592 bp, Homo sapiens
ctgccatctatgtaagatgagacttgctccttcttgccttctgccatgattgtcaggcctccccagccatgtggaactgtaagtccattaaacctctttcttttgtaaatracccagtcttaggtatgcctttatccacagtgtgaaaaaagactaatatagtaaattggtaccagtagagtggggtgctgctgaaaagatacccaaaaatgtggaagtgacttttgaattgggtaacaagcagaggttggaacagtttagagggctcagaaaaagacaggaaaatgtgggaaagtttggaactccctagatacttgttgaatggctttgaccaaaatgttcataatgatatggacaatgaaatccaggctgaggttgtctcagatggagatgaggaacttgttgggaactggagcaaaggtgactcttgttatgctttagcaaagagactggtggcattttggcactgcctgagagatttgtggaatttcagactcaagagagatgatttagggtatctggcagaagaagtttctgagcagcaaaacattcaagagatgatttgggtgctgttaaaggcattcagttttat

SEQ ID NO: 881840 - DNA, 592 bp, Homo sapiens
ctgccatctatgtaagatgagacttgctccttcttgccttctgccatgattgtcaggcctccccagccatgtggaactgtaagtccattaaacctctttcttttgtaaataacccagtcttaggtatgcctttatccacagtgtgaaaaaagactaatatagtaaattggtaccagtagagtggggtgctgctgaaaagatacccaaaaatgtggaagtgacttttgaattgggtaacaagcagaggttggaacagtttagagggctcagaaaaagacaggaaaatgtgggaaagtttggaactccctagatacttgttgaatggctttgaccaaaatgttcataatgatatggacaatgaaatccaggctgaggttgtctcagatggagatgaggaacttgttgggaactggagcraaggtgactcttgttatgctttagcaaagagactggtggcattttggcactgcctgagagatttgtggaatttcagactcaagagagatgatttagggtatctggcagaagaagtttctgagcagcaaaacattcaagagatgatttgggtgctgttaaaggcattcagttttat

SEQ ID NO: 881841 - DNA, 663 bp, Homo sapiens
aacagaagatgtataattttcatctgtacatggcaaatactctaaaatcaatcacatgttcacccataaagcaattataaacaaatttttaaaaaagctgaaatcataccaaccatactctcaaaacacagagcaataaaaatagaaatcaaaactaagaagatctgtcgggccaggcacagtggctcatgcctgtaatcccagcattttgggaaggcaacgcaggaggaccacctgaggtcaggagtttgagaccagcctgaccaatatagtgaaaccccatctctactaaaaatacaaaaattagccaggcgtggtggcaggcccctgtaatcccagctactgggaaggctaaggcaggagaatcgcttgaacccaggaggcggaggttacagcgagccaagattgcaccattgcattcgaggctgggcaacaagagcgagactccatctcaaaaaaaaaaaaaaaaaagaaagacagaaaaaaagaaaaaaaagaaaaagaagatctrtcaaaaacatacaattacatggaaattaacctgctcctgaatgacttttgggcaaacaatgaaattaaggtagaaatcaagaaattctttgaaactaagaaaaacaaagaagtaacatgccagaatctctgggacatagctaaagcagtatt

SEQ ID NO: 881842 - DNA, 623 bp, Homo sapiens
tgatgggtccaatagaaacttgtgttcctcgcctggggacaatggtggggggtgttgcaaaatcagtccaaggcatctctgtggttgctgagcaatgcagtgaggaagaaatggaaaataaatgctaagtttcctggcaaattatgaactctggatagggataggatggtggggagacaaatagtatgaaattatcaaaccgtaaaatccagttggaaacaggagggcaagatcacatgcagagtagttccaattcacttactcaygcaggcaaggagatgggaaggcactggcccaaggagaagccagcttctcctgtcccagccgaattatgtttatctttgtaatttgattttgtcatggaaacactgtcagtgttcagtgttctttgtgcaataatgttcatgtcaaataagaaagcaaagtgatgggaggaggcatctgtagctatgtgttcttcacactgtattgtttgtgatattcaataacacaaaagtaaactgtgagtgagagtaaattccatggaccctactgtgcttttgtgggtgtccttactggttttcctcaaaaggtggcacactcttttttttgttgttgtttgttttgttctcatgtccattaaa

SEQ ID NO: 881843 - DNA, 631 bp, Homo sapiens
ctcctaaatatcatcaccttggagattaagtttcaacatataaattttgggggaaagcaaacattcagaccacagcattttttgttagtgtttcctataaatggtatggctattcactcctttggcaatcattttgttggcttgtctatcttttgcttataaacttataatatttctttatacaaaatakatacttatcctttgataggattatgtgcagcaagaatcttttccaagcttatggcttatcttttcacataccatttttggaatcttttaatgagctactattcttcattataataaactttaattaatagcattatatacattcatcttatggctagcatttttgcatcttaattcagaaacctctacctgtcataaggtataaaagatagtttccaaaattttcttcttaaatgttggcatttgtcttacacagttaagtcttaagtccatctgaaattttgctttttacatctgttaacaggttccaatccaaatttctttcctatgaatacccaattgtcccagaataataattaaatagcctactcaataaccatttttttgctatgcgaatttttttatattatgttgttatatatatatatgtatatatatgtgt

SEQ ID NO: 881844 - DNA, 613 bp, Homo sapiens
agaattgtacttttaatctctgtatcccacacaaggagggcaagtcttaaaaagagtaggtgctgaataaacttaaaaacacttcatttaaaatcactactaaagccccaactgaatttgtacatctcaccatctagcctgggctatgggccttactactagtcagtggcaaatgtgacttacagtatcttctgaattggaaataaaaagaatcagatctttaaagttaattttgcaaayttgatgttaagagaaacagaggacataatatgcaaacacattttctaaataaattcaacccattggctgggcgcggtggctcacgcctgtaatcccagcactttgggaggccgagacgggtggatcacaaggtcaggagatcgagaccatcctcgctaacatggtgaaaccccgtctctactaaaaatacaaaaaaaaattagccgggcgtggtggcgggcgcctgtagtcccagctactcgggaggctgaggcaggagaatggcgtgaacccgggaggtggagcttgcagtgagtggagatctctccactgcactctagcctgggcaacagagcgagactctgtctcaaaaaaaaaaaaaaaattcaaccca

SEQ ID NO: 881845 - DNA, 650 bp, Homo sapiens
ataagaggacaaagaatattcaggtcatgtagttacgaagacactagttttcatggtggcatcagtatttcgtgtttattcaatttaattcaatcttaaaggcttagatttggcataatggtttttaattatttctattctttgtgcatttacatacattctataagtaatttttattatttacaaaatcagaacattttgatcaacaaagaaaatgactaaaatatccataatgaggacaattctaatgccatcagaaacatctcataacaagtgaaaggtgagggatctgtgaacatggcctaacaatgttaggcccattctagagagcaagtctaggtggcagagggcaggaacacagagtagattgaatcaggggctaaacagataatgtaaagccagagtattcttttcagaaacttataaactttacatgtgttaatttctaccaaatttttgatgtttgagactataacaggcwtaacttacattccaataaatactcacatcacagcaaattgatgtctacctgttgattatcttaaagacaaataatacaagaagatttttctattgaagaaaaaaaacattttagatatgttctgaaacaaactatgaagagatagacattaaatcattactttgcccag

SEQ ID NO: 881846 - DNA, 588 bp, Homo sapiens
ggtctcagtcttttagtaagcctgtgtctctgggctgcgaacttcacacatgcttctcagtcacatcccctcaacttagatgggataagataactagagtgagctgaagttgggtgttttccttcttccacatggaagaccagatagggttgggacacctcttccccccaggtcagttagtttctgataaaactctagcaattttaattttcagcaactagctaaatggtttctcctgagggcagaacttattaagaacagaatgcactggtgtatttcaaaaaakttccttccctttcctctgtcagaagcacaaaggaatttttctcctgtaatcactgcgagaacttgataaagatccaggaagtaaaacccataaaagcatgaggtctttcctaagactgagtcccccagaagcctttagctctcagacccatccacatggaacttctggcaattcatcaagtataatttaggttttcttcattagtttctgctcaggtaagatgtgattctctgtatttgttggggcaacagtttgacctgtgaccttacttctctatgaatctaagaaaggatattgatttt

SEQ ID NO: 881847 - DNA, 588 bp, Homo sapiens
ggtctcagtcttttagtaagcctgtgtctctgggctgcgaacttcacacatgcttctcagtcacatcccctcaacttagatgggataagataactagagtgagctgaagttgggtgttttccttcttccacatggaagaccagatagggttgggacacctcttccccccaggtcagttagtttctgataaaactctagcaattttaattttcagcaactagctaaatggtttctcctgagggcagaacttattaagaacagaatgcactggtgtatttcaaaaaagttccttccctttcctctgtcagaagcacaarggaatttttctcctgtaatcactgcgagaacttgataaagatccaggaagtaaaacccataaaagcatgaggtctttcctaagactgagtcccccagaagcctttagctctcagacccatccacatggaacttctggcaattcatcaagtataatttaggttttcttcattagtttctgctcaggtaagatgtgattctctgtatttgttggggcaacagtttgacctgtgaccttacttctctatgaatctaagaaaggatattgatttt

SEQ ID NO: 881848 - DNA, 647 bp, Homo sapiens
ccagttccccatggatactgagggacagctgtataatttcttggcatatgatttcttggccgtctagttggggcaaggggactttgcgcttagaaatgttgggtttcacagggacctcatcaattagtatttctatcccagtttcagtcctcagccagaatacctgcagtaaaatgcctcatgtgagaaccatgattagttctttcagggttttgctatttgagccagagattagttaaacagtttctaaaactttctatttaatgtagttgtcttttaaaaagtcatatkataaatttattgatcacttttcatctgtcaaagaagggatcagttacagctgtgattttcagttactagtaaggattgaggatatggcagactctctaggttctgattctgattcgctattctatggcaagtttattagtttcctgtggcttctgtaacaaattaacacaaacttggtggcctaaaacaaaattattcaatcattctcccacagttctggagtccagaagtttaaaatcaaggtgttatcaggatcacactccctctggtatatatacattgcatgtatataccatattttacttatccattcagccatcaatgggctcttcaattgcttccacattgtagctatt

SEQ ID NO: 881849 - DNA, 678 bp, Homo sapiens
aattggcaaaaaagaattgggagagaaagtggactggtgtttgcctagggctagggaattgggggagaggggctaatgacaacaaagttctaaaattatgctattgtaaaattctataaataaactatacactttaaatgggcaaaccttatgtattatagtaaattatactgagataaagatgttatgaaattactggttagctaaaatatgtcttttactgatttccagatgctatttcacaattaaaattatctcttctcaaaagatctacatgagttttatcaggttatattattctctcatcatccagcttaatgacacatcagccaggtgcagtggcttaagcctgtaataccagcactttgagagactgaggtggaaggatagcttgagctcgggaggtggacattgcagtgagctawgatccagccactacactccagcctcggtgactgagcaagaccctgtcacaaacaaacaaacaatgtcaaagacttcatgtaacaaaccaaaaaagaaataagtagttcttcaccgtcatgtaaaccaatagacacacacacacacacacacacacacacacacacacacagagtcaacaagcactaaaaagtaaaaatctactttctacaaataaaagaaacgtattaccatgtgatacaaaacttacttaaa

SEQ ID NO: 881850 - DNA, 632 bp, Homo sapiens
gaactggcaaagacctgctaaagggacaagaagaaagggaaaatgaagtcatattttattcatcattcagatattcacctcattatttgaactattaatagaaaattgaggctttttcctctcttgtgggtatcctatctctttatttttagatcttcttggaaatacctttctgaaacttgaagatcccctctagatattattttccaggatgaaaggcctctagcagagtctttaatgtgcaataatgagaagatgaaacattattgtgtttcctctggactcttgtatttgaacttgatccaggattgacactrggcagctcacctttcccacatcatggttagctctaagtcaggctaagaaattaccttccctggccactccctgctttgtccagttaaataaaaatgaatttttagttttatttagttaactaactccatgggccatggtaagctaaagaaaagtagatgtatgagaggaaacgttggcaaattctctgtacttatttagagtacaggaaagatccataattaaccatgctttgggaaaatacttccttggaatggtcatattgaagggtttggtttaaaaaaagttgagggttgggggcttctacatcacatcct

SEQ ID NO: 881851 - DNA, 632 bp, Homo sapiens
gaactggcaaagacctgctaaagggacaagaagaaagggaaaatgaagtcatattttattcatcattcagatattcacctcattatttgaactattaatagaaaattgaggctttttcctctcttgtgggtatcctatctctttatttttagatcttcttggaaatacctttctgaaacttgaagatcccctctagatattattttccaggatgaaaggcctctagcagagtctttaatgtgcaataatgagaagatgaaacattattgtgtttcctctggactcttgtatttgaacttgatccaggattgacactaggcagctcacctttcccacatcatggttagctctaagtcaggctaagaaattaccttccctggccactccctgctttgtccagttaaataaaaatgaatttttagttttatttagttaactaactccatgggccayggtaagctaaagaaaagtagatgtatgagaggaaacgttggcaaattctctgtacttatttagagtacaggaaagatccataattaaccatgctttgggaaaatacttccttggaatggtcatattgaagggtttggtttaaaaaaagttgagggttgggggcttctacatcacatcct

SEQ ID NO: 881852 - DNA, 622 bp, Homo sapiens
aattctctgtacttatttagagtacaggaaagatccataattaaccatgctttgggaaaatacttccttggaatggtcatattgaagggtttggtttaaaaaaagttgagggttgggggcttctacatcacatcctcgctacatttttttaaaaattaagatttctataatttttttttagaaattaaggcttctataaaattcatgtaattttaaccagggataatctcactcagtttccacgtgtgtgaaatggggattataatagtaccttttctcgggctttctgggactactttatataacatttggaagagtacctctccaattatcatgctgtacaccttgaatatatacaatttttgtgtcagttatacctcaataaagctggagggaaaccctcatttccayagtgaaaataagtacctagcacacaactaatattctagtctataattctataaatgttagcaattattattatcaactaataaaattcccaattacccttataccatatgaccctttgggggagaggactaatagtccatgaatagtatggaatctgcatgtacagagttttagaaacttttgttttcactgctgcattttaaaatagatt

SEQ ID NO: 881853 - DNA, 675 bp, Homo sapiens
atgaaatgcctgtctcaatactgatggtgaattgttttctagctattttgagtattgacattctctcttcctactgggaacatgaaccacctcatctttctcttacccacttccacccactcagtgcatcaagtacacaggaaaccataaacacttgctgatatttgttaagcaagttacatctttatagtggccattttatcaaacaatagccacaagtgtatattgtggtgagaagcaaaaccggatagaaagaaaaaaatatgtatttggaaggggagaccacaaggagaagctgaatattagcagtgaaacaaagaggtaataaaccttartagtttcctaaaagagtaggcatgattgctttaattgaaacagaagacacgaacactggagatgtgctcctttaacaccaggaagatgaattagaaaagctgcccaaatattttttcttgagtgatgtattatgtgatgagaagcttgtaatacgttatgggtgcacctttgacatatgatttaacccgttgatgcaaagtctggatttcttggtttgcctctgtctgcctttagctattagaaaagatattctaaaatgagagcagaaatggatccttataagggtttgatgtggagggtgaagtctttctgcagatttatgctgcgaatttagagtag

SEQ ID NO: 881854 - DNA, 581 bp, Homo sapiens
tggatgttgcttagaatttcaagcatatgggatgctcagtcaccacagtggtttccatgccagttcaccacagtagaacagagagagcatcaggtacatttctaaggtgtctgactccaaccctggctcctagacgcagacctaaaacttataaataatttaaagatttgcctctaacaataggccaaaaatscactttaaaaaaagattaccctgaaaattactagaatatccaaaataattttttaaaccagccatttaaggaaagcaaaacttttagccatcaatggaaactagagttctcataatcggctagcaaaaatactctaaattttcatgaaagcacatagtgtataatagcaactttcatgtactttttctacctgtcacaaaaagctagtcattggccaccagtaagatctagaaatcatttcttaaatcagagtggggcttgtggtgtacagcaggggttggcaaaacacgactgcgagtaaaatccatcctacctcctcttccaattacctggtagttttactggaatacacacacacatcataaatatgtgacacaattgtcacttt

SEQ ID NO: 881855 - DNA, 581 bp, Homo sapiens
tggatgttgcttagaatttcaagcatatgggatgctcagtcaccacagtggtttccatgccagttcaccacagtagaacagagagagcatcaggtacatttctaaggtgtctgactccaaccctggctcctagacgcagacctaaaacttataaataatttaaagatttgcctctaacaataggccaaaaatccactttaaaaaaagattaccctgaaaattactagaatatccaaaataattttttaaaccagccatttaaggaaagcaaaacttttagccatcaatggaaactagagttctcataatcggctagcaaaaatactctaaattttcatgaaagcacrtagtgtataatagcaactttcatgtactttttctacctgtcacaaaaagctagtcattggccaccagtaagatctagaaatcatttcttaaatcagagtggggcttgtggtgtacagcaggggttggcaaaacacgactgcgagtaaaatccatcctacctcctcttccaattacctggtagttttactggaatacacacacacatcataaatatgtgacacaattgtcacttt

SEQ ID NO: 881856 - DNA, 657 bp, Homo sapiens
actttgtggagcatcataaatactttatttcacaatgaaaagagttccttatgtttttgataataaaattagaatgtaaaagtaaaatttaaaaagtaatacagaaagctcaaaggaaaaagtaaaaattaaccaaaacatcatctctaagtgataaaagatgttaaattattgaatagccttttgtatagttttctgtgcatatatgtagacacacaatctcatgtacaaatttacaaagtattatttttatgaactagagcatacttatcctgaatttaactaatttcctttccttcaagatatttatttatatcttttaatgtgaaaattatacatcctcatcatcatttgtaatgactgcacagtattctattgtatatttgttctaaaattcagttaactagctttccattgatggatatatttagtaagtaaacaggaccagggcaatgcagctggacagagagctcagttttaagagagmatctctgttcccctgctaatctcttttctaaagctgcaaatacaacgacaatcttgtttgtagctaataagctctaagcacacaaggaccaggcacgcaaacatgttccataccacctgtgcaagacattgtctgaccccatcaactgtaagctcctggaaaccttttaa

SEQ ID NO: 881857 - DNA, 657 bp, Homo sapiens
actttgtggagcatcataaatactttatttcacaatgaaaagagttccttatgtttttgataataaaattagaatgtaaaagtaaaatttaaaaagtaatacagaaagctcaaaggaaaaagtaaaaattaaccaaaacatcatctctaagtgataaaagatgttaaattattgaatagccttttgtatagttttctgtgcatatatgtagacacacaatctcatgtacaaatttacaaagtattatttttatgaactagagcatacttatcctgaatttaactaatttcctttccttcaagatatttatttatatcttttaatgtgaaaattatacatcctcatcatcatttgtaatgactgcacagtattctattgtatatttgttctaaaattcagttaactagctttccattgatggatatatttagtaagtaaacaggaccagggcaatgcagctggacagagagctcagttttaagagagcrtctctgttcccctgctaatctcttttctaaagctgcaaatacaacgacaatcttgtttgtagctaataagctctaagcacacaaggaccaggcacgcaaacatgttccataccacctgtgcaagacattgtctgaccccatcaactgtaagctcctggaaaccttttaa

SEQ ID NO: 881858 - DNA, 600 bp, Homo sapiens
agaaatggagagtgaccacttaatgggttatagggtctcattttggggtaatgaaaatgtttcaaagctagatagaggtgatagttgcacaacattgtgaatagactaaatgccactgaactgttcacctttaaatggttaattttagttatatgaatttcatctcaattaaaaaacagtcggccgggcgcgttggctctcgcctgtaatcccagcactktgggaggccaagccaagtggatcacaaggtcaggagatcgagaccatcctggccaacatggggaaaccctgtctctactaaaaatacaaaaattagccaggtgtggtgatgtgcacctgtattcccagctactcaggaggctgaggcaggagaacagcttgaacctgggaggcggaggttgtagtgagccaagattgcaccactgcactccagcctggagacagagcaagactctgtctcaaaaaaaaaaaaaaaaaaagtcagtggcataaaagtattcctttttcactttagagaaactgaactgatttttataggatgatgtaatattttatcccaaatatcagatcctagaatagattaagtattggttgcatttc

SEQ ID NO: 881859 - DNA, 645 bp, Homo sapiens
tgcccatggcagttaggcaagaaaatgaaagaacaagtaccaagattggaaataaagaaataaaaccacttctatttaaagatgagatgatattatatagagacaatcccaagaaatccactaaaaattattagagctaatgagttcagtgattgcaaggtayaaatcaatatacaaaaatcaattataattctttatactagcaattaatatgaaaatgaaattaattccatttacaatagcatcaaaaataatgaataaatttaaccaaatttaaccaaaaaagggcatcgcttttaagatcacaaaacattgctgtaagaaattaaagacctaaataagtagaaaaacatctgacactcatggattagaagatttaatattcttcataatactccccacatcaatctacggattcaatgtgatccctatcaaaattccagctagctcctttgcagaaatttgcaagctgaccctaaaattcatgtggaaattcaagggacccagaatatcccaagaaatctagaaaagaacaaattcagaggattcatacttaccaatttcaaaagttactataaagctatagtaatcaagacgtggtactagcatgaggatagacatatcgaacagtggactaagattgag

SEQ ID NO: 881860 - DNA, 645 bp, Homo sapiens
tgcccatggcagttaggcaagaaaatgaaagaacaagtaccaagattggaaataaagaaataaaaccacttctatttaaagatgagatgatattatatagagacaatcccaagaaatccactaaaaattattagagctaatgagttcagtgattgcaaggtacaaatcaatatacaaaaatcaattataattctttatactagcaattaatatgaaaatgaaattaattccatttacaatagcatcaaaaataatgaataaatttaaccaaatttaaccaaaaaagggcatckcttttaagatcacaaaacattgctgtaagaaattaaagacctaaataagtagaaaaacatctgacactcatggattagaagatttaatattcttcataatactccccacatcaatctacggattcaatgtgatccctatcaaaattccagctagctcctttgcagaaatttgcaagctgaccctaaaattcatgtggaaattcaagggacccagaatatcccaagaaatctagaaaagaacaaattcagaggattcatacttaccaatttcaaaagttactataaagctatagtaatcaagacgtggtactagcatgaggatagacatatcgaacagtggactaagattgag

SEQ ID NO: 881861 - DNA, 645 bp, Homo sapiens
tgcccatggcagttaggcaagaaaatgaaagaacaagtaccaagattggaaataaagaaataaaaccacttctatttaaagatgagatgatattatatagagacaatcccaagaaatccactaaaaattattagagctaatgagttcagtgattgcaaggtacaaatcaatatacaaaaatcaattataattctttatactagcaattaatatgaaaatgaaattaattccatttacaatagcatcaaaaataatgaataaatttaaccaaatttaaccaaaaaagggcatcgcttttaagatcacaaaacattgctgtaagaaattaaagacctaaataagtagaaaaacatctgacactcatggattagaagatttaatattcttcataatactccccacatcaatctacggattcaatgtratccctatcaaaattccagctagctcctttgcagaaatttgcaagctgaccctaaaattcatgtggaaattcaagggacccagaatatcccaagaaatctagaaaagaacaaattcagaggattcatacttaccaatttcaaaagttactataaagctatagtaatcaagacgtggtactagcatgaggatagacatatcgaacagtggactaagattgag

SEQ ID NO: 881862 - DNA, 607 bp, Homo sapiens
aacatttttaggaagctttccattctatcccaatccagaaaacatcagggccaggcctgggagcttagtcactattgatttcctttcaaagtacatctgagttccaatcacagcccagcccccacaaaaaggaggtaatgtggaaaaagccaccctcaggaatcctcttggagagagatggttaaaaaaaaaaaaagcccacttagagaaggaaatacatccatcgtctgtgataaggcccccatacgtgagcctccctaaaatacctgcagctcacctcgttcagtggggtgagtgtgttttggaagaaaggctgcaccacaaccrcaaagtcctcacgctgtgtgtattggtgccagtaggagaaactggagatgccatgctggggacagagagagaagctgctcaaccctcctggcaaggctgcacagacagggtccagtcctgctgccttggattggttgttgacgggagtcaactcaccctaaaggacagtgactttaaggggctactctagtgggatgcaaacatacttttattctccacccattcatgggcacggacatttcaaagccctatgctggttctcaggatcagagatgagttg

SEQ ID NO: 881863 - DNA, 420 bp, Homo sapiens
tgttataattatgtcttttgaacacacttctcagttatataggaggttcagggacgtatactgatggttgctaagttaggaattctggtctactaatcttttaattagtttcaaatgtgcagagacttggggctcagggagtagaagaaataagactaagctcttaaatcatattgaaaaaatacttttgttgtataataatgcttytatgtgtattgggaatgggagggaggtaaggggctgaggaaggaaaactagctgtaaatgcaactgggaagatgtggaagaaggtggcctctgcgaaggaagtctccagaccttgactaaaaggacaggattaccttcttcaggtgaggagcagccttccaggctacctgaaacccccagctaccaaacaaaacactaactcagttcactggg

SEQ ID NO: 881864 - DNA, 681 bp, Homo sapiens
ggaaacactcctggaggttttgatatctaggcttgaatgtgaagagcgaggggctatcaacttactgggatatggaagaatgattattcaaagaaatagcatccaaaaagcaacacactcagatgtgtgttttcaaaataccactctttttcataaagtacttcaatgagggctggattagaagcaaggagaccaaccagaagacaatagcagttgtaccttcaagaggtgatgttggccacaacagaggagaaacagaagaaatcgaaagagattaacagaattattgttagttaggaatgaggccaggagaactgaggctgctgccaagtatccayctcggacatggtgttaccattccttgagctgggaagcacagaagaaggagcaggctgaggaaccagagctggagaaagaataggatgagctcagttctacccatgctttacctgtgttgcctgctgggcacccacagggaggggcccagagggaagttggctatatgggtctgaaacacaagagagaagcaattacagtagattaatttcagagataatattttcctcaatgggatgaatacattgtacatatatgaagctaattctttcaaatatgaacccaggagtaaagagtctctagttcagtctttgatatgtataatcaaaggctttgcatgtcttt

SEQ ID NO: 881865 - DNA, 600 bp, Homo sapiens
gtgttgtgggagggtcctggtgggagataatggaataatgggagcagtttctcccatactgttctcatggtagtgagtaagtctcacgagatctgatggttttattagaggacacccctttcacttggcactcattctctctctttgcctgctgccatccatgtaagacatgacttgctcctccttgccttctgccatgatcatgatgcctccctagccatgtgaaactttaagtccattaaacctacttttattcccagtctcaagtatgtctttatcagcagcatgaaaatggactaatatagcaaattggtaccagtagagtagggcactgctgaaaagatactcgaaaatgtggaagcaactttggaactaggtagcaggcaggggttggaacagtttggagggctcagaagaagacaggaaaatatgggaaagtttggaacttcctagagacttaytgaatggctttgcccaaaaatgctgacagcaatatggacaatgaggtccaggctgaggtggtctcagatggagatgaggaacttgctgggaactggagcaaaggtgactcttgttatgtttcagcaaagaaactggtga

SEQ ID NO: 881866 - DNA, 640 bp, Homo sapiens
  misc_feature 431: n = A,T,C or G
aactggagcaaaggtgactcttgttatgtttcagcaaagaaactggtgacattttgcccctgccctagagatttgtggaattttgaacctgagagagatgatttagggtatctggcagaagaaatttctaagcagcaaagtattcaaggagtgacttgggtgctgttaaaggcattcagttttataagagamgaagagcataaaagtttggaaaatttgcagcctgacaatgtgatagaaaagaaaatccaattttctgaggagaaattcaactggctgcagaaatttgcataagtaacaaggagccaaatgttaatccccaagacaatggggaaaatgtctccagggcatgtcagaggccatcatggcagcccctctcatcataggcccagagccctaggaggaacaaatggtttcatgggccaggccangggtccctgtgctgtttgcagcctagggacttggtgtcctgtgtcccagtcgctccagctgtggctgaagggggtcaacatagagctcaggctgtggcttcagaaggtacaagccccaagccttggcagcttccatgtggtgttgagcctgtgtgtgcacagaagtcaacaactggggtttgggaacctccacctagatttcagaggtt

SEQ ID NO: 881867 - DNA, 638 bp, Homo sapiens
  misc_feature 442, 444: n = A,T,C or G
ttactgaaggcaagctttatgcaatctcttactcattttaactgatttaataacagagcccatataccaatatcatggttgaaaggctttgtggagaaatattattttaaccactgaagtaccaaaaataaaccttctgaagccattgcttaatttcatatctatattttaaaagcatatcataggacatggatgaagctggaaaccatcattctcagcaaactatcacaaggacaaaaaaccaaacaccrcatgttctcagtcataggtgggaatttaacaatgagaacacttggacacaggaaggggaacatcagaacccggggcctgttgtggggtggagggatgggggagggatagcattaggagatatacccaatgtaaatgacgagttaatggggcagcacaccaacatggcacatgtatacatatgtaacaaagncncgcgttgtgcacatgtaccctaaaacttaaaagtataataaaaaaagaaaagaaaaaaaaaagcatatcataaattgttatggattcattcttctcttgaagaatattttgcttgattttggttttagctgatataacataaagttctgagattaataaaaagtaattattatagtgtacccccaaattttttt

SEQ ID NO: 881868 - DNA, 654 bp, Homo sapiens
caaacattcagattgtaccaaagcccagtagcaggccaagatcctctcttggataactactctcttaaaaggagagtagttatctgcagaagtagttatctgcagaagaccttgctccaaaatcctagaggtctctgctctgatttacctatgggggcctgacaaaggctccaaatgacatccctatctgtcactgatacctcaaacaccattggatctgctgggccatgtggcccaagtggcagagcagcttatacagtagcctggacctgttgcagagccttctcctgttctggaccccactcaaaactgtcaacctttcaggtcactcgataaatgggccagagtaacacacacaaatgaggaatgttttgcctccaaaattcacataggctgactaggcattgtgcctctttcttggttgtaggaggggccaaatgcagcaccttacccttcatcttagaaggaatatctcaacaggccccacaccactggacccctagaaattttamtgagatagaagttccctgaattttagttggatttatttcccatccttctgtacacaaatgtctcaccaacaagtccaatgtgtttgctacttcttgctcactggatccaatcagcataatgtcatcaatgtaatggaccagt

SEQ ID NO: 881869 - DNA, 620 bp, Homo sapiens
gctgtatttacccaatgcctgtaccctcattgtatctaggaagtaactaacttgcttttaattttactggctcacaggcagaagggacttgcctggtctcagatgagactttggacttggacttttgagttaatgctggagtgagttaagactttgggggactgttggaagggcataattgtgttttgaaatgtgaggacatgagatttgggaggggctggggcagaatgatatggtttggctgtgtcccacccaaatctcatcttgaattgtatttcccataatccccacgtgttgtgggagggacatggtgggaggtaactgaatcatggggsctgttaccctcatgctgttctcgtgatggtgagtgagttctcatgagagctaatggttttataaggggcttttctcccttttgctaggcacttcttgctgccaccatgtgaagaaggatgtgtttgcttcctcttttgccacaattgtaagtttcctgaggacttcccagccatgctgaactgtgagtcaattaaagctctttcctttataaattacccagtcttgggtatgtcttgactaactgagagcagactaatacactcagtctcttgaaaaataaaacc

SEQ ID NO: 881870 - DNA, 587 bp, Homo sapiens
gaaaacagaatggcactcccaagctggccaaatttatgcaagctaaaaatgcttattatccttccggccagcagttccatttattaaggtctatctttaaaaaaaacattgtacatctacataaaaaaccatgaacaagaattttcagggagcattattttaagagcaaaaaaaaggcaatcatctaaatgctcaccaacagaaagctaactaaattatgctacacccataccatgaaatactgtaagtaaaatttatatactgacatgtgagatgcataagaccctacaaaaatgtttaaatgaggttgcaaaaatgtataaagtctgatcacatttgtgaaaatatgtttgtgtatggttttgaacaaatgcctaggaaaggttttggagggatgtaaaacaaarctcttcatgctatacttttgggaggcaaatggggctagggagagtgtgctgaagcgatgctgaagataaacttctcaactgattaaactttacaatgagaatatgttcatgtattaattacataaaagattataataggaatatggaaatcatccctttacaacttggaagtttggattt

SEQ ID NO: 881871 - DNA, 612 bp, Homo sapiens
tttgcgtgtccctgaggttaaagattgaaatgaacaaatttccagaaaatccggcctctgaggctttggagcactgggtacaccctaaaggaacatgcaggcttttcgctttttaattttatttcatgactcctcacagttcagcagtggtctgattttaagtgtcatctgagttactaggaatgtgaatcctaaaaatgcctactatgtggtcttaatttcaagttctggcctcagcatcagcctctgtacttaaamattaggaaagaaaacaaaattggctgaatgcctgctagactgtgcatctttagttttaactcaagactttaactaaagactgtgcatctttagtttaactgtgagggtggcgagtattcttatttcacagatgaggaaagagaatcttagggtaagcacctagcccaaggtcacagagagggtaagtgatagaattaggattataaagtcaaaataattggctctaaagttaattctaaatttccctgagaaccaatggggaaaaataaaactttctattaataccataagcagaaacatgtaatattcttcatgaaaagggtcagtaggatgtggcagttaagagcacagatt

SEQ ID NO: 881872 - DNA, 612 bp, Homo sapiens
tttgcgtgtccctgaggttaaagattgaaatgaacaaatttccagaaaatccggcctctgaggctttggagcactgggtacaccctaaaggaacatgcaggcttttcgctttttaattttatttcatgactcctcacagttcagcagtggtctgattttaagtgtcatctgagttactaggaatgtgaatcctaaaaatgcctactatgtggtcttaatttcaagttctggcctcagcatcagcctctgtacttaaacattaggaaagaaaacaaaattggctgaatgcctgctagactgtgcatctttagttttaactcaagactttaactaaagactgtgcatctttagtttaactgtgagggtggcgagtattcttatttcacagatgaggaaagagaatcttagkgtaagcacctagcccaaggtcacagagagggtaagtgatagaattaggattataaagtcaaaataattggctctaaagttaattctaaatttccctgagaaccaatggggaaaaataaaactttctattaataccataagcagaaacatgtaatattcttcatgaaaagggtcagtaggatgtggcagttaagagcacagatt

SEQ ID NO: 881873 - DNA, 643 bp, Homo sapiens
tttataatgatacatgtcatacatatgtaattgaattatgctttcaagaataatctgatgaagatggatagatggatagagtactagaatttaatcagtcttgaggacagactatgtcatcattacactttatcaattacaaatctttgatggaagcatcacgtagttttcatttttatatttcctgtatttaaattgtcaactaagctctccaaaattgcaagagcaatatggctagaggtaaagatggtaatacaacattactatttctaaaagtataccataattctttaaaatagggactgtactccctgggcatacatagatatggtttaagtasaggatcacctgatagtctgactcagggcaatattcaaattgtttaacagccaaggcctccagtggtaccagatgttgctttgttgtaactggattatgcagagatcaaagtcaggggcttttaatgaaattataaaagacttataaaaaagagaagattatggaaaagtcctaaattaaatacaattaaaattcaaaatgatatttctcaacctgagaactaaaataaccattttttattagattcttaaccatgcttactgacatcatcaatatgtaagtattataccagacacttggaaat

SEQ ID NO: 881874 - DNA, 592 bp, Homo sapiens
ccttaataattgaaacttaagcattcattaatataaaacccagtcatatttggggggcatagaaatggagaaaactgtgacacaaagaaagatctaaagtacccagacatgattatacagaaaaattggtattcttatagactgagctatttttaaaagttagtgrgttttttagtttcaaaatagcaaaatgctttctataataacttacttcttctagattagcactaaattaagttttataaagcctgtaaaacatgagagcctttcttgatatgaaaataatttatacttaacaataaaacatgagcatgtctggaatcatctgggctctggatatgatgaatttgtttaaagagctatacaacctacaagatatttatgtctgctagccagacacaaacattttctaatgagatagaagacaggttgattttttttttcttttttttttttttttttttagatgaagtctcactgttgtcccccaggctggagtgcaacggcacaatcttggctaactgctacctccgcctcctgggcccaagtgattctcctgcctcagcctcctgagtagctgggattacaggca

SEQ ID NO: 881875 - DNA, 497 bp, Homo sapiens
cctatttatgatgccacaggaaaactgcttgtgacttcaacaacaattacaatcagaatgccaatatgttactacagtgatgatcatggaccaataaaaaatgtacaagtgcttgtgacagaaacaggaggtatcatcacatgtcaatttatcttgttaaattgtggagtgtagattactgagtgctaaaaagaatttagttcaaattaagattgactcccagttatcacacrcctcttgagattaatagattgtcaatattattattaatgataccaatcatttctttgtaaataaataaattatttatttattttatttgtaaaacttttataaatgtcatttatttataccaattatttattcttttttacctatcaagaaaggcacagttaaaatatgtgatttattaattccatatactagtagataaacatgttttgattttggtaagatggaatcttgatagcttctttggaggggtgaacaagtgagtt

SEQ ID NO: 881876 - DNA, 610 bp, Homo sapiens
aggaggctgaggcaggaaaatcacttgaagatgaaccgagattgtgccattgtactccagcctggcgacagagcaagactctgtctcaaaaaaaaaaaaaaaaaaaaaaatcactttctaagcagtaaagcactatacaaacataagtcgtttttcagttaataataaagctacttgggaggcaggaggatsgtttgagcccaggagatcgaggctgcagtgagctatgatcaagccactgcattccagcctgggtgacagagtgagaccctatctctaataaaaaagaataataataaagttaaaacccttttatagccaatagatgagaggtaacgccttcttttaaaaatactcctggttctctggtatagatgatgttagtctgtatctaacctactccactaatttgggtccctccaggccatctacaaaactggttttatgacagtcttgcagcaccaataacggttatcttctagctctgtattcaaactctctagaaccctacctgtcacctccaccccaaccatatgcacacagttccttctcagaacaagattctgttctgatagttggccctcatcttaataattcatttatccaatgc

SEQ ID NO: 881877 - DNA, 610 bp, Homo sapiens
aggaggctgaggcaggaaaatcacttgaagatgaaccgagattgtgccattgtactccagcctggcgacagagcaagactctgtctcaaaaaaaaaaaaaaaaaaaaaaatcactttctaagcagtaaagcactatacaaacataagtcgtttttcagttaataataaagctacttgggaggcaggaggatcgtttgagcccaggagatcgaggctgcagtgagctatgatcaagccactgcattccagcctgggtgacagagtgagaccctatctctaataaaaaakaataataataaagttaaaacccttttatagccaatagatgagaggtaacgccttcttttaaaaatactcctggttctctggtatagatgatgttagtctgtatctaacctactccactaatttgggtccctccaggccatctacaaaactggttttatgacagtcttgcagcaccaataacggttatcttctagctctgtattcaaactctctagaaccctacctgtcacctccaccccaaccatatgcacacagttccttctcagaacaagattctgttctgatagttggccctcatcttaataattcatttatccaatgc

SEQ ID NO: 881878 - DNA, 654 bp, Homo sapiens
acatgacctaaggagatctcacaggtatcttctcagaggaatatacatgcctaggaaccagacaatcagcttcaagaacaattgaaagttaattgtattattgttggccatgccacccactgccaatagactacttgcagatccagcccctttacactgttgagcatttattccaccagctttcagacccgacttttattccaccagtagagtgctgctgaagatacagaaaataatttgttgatacttcttaatctaatcctaggaagtcagccatagaatgtcacctgatacagaaacaatgtttctagaacccacactgcacaatcttgtataccatcccctacgacacacacaggcaaatacacatgccttcttgcttttaaatatttatcattttggaatckaccagtactgtatttgatacctgatgctttctttaggtaagcatataaatctgggtgccttatagttacaccttggcagtaactacaaaaaaaattgtttaaggtccatcaacttctgcctacccccacaaaaaaaaaattaaaaaccaaatcacatcttttctagaaacatcacaggggaattccatgactaatgttatgcaaaacttaaatccactatccctgtatatttctgcaattcactttc

SEQ ID NO: 881879 - DNA, 645 bp, Homo sapiens
ccccagaagtgagaattttgtagttgaaaaagaatcagaaagagaagcttttgataaataaaccagagtactgagctaaaccttgtacaacacaagctagatttcaaagtagatggtgagaatgagcctagagtttgaaaattctgccagaaagttttgttttatgtttttgtggagttttttaaagaaacattttgcttttttgttttggacttgaagattgtgctcaatacagtttttcttcctttaagtgacacctattaaaagagaaaagtaaattgttcaaatagaagaattaataagacaaataaatgcccttttctgaagaatytaaattttcttacttgggatctgattatgaaattccaattataaataaactcccaaccccttacccaaaaaaggaatgtctccaagtttagactgaggtaggataaatactcaacattctattccaaataccaagaacaaggtaggtattttccctgctgcttccttaccctgaaatttgacgttcattttaatgatgcttactttattacttgtcagaaaagtgaaatggcctgtcaattttatggagtttctcctacctttcaaatgattatattacattttgaaataagtgtatagctcccacctcctttt

SEQ ID NO: 881880 - DNA, 659 bp, Homo sapiens
tttctagcttcatccatgtccccaaaaaggaaatgaactcattcttttttatggctgcatagtattccatggtgtatatgtgtcatattttctttatccagtccatcattgataggcatttggattggttccaagtctttgctattgtaaatggtattgcaataaacatacatatgcatgtgtctttttagtaraatgatttataatcctttgggtatacacccagtaatgggattgctgggtcagatggtatttctggttctagatccttgaagaataaccacactgtcttccacaacagttgaagtaatttacactccaactagcaatgtaaaagcattcctatttctccacatcctcaccagcatctgttgttacctgactttttaatgatcgccattctaactggtatgagatggtatctcattgtggctttgatgtgcatttctctaatgaccagtgatgagctttttttcatatgtttgttggccacataaatatcttcttttgagaagtatctgttcatattctttgcctagtttttatggggttgtttgtttttttcttgtaaatttgtttaagttccttgtagattctggatattaactctttgtcagatggatagattgcaaaaattttctcccattctgtgagtttgc

SEQ ID NO: 881881 - DNA, 629 bp, Homo sapiens
ttctggcttgtagggtttctgcagagacatctgctgttagtctaatgggcttcccttttagataacttgacctttctctctggctgcccttaacatttttttctttatttcaaccttggagaatctgatgattatgtgttgctctttttgaggagtatcttagtggtgttcactgtatatcctgaatttgaatgttggcttgtcttgctaggttgtggacattctcctaaataatatcctgaaatgtgttttccaacttggttccattctcccmgtcactttcaggtacaccaatcaatcataggtttggtgtttccacatagtcccatatttcttggaggctttgttcatttcttttcattcttttttctctaatcttccctttgcaccttatttcagtaagtttatcttcattctctgatatcctttcttctgattgattgattctgctattgatactgtgtatgcttgacgaagttctcctgctgtgtttttcagctctatcaggtcatttatgttcttctctaaactgcttattctagttagcagttcctgtaaccttttattaatgttctttgcttccttgcattgggttagaacatgctcctttagcttggaggagtttgtta

SEQ ID NO: 881882 - DNA, 596 bp, Homo sapiens
caaaaaaataggcttacatagtaacttttatccatcaacttacctatcgatgcttaacagaaaagcagcccccttttacctagcccattttaacatttaaaaaaaaaatacccatagtagacatattctttaaaagacaaaagcccaataaaacgtcaaacccttctgtacatagttgtaacaggttttcattttatggatgtgctcttgtcagtttgttaaaataggggaatcagctagtagctgttctaatgaacaccataattcaataacttacaaacttttttcacctcaggcacaaattcttgtttcgagaaggcacaggttttaaagctcaagtgatcctcctgaagttacagatgcacaacatttaaaacaatgttgaaattcttytaggtatttaactccagttagcataaagctttttttttttttttgaatcttcagctaaaccgggaaccattagtcaagacttcctgttacactggctataaagcatctcaacaggtggattccagaaaaggtcacagcactgtgaaaagaaaagagaaataattttcttcctttcctcagatataacatctgaattcatcaac

SEQ ID NO: 881883 - DNA, 622 bp, Homo sapiens
caatagtttgctgagaatgatggtttccagcttcatccatgtgcctacaaaggacatgaactcatccttttttatggctgcatagtattccatggtgtatatgtgccacattttcttaatccagtctatcattgatggacattygggttggttccaagtctttgctgttgtgaatagtgccacaaaaaacatacgtgtgcatgtgtctttatagcagcatgatttataatcctttgggtatatacccagtaatgggacagctgggtcaaacagtatttctatttctagatccttgaggaattgccacactgtcttccacaatggttgaactagtttactgtcccaccaacagtgtaaaagcgttcctatttctccacatcctctccagcaactttctttcatttatatcagtagtccaacttattgtaggacctgggaacacacatttatatttcttttcaaactgaaggcaataactatttagattattacatactgcttccagaagaaatctcacataaaactataatttcagtttataccattttcaaccacatacttcattagcactagactatagactggcatttgcaaaaacaaaagctagttataaaaaaaacac

SEQ ID NO: 881884 - DNA, 531 bp, Homo sapiens
cgctaatttgagggtgaccttgggcaagctgctccagtttcttgggttctagccacccacccttctactgccaaaaaggaggggctccgattaggttatctgatgatccttccagctatgacatcagcttatgttcccaaaagctgctgtacgatgaggcctcctgcccttcaggagccaaaacaaaaagacacactggaccatttcatctccaccaggagcttaaggaacgttggaggccgcgtctaacctcagtcccccaggaaaacrctgtctgagcctgcccagagtgcaagcagccccccactcctttcggaagccagccacgcaccgccccacttcaggtgcccatccatcagctgggtttcctggggaaacagagctcattctttagctctcttttatggcttttacccagaattgatttgaataaatcagtctaatgctgtctctacaatggaaccaattgtaaaagagctttatttcctcagctttgaaagcaggttggagctgccttcttcccacagcaag

SEQ ID NO: 881885 - DNA, 593 bp, Homo sapiens
ctttcactgacctcttttgttttggaatttgggggactggggtagcagcctttttggctcccttaggaggacacttcccccaaagttcccaaagacacagaatctaggcactatccagcacccaacatccctactctcttgccaaacacccaccttgtgtgtcatagaaaaacaaaggtagacccccaatgccactcagtctgataccgtctctgatttttggggtgtcacaaatctcaggagccattttattcccgccctccccgcccccccagctcttcatggggataaggctgagcttcctgggaaagggaatgagcgctccagccccacatccggaaagaacgtggtgttatcatttggcttttaaaaaattctccttgtggttcatgtctattttgggaggatattagctcagagcctcaayaggggactgcccggtctgagtttcttgtctgaagaccgagccaagcctagaacaggacatctgtgggtgccacccgtggggacgtgtgctcagaacccaatgggcactgcccgaggctaccgtggtgagcggtgtcgcgccggggagtacacgcagagaccaaaag

SEQ ID NO: 881886 - DNA, 606 bp, Homo sapiens
tctaatatctcagtttacagaattagtctagataaactgttaaagtgaaagaattgagtacagtgaatgagataaatgttttcagtaaactttttgtgtaaattaaaatcttaaaattatttttaatgcttattgaatatttgggtcttttccaattaagaaagagttgtgatatggggaaatctgttcctaaaatagtggcattattcttatctataaatactcatatctgatagttcargatttcttgctttttagggtttcagtaaacctttaggttactaaggataagaattctagtaaacacaaaattctgtatatacaatgtgccagaaaggattgtgttattagtgagaaaaagaataattttgtctaattcagaagttatctaaaagttagttcaaattatagatttgaaaagattatttatgaaacaatgtagtaacgaaccagtaagtagggaagaaagatgtggaaacagtttagataataaaatattctttaaagcctgatagagaattgacttcattctttacttgctttctttgtgcattttgtccaattctttgttcaaaatgccaagaacctggagaccctcaactggta

SEQ ID NO: 881887 - DNA, 606 bp, Homo sapiens
tctaatatctcagtttacagaattagtctagataaactgttaaagtgaaagaattgagtacagtgaatgagataaatgttttcagtaaactttttgtgtaaattaaaatcttaaaattatttttaatgcttattgaatatttgggtcttttccaattaagaaagagttgtgatatggggaaatctgttcctaaaatagtggcattattcttatctataaatactcatatctgatagttcaggatttcttgctttttagggtttcagtaaacctttargttactaaggataagaattctagtaaacacaaaattctgtatatacaatgtgccagaaaggattgtgttattagtgagaaaaagaataattttgtctaattcagaagttatctaaaagttagttcaaattatagatttgaaaagattatttatgaaacaatgtagtaacgaaccagtaagtagggaagaaagatgtggaaacagtttagataataaaatattctttaaagcctgatagagaattgacttcattctttacttgctttctttgtgcattttgtccaattctttgttcaaaatgccaagaacctggagaccctcaactggta

SEQ ID NO: 881888 - DNA, 606 bp, Homo sapiens
tctaatatctcagtttacagaattagtctagataaactgttaaagtgaaagaattgagtacagtgaatgagataaatgttttcagtaaactttttgtgtaaattaaaatcttaaaattatttttaatgcttattgaatatttgggtcttttccaattaagaaagagttgtgatatggggaaatctgttcctaaaatagtggcattattcttatctataaatactcatatctgatagttcaggatttcttgctttttagggtttcagtaaacctttaggttactaargataagaattctagtaaacacaaaattctgtatatacaatgtgccagaaaggattgtgttattagtgagaaaaagaataattttgtctaattcagaagttatctaaaagttagttcaaattatagatttgaaaagattatttatgaaacaatgtagtaacgaaccagtaagtagggaagaaagatgtggaaacagtttagataataaaatattctttaaagcctgatagagaattgacttcattctttacttgctttctttgtgcattttgtccaattctttgttcaaaatgccaagaacctggagaccctcaactggta

SEQ ID NO: 881889 - DNA, 569 bp, Homo sapiens
atactgttaatctttctctcattcttccccaaggagacctccagccttttaccagagtaactgtgcactggggaaagagaaataattagatttttaggggactattggacactggatctgagctgatgttggttccaggaaacccaaaacgtaattgtggttctctagttaaagtaggggctcctggaagtcagttaattaatggagtttagctcaggtctgacttacagtgggtccattgggtcccaaaactaaacctgtggtcatttgcccagtgtcagaatacataattgatatagacatacytagcatctgccataatccccacattggcacctgactattagggtgagggctctcatgtgggaaaggccaaatggaagccattagagctgtctctaccgagaaaaatattaaatcaaaaacaatatcccatccctggagggattgcagagattagtgccatcatcaaggatttgtaagacacaagggtggtgattcccaccacatccccattaaactcacctatttggcctgtgcagaagacagttgtatcttggagaatgaca

SEQ ID NO: 881890 - DNA, 616 bp, Homo sapiens
ccagtagtaggtaccaacactgagctgtcaatatggcaccattccccagggtgatcagccagctacttggtggcaggttgattatattggacctcttccatcatggaaagggcagaggtttgccctcactggaatgaacatttactgcagatatgggtttgcctatcctgcatgcaatacttctgcaaagactaccatccatggactcatggaatgccttatccaccatcatggtattccacacagcattgcctctgaccaaggcacttactttactacttaagaagtgcaacaatgggctcatgtttatggaattaactggtcttaccatgttccccatcatcctgaagcagctggattgatagaactgattggaaggccttctgaagtcacaattacaacatcaactaggtgacaatattttgcaggactggggcaaaattctccagaaggctgtgtatgctcygcattagcatccaatacatagtactctttctcccatagccaggattcgtgggtccaggaatcaaggagtggaagtggaaatggcaaggatgcaaacaggtccaagctgctgtgcaagctgcagcctggacctgtttggtgagcttgatgg

SEQ ID NO: 881891 - DNA, 639 bp, Homo sapiens
aggtgttatggttctataaccaaatacttaatactgggtaacttacaaagaacagaaatttatcttctcacagttcttgaggctgagagtccaagatcatggcactgccaattttggtgtccagttaaggcaccatctctacttccaagatggcaccttgagcactgcatcctacgacggataggaacactgtgccctcatgtaatagaaggcagaggggaaacagagaatgaactcccttggtcaagctcttttacggtagcattaaggcattcatccattcatgcaggtggagcccttatgacctaaacacctctccaaaacttccacatcccaaagtgttgcttttaggattaagttttaatatgagtttttggaagggacaaaaatattcaaaccatagccatcaccaaagttatgtttggcatctcatytaatagattattcagaacactttgcttttgcttctaatttgcttcgacaatctttgaatttgtctgaactttcattgctgaaaactttatcataggccacaggtaaccattttcattgctttgtggaagtttgctttttaatttttctataggtatatacttatgatttatccaaccatatcacttattgcatcatttatttcat

SEQ ID NO: 881892 - DNA, 645 bp, Homo sapiens
gcctcagaaccagttaccataataagactatacctttactgactaatcttcctgtcatatgtcttttgttttctttttatacagatttggaccagccataatcttgaagtgtcagtaacaaaataggtttaatgtacaacatgaatagatctgaacaatgcaaggaattgactgtcacaaatacatgttcttatataaaaaaagaaaagaaacaaatgacattcctcatgaagcttacactttagtagagaaagtcatgcttattattattattacyattctttttttattatactttaagttctgggatacctgtgcagaacatgcaggtttgttacataggtatacgtgtgccatggtggtttgctgcacccatcaaccagtcatctacattaggtatttctcctaatgctatccctccccttgccccctacccccaagaggccccagtgtgtgatgttccgctccctgtgcccacatgttctcattgttcaactcccacttatgagtgagagcatgtggtgtttggttttctgttcctgtgttagtttgctgagaatgatggtttccagcttcatccgtgtccctgcaaatgaaatgaactcattattttttatggctggatatgacatattttctttatcc

SEQ ID NO: 881893 - DNA, 618 bp, Homo sapiens
ctaagtcttatattctatggcaattagttgacaggaatctttgtctattgaagccattttttactcttactctgattccagaaaaccacatctcaagcaaagaaaaggttgtttgttggccgggcgcggtggctcacgcttgtaatcccagcactttgggaggctgaggagggcggatcacgaggtcaggagattgagaccatcctggctaacatggtgaaaccccgtctctactgaaaatmcaaaaaaaaaaaaaaaaaaaaaaaaaaaaaaattagccgggcgtggtggcgggcgcctgtagtcccagctactcaggaggctgaggcaggagaatggcgtgaacctgggagggggagcttgcagtgagcagagatcgcgccactgcactccggcctgggcgacagtgagactccgtctcaaaaaaaaaaaaaaaaaaacaaaggttgtttgtctttctctttcttatgaggggagtgggcttcccatctagttttcctagaagaaatccctctctgagttaaaagagccttcctgcctacaatctggctgagatagaacatttttcatttgtttgtttgtttgctttaatcttatgactgtcaccactgagtgact

SEQ ID NO: 881894 - DNA, 646 bp, Homo sapiens
aacattccatgctcatggataggaagaatcaatatcattaaaataaccatactgccaaaagtaatttacagattcaatgctattcctatcaaactaccaataacgttcttcagagaactagaaaaaaactattttaagatgcacatagaaacaaaaaagagccctaatgaccaaggcaatcctaagcaaaaacaacaaaggtggaggcatcactttacctggcttcaaaatatactacagagctacagtaaccaaaacagcatggtactggtacaaaaacaaacacatagatcatggagtagattagagagcccagaaataagggcatactcctacaaccatctgatcttcaacaaagctgacaaaaaaaaaaatgttgctgagataactggctagccacaygcagaggattgaaactgatccccttcttacaccatatacaaaaatcaactcaagacggattaaagatttaaatgtaaaaccaaaaactataaaaaccctggaagacaacctaggcaataccattttggacataggatgcacaaagattttttgacaaagttgccaaaagcaactggaacaaaagcaaaacttgacaaatgggatataagtaaacctaagagcttctgcacagaaaaaagaaaac

SEQ ID NO: 881895 - DNA, 608 bp, Homo sapiens
aacttcttagcctccagaactgtgagaaacaaatttctgttattcataagccacctcatatgtggcattccgttatagcagcctaaatggaccaagaccatacaaaaccaaagaaaaaatgcatgacacaaaattgtgctctataaaatatcargttttgtatgggaggtgtttaaagacaaggcaggctagaattgagaaacatgcagaaagaaagcagtatcagccatcactgatattttcactctctattctcctaacaatcattaccttcctgataatgagtattctatccattactggtggaaaaatttcaaaggaaatttatatgtaatgtgaaaatatagaaaatatctgattgccaatttatctaaaaaaaagtttagagaaacacacaaagtagtgttttgaaacttaaaaaataactttcttatgagtaatagtaagataataatgatggacaaaggaattaatgtttactatacaaagcaaatattaaggactttctatgactagagcaaataatcattattcttacactgtttttgtaaatgaaaaacagccatttactataaacagtgtaagaatatttctctagtgtagtctaa

SEQ ID NO: 881896 - DNA, 620 bp, Homo sapiens
ttgaaaaccagcacaagacaaggatgctgtctctcaccactcctattcaacatagtattgtaagttctggccagggcaatcaggcaagagaaagaaatacagagtactcaaatgggaagagaggaagtcaaattatttttgtttgcagatgacatgatgctatatctagaaaactccataatctcagcccaaaagcttcttaagctgataagcaacttcagcaaagtctcaggatataaaatcaatatgcaataattactagcattcctatacaccaacaaccatcaagccaagagccaaatcatgaatgaactcccatttggaattgctacagaaagaataaagtgcctaggaatacagctaacggagaaatgaaggaccacttcaaggagaactacaaaccactgctcaaagaaatcagagaggacacaaacaaatggaaaaayatctcatgctcatggagaggaataattaatatgatgaaaatggccatactgcccaaagtaatttatagattcaatgacatacccattaaactactgttgacattcttcacagaattagaaaaaagctattttaaaattcatttgaaaacaaaaaaggacctacgaatagccaag

SEQ ID NO: 881897 - DNA, 633 bp, Homo sapiens
cttacgcacagagatagtgacttctctaaaagataataccgtttgtcgtaactttaaaaaaaaaaatttttttttgagatggagttttgctcttgtcacccaggctggattgcaatggcacgatctcggctcaccgcaacctccacctcctgggttcaagtgattctcctgcctcagcctcccaagtagctgagagtacaggcacccgccaccacacctggccaatttttstatttttagtagagacggggtttcaccatgttggccaggctagtctcgaactcctgactttatgtgatccgcctgcctgagcctcccaaaatgttgggattacaggcatgagccaccgtgcctggcgtgttgtaactaaaatttaaacctaggattgtttgactgaaaagtccatatactgtttaccgtatcatgtgtcctcaaaaatctaaaatagaaaaaaaaaaaaaaaacctgacaagcctaaatgcagagtgggaaaataagaatagtagaatagcagaagacacttcgaccaaaaaagaacatatattcttcagttttaaaaaccgacataagtctagcatatatttctagatttagaaatacaataatgaaaactcatactatgtctaaatttca

SEQ ID NO: 881898 - DNA, 631 bp, Homo sapiens
gtgtttctgaatgagataagcatttgaattggtggcctcagtaagtcatttccccttcccagtgtgggtgggcattgtcaagccatcgagggcctgaatagaacaaaaaggcagaagaaagaagaattcacccgcttttgcctcctgcttgcttgctaagctgggccattagtcttttcttgcccttggactggaattacaccaccagatttcctgggtctctagtttgcagacagcagattgtaggacttctcagcctccatagtcaagtaagccaattcctcataataagtctcttaatataaatatatctccttttttytggagaaccttcactaatacaaccctcaacatggaaaagagattcagatggcattgttgaaaaagaatgacagttgtccactgtatgctataaacaaatactttgaaaagtcaaaacacaatgcagagtaatgacagagtacacgtagagtacactcagaacaaacacatgttcatcttccatcgttgtctaatttgattaggtgtgctgtgcaattttatttttaggacttggacacaagcctattttatggctactcaaaatacatatcatcattttgaactagaatttcaaatatgatcttagatt

SEQ ID NO: 881899 - DNA, 666 bp, Homo sapiens
ctttgtttctccaagtttacttagtcagtaagcaaatatttattaatgtttatgaataggcacttgaattatagagataaagaaataggcagagatttgttaaggaaggaaatataataaactgatgaagattaaagtgaataaagatgatttccagaattactagggattgtattatgctgttgatatgattcagctttgtccccacccaaatctcatcttaaattgtagctcccataatccccatgtgttatgggagggacctattgagargtaattgaatcatggggcagttttcccgtgctattctagtgatagtaagttcttatgagatctgatgtttctataaggggcttctccctttgcttggctctcattattctctctcctgccaccatgtgaagaaggacatgtttgcttcccctcccaccatgattgtaagtttcctgaggcctccccagccatgcaaactttgagtcaattaaacctctttcgtttataaatgacccagtctcaggtatgcctttattagcagcatgagaacagactaatacaactgttataataataacacttaataactatcaaacagtttcagtgtaccaagtactattttttaatggtttaattcatttgtctctctaaaaaaacttaagagttttatta

SEQ ID NO: 881900 - DNA, 573 bp, Homo sapiens
gggtgaaatttttttctatttttggacataaagtgaaggagctttgctaatgtttgggtgtgaagtgtgaaaaaagggaagactcaagggtgatgccaggagttttgtcttaagtaaaaatgatggtttaataaactgggatagggaagtcttcaacttcagagcagattgaaggatgaggttggagattagtaaaagtttcagccatattagggttgtgatgcctcttaaatgaaggttcaagtggagatgtttaattagcagttgaatattgcagtctgtggttcarggtgagtggtctgagtgatagatgcaaatctgagggtcattagcatgtgaacaatatgcatataaccatgggatcagcactgaataaaactacttatcctgtgaggacagatagagaagaacactgaggtaatgaagttttttggatgtatgtgtaaattaaagtaataaacgtatatgtaaactaaagtaataaagtaagaacatttggcctgagaattatttgttcacaaattgtgggggaaaaattgcatagtaagataaaaagagactggaagaaagcca

SEQ ID NO: 881901 - DNA, 362 bp, Homo sapiens
tatgaaaaatggacagacatataagtggaaacaaatataaactctgtttatttttataaaggaagcagacaggaaccgaggtagtaactaatgggagtggtacatttgctgctacagagggcacagaaggcgtcttagaagagagacgttgcatttcaaatgaaatatgagaagaaatatagcyattaaaataacagagaaaaagtagttaagacaaacaaacaaaaaacaaagcaagaacaacaaaagaaaaagttcgaaggcaagaaatgttcaggttatagaaataaaagcaatttacctgcagtataattagagcagtacacagggaatcatgtgttgagaagttggatagggagaca

SEQ ID NO: 881902 - DNA, 519 bp, Homo sapiens
tctgagggctctgttctgtttcatttgtctatatgtctgttttggtagcagtaccatgctgttttggttactgtagccttatagtatagtttcaagtcaggtagcatgatgcctccagctttgttcttttggcttaggattgacttgrcaatgcgggctcttttttggttccatatgaactttaaagtagttttttccaattctgtgaagaaactcattggtagcttgatgcggactgcattgaatctgtaaattaccttgggcagtatggccatttttcaccatattgattcttcctacccatgagcatggaatgttcttccatttgtttgtatcctcttttatttcattgagcagtggtttgtagttctccttgaagaggtccttcacgtcccctgtaagttagattcctaggtattttattctctttgaagcaattgtgaatgggagttcactcatgatttggctctctgtttgtccgttattggtgtataagaatgcttgtgatttttgcacatt

SEQ ID NO: 881903 - DNA, 629 bp, Homo sapiens
cttcgtaaacaaatgagaaataagattcttttcagacaggcaaatgctaacggaatttattaccactagatctgccttacaagagatctctaaaggactgtaaaatatggaaaagaatgaccattaccagccaccacaacaaaacaaaaacaaacaaaaacacttaaatacatagaccattaacactataaagcaacaacaaatcaagtctttataaaacccagctaacaacataatgacagaatcaaatctgcatatataaatattaaccttgaatgtaaatgggctaaatgccccrattaaaagacacgggatgacaagttggattaaaaaaaaaagcaagacctaatggtatgctgtcttcaagagacccatctcagatgcaatgacattcatagtttcaaagttaagggatagagaaaaacctaccaaggaaaagaaaaaacagcagggtttttccccctaatttcaaacaaaatagaatttaaaccaacaatgataaaaaaagctaaagaaggacattacataatgataaagttttcaattcaacaagaagacctaattatcgtaaatatatatgcactcaacaagggagcactcaggttcataaaggaagttcttagagactg

SEQ ID NO: 881904 - DNA, 666 bp, Homo sapiens
taattgccaagtgcctgtggctcaaccataagcatcccaagcacatattaaaaagtctaccgataatatctcccacactaacaatgtattttaatgtcatttattaagaggttagtatttacatataaacttacatmcaagttctttcagtgttaagaaaatcagagtaggtaatttactaaatcttttgttctacttttatgttgtctaggtgagttcatgtgtctagggtagttatttgtgtgagtagccagctttgagtgaggagggaaggctgactagatatcagacattatataatatttggggttaacaaactctttgggaaattatttaaatccatttttattctgtaggtattagctacagtgaatgagtaatttttgttcatttgttctttatttttacttttctcttgttagaaaggggagttggacaaaatggaaattttggaatgaaggctgaatctgattatcttagacattggaaagtctttgaagataagaaagggaaagaattacactgttggttgggggtgtaaatttgttcaaccattatggaaaacagtatggcaattcctcaaagatgtaaaaaccattcgacccagcaatcccaatactgagtatatacccaaaggaatagaaatccttcatgcatcattctatc

SEQ ID NO: 881905 - DNA, 666 bp, Homo sapiens
taattgccaagtgcctgtggctcaaccataagcatcccaagcacatattaaaaagtctaccgataatatctcccacactaacaatgtattttaatgtcatttattaagaggttagtatttacatataaacttacatacaagttctttcagtgttaagaaaatcagagtaggtaatttactaaatcttttgttctacttttatgttgtctaggtgagttcatgtgtctagggtagttatttgtgtgmgtagccagctttgagtgaggagggaaggctgactagatatcagacattatataatatttggggttaacaaactctttgggaaattatttaaatccatttttattctgtaggtattagctacagtgaatgagtaatttttgttcatttgttctttatttttacttttctcttgttagaaaggggagttggacaaaatggaaattttggaatgaaggctgaatctgattatcttagacattggaaagtctttgaagataagaaagggaaagaattacactgttggttgggggtgtaaatttgttcaaccattatggaaaacagtatggcaattcctcaaagatgtaaaaaccattcgacccagcaatcccaatactgagtatatacccaaaggaatagaaatccttcatgcatcattctatc

SEQ ID NO: 881906 - DNA, 652 bp, Homo sapiens
ttctactaagacattgaaatataatcttaaaataaataataaacttggagcacttaaacatgtattttttaaaacatacaaaaaagctatctttattttcacaatgaagtgttagcgtaagtatagtcatgaatcaatggaacagaatagataatasagatggagacataaatatatatattttatatatacatatatatactttattgtcacttcatacatatataaatagatataatcactatatatagtgacacatatttatttaaaatgtttattaaggaaatattaaatatttttaaaataaagtgactatatatttaatatgactattaatatcacatttaacttaactatatattaaatatgtagttactttatatctttaatgttttaaaaaaaaatttcattgattacgaagaagaaaataaactctgctgccacaaatgactaggcagatggagcaccctcaacccttatattatgccagaaaaacgtccaaattgaacagagatgtccgtgagaaagtctaaagtattgatattctagaataaaacattagaagttgtccttattacttagtgtagaaaaattgttcttaaacagaacacaagttaatagcatatactatatatgtacattcataattcat

SEQ ID NO: 881907 - DNA, 638 bp, Homo sapiens
cacatatttatttaaaatgtttattaaggaaatattaaatatttttaaaataaagtgactatatatttaatatgactattaatatcacatttaacttaactatatattaaatatgtagttactttatatctttaatgttttaaaaaaaaatttcattgattacgaagaagaaaataaactctgctgccacaaatgactaggcagatggagcaccctcaacccttatattatgccagaaaaacgtccaaattgaacagagatgtccgtgagaaagtctaaagtattgatattctagaataaaacattagaagttgtccttattacttrgtgtagaaaaattgttcttaaacagaacacaagttaatagcatatactatatatgtacattcataattcatgagtgtctaaggtccctatatgtctctatatattgtattttatattatacttgtatataaatttaaaacttctacttatcatatgatatcattaagcaagtgaaagctataatcagaagaaaatatttttaataaatatatctgatgaaggactcgtatccttcatttatggatattttctatgagacagtaagaaaaagacaacatgataaaagaataaacaaaaaacttccgcaggta

SEQ ID NO: 881908 - DNA, 548 bp, Homo sapiens
aactcctggagcctagtaaagtggacggtgtgattggaagggagtaatgaacaaggcagagaataccaggaaatagacatggagaggtaggaaatcccattcatggagaatgcactgtacctgttgtagtacaggttttagaggctttattttcattattgtagaaaagcaaacactaaaatgactcaagtttctcttctatctaataattaccttcatctgagtttacttctaaaattgtgttatagtgttctgcacagaccttacatctttcataaaaattatctcaaaatggattataagtataaatgtaaaatgcagaactttaaaaattctgcaagaaaacatatgagaaaatatacatgaccttaaatttgttgatgagttttagatacartaccaaaaaccttattcatgaaagaaaaatcttgacaagttggacttcattgaaattaaaaatatctactctgcaaaataaagttaaataataaaaatattagccatggactgggataaaatattcataaaatacatacttgaaaagcact

SEQ ID NO: 881909 - DNA, 650 bp, Homo sapiens
tttaatggatgaggagttgccacttatggatgagtaaagaaacagttttgtgagatggaatctactcctggtaaagatgctgtgaacatggttgaaatgacaacaaaggatttagaatattacatcaattcagttgataaaacagaggcagggtttgagaggrctgactccaattttgaaagaagttttactgtgggtaaaatgctggcaaacagcattgcattctacggagaaatcttttgtgaaacggagaatcaattgatgtggcaaacttcattttcgtctttcttttagaaattgccagagccacccagccatcagcaaccaccaccctgatcagtcagcagccatgaacgctgaggcaagaccctctaccagcaaaaaccctccacctcagtggcaaaaaaaccttgcctctgaggcaagaccctccaccacttgccaaaagctcagatgattattaggatgtttacaaaataaagtattataagtcaaagtatgtacacttttttgtcatgacagcctactattacatacatcaattttgttagacataatgctattgtatacttaatagattaaagtatagggtaaacataacttttatatgcactaggaaatcaaaaattttgtgtgacttgctttatctc

SEQ ID NO: 881910 - DNA, 416 bp, Homo sapiens
agtttcctaaggccttcccagcaatgcagaactgtgagtcaattaaacctctttcctttataaatcacccagtctggggtattttttcatagcagtgtgagaacagactaatacagtaaatggtaccgaagtagtggggycactgctgtaaacatactcaaaaatgtggaagtgacttaagaactgggtaacaggcagaggtggaaccatttggaaagctcagaagacaggaagatgtggaaaagtttggaacttcctagagacttgaagaatggttcagaccaaaatgctgatagtgatggacaatgaagtccaggctgaggtggtttcagatggagataaggaacttcttggggcctggagcaaaggtgactcttgctatgctttagcaaagagattgacagcattttgcccct

SEQ ID NO: 881911 - DNA, 569 bp, Homo sapiens
agaccaaaatgctgatagtgatggacaatgaagtccaggctgaggtggtttcagatggagataaggaacttcttggggcctggagcaaaggtgactcttgctatgctttagcaaagagattgacagcattttgcccctgccctagagatctatggaactttgaacttgagagagatgatttagggtatctggtggaagaaatttctaagcagcaaagcatccaagaggaagcagagtacaaaagtttgaaaaacttgtagccttatgatgcaatagaaaagaaaaacccattttctttagagaaattcaagtcagytgtagaaatttacttaagtaaagaggagctgaatgttaatcactgagacaatggggaaaacgtctccagggcatatcacagaccttcacagtagcctctctcatcacaggcccagaggcctggcagggaaaaatgggctgggccctgctgtatgcagcctcaggacatgatgccctgcattccagctgcttcagctccagcagtggctaaaaggggccaaggtatagctcaagccattgttttagagggtgca

SEQ ID NO: 881912 - DNA, 718 bp, Homo sapiens
caaagaaaacaaggacttgcctttgtctccgattgtgcatccatccaatctccattgctttttcttgaaaagttggttcacagaagcttcatgtatccccaggatcctagtagaactgttttgcagtccagaatgtcagaaccaagcagcccaacggtgtcttaaagaggtttcacactcacgttcgctctggctcagctattcttytgcttccaggctttgggaaacggtttgctggatcctggagctgcgtaggcagttgtattttccgtcatcttaacctgcagcgccaccacgcgttctcactgagtcttttactgtggttgaatattggaggcaaaatacttctaaatgtactgaatagactatgtaatacaaaacactgagttctattttcatgtgactttcgtgtatacagatggagctctgtgatgttgtacagggaggagtacaaagagaagactgtcatttatgttattgactgtttaatgctgttgagattaatgattaaataaaattcaatgaacatttaaccagacatagaatacacacttagaagcaaaatttttctgaagtaacatgagaacagtttcacaagtacatctttttcatggtacctatatagacactatgagtagacactgcaaaattgcaatcagtggtagttctaaagagtatttaacaattgctttattaaagaataaattacttccttttc

SEQ ID NO: 881913 - DNA, 698 bp, Homo sapiens
gataagaacatgggtatatttgtgcagagtagtataaacaaactataaactaaaacttatattttcacatgagagtttagttcatggagtaggagtaggaataacataaatttcacttccttagttagaaaaacaatgctatcagttaatgcctgaccatatagcatattggctagacttagattatattttaaatttttacctttattatttcagaattataagaaagttaatcgttttttgtgggggggaatgaggtctcactctgtcacccagcctggagtgcaatggcacaatcttggctcactgtagtctctgtctcctgggctcaggggatcctcttacctcagcctcctgagtagctgggactacaggttcgcaatcacacctggctaatttttgtatttttgttagtgtcagtgttttgccccattgcccaggctggtctygaactactgagctcaaagggttcagcttgcctcagcctctcaaagtgttatgattacaggtgtgagccacagctcacagccaagttacctttctaagcctcagttttctcatatttaaaaaaggggataatatgtcaactcccttaggacttggggaaacatttaaaaggcaataaatgtaaaacattctctacaccacttttaactaaattttacctagattagaaatcaaaaaataaaggcttaaaa

SEQ ID NO: 881914 - DNA, 632 bp, Homo sapiens
caactatcagaactctaccctcttccctccctccttgtctctagactcacctatagttacaaatcactattcagtcttccaattccctaaatttcaaccttttataatgaagagggcatcagttaggactgattgctaaaaattcaaataacacttttgctggagtcattttctcaaaagttacctttcatgtatttacgtaataatgttcttgatgtcccaccgtttaagtttaagtggatatgaattcagactactgtargtctacaatactgatagtttatgtatcacaactgctccagattaactcactgctctggcattgtatcttatgtatattttgacttacacgttgctgaaatttaagacggaatgttaatggatctgggcatcaaatgagatccttcccaactctgtcagtaaaataaaccaggagatggagaagatgtgaacagtacaaatggaaattgaaaggaactctcaaactcaaaacataccttttgaagctatcagtaagtgattattcaagtggatgtatatatacttgttttaataatgtcacctttcacctgtcatttggagaagtacaaattcaaatagttttaactttagaagaaatgatggacagtgag

SEQ ID NO: 881915 - DNA, 636 bp, Homo sapiens
tcaatgccagcctatgaaagcagccaggagtggggctataacctgcaaagccacaggggcagagcttcccaaggccatggaaggctacctcttgcatcagggtgacctggatgtgagacctagagtcaaaggagatcattttggagctttaagatttgactgcccctctggatttcagacttgcttggggcctgtagcccctttgtttaggccaattttttccattcgaaatggctgtatttacccaatgcatgtacccccatggtatctaggaagtaactaacttgcttttgattttacagactcatagaaaaagggacttgccttgtctggaatgaaactttggactatggacttttgagttaatgctgaaatgagttaagactttggagaactgttgggaaggcatgattggttttgaaaggtgaagacatgagatttcagaggggtcagcggtgaaatgatgtggtttgcctctgtgtccccacccaartctcatcttgaattcccatgtgctgtgggagggacccagtgggaggtaactgaatcatgggggcaggtcttttctgtgctgttcacatgatagtgaataagtgtcacaagatctgatgatttttaaaagtggagtttcactgc

SEQ ID NO: 881916 - DNA, 568 bp, Homo sapiens
tttttcctgtatttatttttgctaaatcttggctaaccttcagctagtgagacaggtgcaaaacagagagaagaaagcaggaattcagaagcaagaatttggatttaagagaagagtagataagacataagaatccttcaagatattgagggttatgctagctttctcatcaatgagggaatgaagaattcaaccaattgtagttmaatctcaaaggaaaaatgaccatcagctcatagctgtttctccaaagatgaattaaactttgtccaagttcaaaagtgagccacagcttccaggaacaggcagtccagtggggaaggcatccaacaatgacagtgcagataacatgagagtcatctaggttctctgggggaaacaaagggggctatgggagcccatggggatcccaaatcagcctggggcaccttcagactgactcctgtaggatgaggaggagatgagttgggcgtgtgagttcttccagtcagcaaaggagacttctcattcccatgtcacagaacaaactgaggcccagacaaattacgggatcagcccaaggtctcac

SEQ ID NO: 881917 - DNA, 703 bp, Homo sapiens
ggagaaagtactagatggttttagtgattttgccatggtcttaggcaaatgagtttgcttcctttctagattttttttttcttttcttttctttcttttttttttttttttttttttttgagacagagtctcactctgttgcccaggctggagtgcagtggcaagatctcagctcactgcaacctctgcctcccgggttcaagcgattctcctgcctcagcctcccgagtaactgggattacaggtgtgtgccaccacacccggctaatttttgtgtttttagtagagatggrggtttcaccatgttggtcaggctggtctcgaactcatgacctcaggtgatctgcccacctccgcctcccaaagtgctgggattacaggtatgagccacctcacctggcctctttcttcttttatgaggatattaatcctatcataagtttctcaccctcaagatcaaatctaaccttatttatctcccaaaggaaatctcctttgggagataaataaggttggaaaactatggctaggagatcaactgtgaccagctgcctgttcttgcaaataaagttttattgaaacacagccatgtttattaattacatatggcatatcactgttttcatgctacaaagggagagttgaagagttgcaacagagattgtatagcctgcaatgtagaaaatattttctacctggctct

SEQ ID NO: 881918 - DNA, 599 bp, Homo sapiens
gctatttgaccaggatgcgtttctcaggaagcgcctgtcacaagctatcgatggtcttttaatcccgagttacttagcactgggcttactttctccctgagatgaccagtctccagtgattcctcagcttacacggcaaaaaacaagatgccaaatggctcttcttgataytggatgactgggtttaattcctgggatatggatttgccaacagatgcagcttcttgcacatataattccatgacttccaactttacctttgaaatttctaggaaggtgtctgctaatctgaagggatgctatgagattcttagacaaaaaaaattctctaaatttgtcactatttgcaatgctattatgtatgtcatgataatatcagctagtatttttgaagtctttgttttacatgttttatttgattttatagtcaaagaaaggcaaaaaggttgatatttttattatctctatttggagatgaggatactgaggtaaagaggtcaagaaacattcctgagatcacagagctagctcatggtggaactagaatagctaccatgctaaacagctgcacatactgagggattcaccactgcacaaag

SEQ ID NO: 881919 - DNA, 584 bp, Homo sapiens
ggttgctcatattcacacaccctagagtagaggaagcagtaggaacccggacctcctcaccagagggctggggagggaagctgcagtctctggttgggaggagacgagcagctggccaaaggcccctttgtagaaactggccatgctcttcctctgggcgggaggytccagcctggagctccgggcctgcccctggctttcttctggccattgtgagcgtgtattgatcaggccgggaagcaataggcctgcagcagctgaagctctagggtgggccgcattgatcggacccccgccccaggatatttataggatgggctgggctagcaaataatcggggagagcttgtttaacgagggttcagggtgctcttcgctagctggttaactttaagtattggaaatggaattgatgcgcacataataatattatgattcatacaaaccacttctcaggcaactcaatatatttcattacctcctttctagcaaatgtattgatttctgttttgcggttttataacacaatttcaaggctgttgtgggtttaatgagccgtgttcttatgatgtttaaaaagatttg

SEQ ID NO: 881920 - DNA, 565 bp, Homo sapiens
ctgcttccccccttagtaatcttaaccttacacatagattaaatactcacgagcaccactgttacaagtttagcatggcagggctggaggcctcagaagttatccaaacagtggaggacatccctaaacctctgtgctgctaggatctcaagcttccacaggccgtttactgacttgctgccacccatgagttaccactgttctctggccctcctctccagtcaggcatcaggaccacccactagaaccattatttttcttytctgcctcagccttttctattccaggcaaaacggttcttaatctctcctggcagattttatttttcagcttaagcatctttacgggtggtgtggaaattaatttcccagcgctaagctgtatttgtgcaggcctcctggttaggaaactggtttaaatactcactgtttcttccattaaccaaatatttgagggagagcaagtcaattaattttttggagactctcagttttatcaactgtaataatgttagattagatgatgtttgaatctctaaagataatctgaatcacagaggggaaac

SEQ ID NO: 881921 - DNA, 589 bp, Homo sapiens
acttaaagtgccaaaatatcagatataaaaataccttcaggaagcataattgtagtgaaaatttcaaatcttatttctttctttttttttttttttttgagacggagtctcactctgtcacgcaggctcacgtgcagtggcgccatctctgctcactgcaagctccgcctcccagctcactgcaagctccgcctcccaggttcacgccattctcctgsctcagcctacagagtagctgggactccaggcgcccgccaccacgcccggctaatttttttgtatttttagtagagacggggtttcaccatgttagccaggataggatggtctcgatctcctgacctcgtgatctgcccgcctcagcttcccaaagtgctggggctacaggcttgagccaccgcgcccggcctcaaatcttcttgtatgaaacacttatctgagtatctgacatgtagagtcagtccttccgtgagcttttcagtctgcctagacattggctatctttttttccaaattagaaaacaaaaacaaaaacaaaaaaactgtttcatttaaaaaagaaggaaaagaaaaaaaacaattctctatc

SEQ ID NO: 881922 - DNA, 589 bp, Homo sapiens
acttaaagtgccaaaatatcagatataaaaataccttcaggaagcataattgtagtgaaaatttcaaatcttatttctttctttttttttttttttttgagacggagtctcactctgtcacgcaggctcacgtgcagtggcgccatctctgctcactgcaagctccgcctcccagctcactgcaagctccgcctcccaggttcacgccattctcctgcctcagcctacagagtagctgggactccaggcgcccgccaccacgcccggctaatttttttgtatttttagtagagacggggtttcaccatgttagccaggataggatggtctcgatctcctgacctcgtgatctgcccgcctcagcttcccaaagtgctgggrctacaggcttgagccaccgcgcccggcctcaaatcttcttgtatgaaacacttatctgagtatctgacatgtagagtcagtccttccgtgagcttttcagtctgcctagacattggctatctttttttccaaattagaaaacaaaaacaaaaacaaaaaaactgtttcatttaaaaaagaaggaaaagaaaaaaaacaattctctatc

SEQ ID NO: 881923 - DNA, 627 bp, Homo sapiens
ctgtacaaaaaccccacggccactgggagtagggtcaaagaaatgtgggtattcagtaagaggatagccctgggacaacccaatttttctcatttattttactaaaggttttagggggaccaaaagtgtccattatctgaaatgttgtgctcacaaaataatagtacctattataaatccaaatggtgaaagatctcagtctgtgagccagccttataacatgcttagatgaatgacataatgagaytgccattgtagggaaagaaaaatggctttacaaccagagctgctctgctccagtccatccacctcctcattctaacactgccaacttacaccagctttcctagactcattattaattgaaaacccttttatccccagaagttctcagtttggacaattatatggccatcctaactatgattaccagaaaaatgtgtgagtagttgcattagttagatcgaaggctatgctactgtcatcaagaaaactacactggttagaaaacataggaattcatttttctttttcccataatagttcagggcagatagttggtcccagttcaaaaaaagtcatcccagaacccagactaaccagatagttaggatagttctattctta

SEQ ID NO: 881924 - DNA, 570 bp, Homo sapiens
taaataaatcaaatttctctaaaatatcagccttattgaaaagtctataaacatttaaaatagtacatgtaattaagtcaaacattagtacataacagtggatctcaacctccagtaattttgtttccagagtgccaatattgggcgatgtctggagacatttttgaacatcacagctgggtgggtgggtggccaagtgggtgcccctggtgtgtactgggtagaggtcagagatgattctaaaaatcctacaatgcacagtccctcmcagtaaaagaaaaatctcactccaaacgtgaatgctgctgagaggttaagaaaccttcaagtaaaaaaatcaaattttatcataagaaattaatttaaagatatagctctactgttacatgaagaatttaatataattctcttcatctgacagctacaagaataactttttctaaatgttaactctttacatacttaatacaaaaataaaggaataatttcatgctttgttaagtcaaatttcgccaataaaactagattcgtcatcattcctgacttctataagtcctaagattatggcag

SEQ ID NO: 881925 - DNA, 474 bp, Homo sapiens
ttttgaggctatgtatgactctacacgtgagatgggtctcctgaataaagcacagtaatgggttttgactctttacccaatttgccagtctgtgtcttttaattggggtatttagcccatttatatttaggttaatattgttaatgtgtgaatttgatcctgtctttatgatgttagctggttattttgcccattaattgatggagtttcttcctagcattgatggtctttacaatttggcatgtttttacmgtggctgataccagttgttcctttccatgtttagtgcgcccttcaggagctcttgtaaggcaggcctggtagtgacaaaatctcagcatttgcttgtctgtaaaggattttatttctccttcccttatgaagcttggtttgtctggatatgaaattctgggttgaaaattcttttctttgagaatgttgaatattggcccccactctcttctggtttgtagg

SEQ ID NO: 881926 - DNA, 524 bp, Homo sapiens
agtggaaagactgaggtttcctgaagaggaaggaattctgccctaagaccgcaacatagaaatcctgcttggaaattcaaggaattgggactaaagactgcaagatcaactcttagcagaacttccaggctgactgcttgctttatggattttggacttgccagccccacaattatgtaagccaaattaaaatctctctcttcctgtctctctgtttgcctccaacatatccatcggttctgtttctctctctctcgctttgcctccaacatatccatcagttgtgcttytctctctctctctctctctctctctctgcgtccaacatatccatttgttttgtttctctggagaatcctaatacaacatacatcaatgacaagacgaattagctgcagttgtttgacttcagactgtcttttgtgtgacttggtgaaccaaacagtaatttctgactgcttgagagtaatttaattttcccgttaacgttaatcatctccaccctttacttattgaaaagcaga

SEQ ID NO: 881927 - DNA, 343 bp, Homo sapiens
ttttgcttcaggtctattttgcataaaccatacctgatatatgaggatatagggtttttttttcaatgatctatttaatatttaacacttgttaactttgggcataccatatgaccactctggcctcaggattctcatgtgttagatagtgttgatggcagkaccctgcccaactacaagagtactaatggcaattcatattttattttgatattttctgatgacttatacatctgtcatctaatttttgctctaattctgtgtgataggtataaatatcctagttcaaagtaagaaaaccatgactctgagagaaacttacacaagggcaatcagttattca

SEQ ID NO: 881928 - DNA, 631 bp, Homo sapiens
ccattcagtaacccataagggctattcactattttctatcagtaaaggtaaggtcctcaagatattttatatattttataagtaattcagatataatggaacaagctgaccctagaaagatagatgatttgaggacatctttgttattgccatatgtggtacaatatatttaactttatgtatatgaagtatttactcttgggtcatcattttctcaagccctttagctgacaagagatagataggcaagtagatagatagatagatagctagatagatagatagatagatagatgaatagatggagttatagttcagcaaactgaggcacatatatactatatgagaggtccaacattacttgattgtaaatgatgaggccaggattcaaatacagacaatctgatttgagcaaaagarcttaaccaatactgtctcccataaattttctggtccaattcttagagttttcagattttaattacaggcagcatggtctgctaagactattgaactagtcttagtagtagtctacagagcaggatttagccttgcgcctgatattcactgagcagcaccccagaccagtgataagctttacatatatatcttttgctagagaagtcaggat

SEQ ID NO: 881929 - DNA, 631 bp, Homo sapiens
ccattcagtaacccataagggctattcactattttctatcagtaaaggtaaggtcctcaagatattttatatattttataagtaattcagatataatggaacaagctgaccctagaaagatagatgatttgaggacatctttgttattgccatatgtggtacaatatatttaactttatgtatatgaagtatttactcttgggtcatcattttctcaagccctttagctgacaagagatagataggcaagtagatagatagatagatagctagatagatagatagatagatagatgaatagatggagttatagttcagcaaactgaggcacatatatactatatgagaggtccaacattacttgattgtaaatgatgaggccaggattcaaatacagacaatctgatttgagcaaaagaacttaaccaatactgtctcccataaattttctggtccaattcttagarttttcagattttaattacaggcagcatggtctgctaagactattgaactagtcttagtagtagtctacagagcaggatttagccttgcgcctgatattcactgagcagcaccccagaccagtgataagctttacatatatatcttttgctagagaagtcaggat

SEQ ID NO: 881930 - DNA, 432 bp, Homo sapiens
ttttttctaggccactgaaacagtctctgaattattttctccacatcaattcttgtcttcctttaattcatttcctacactaaagtccaagtgacatttttaaaacacaaaaattgaccatgttactcttctcatttaaagacttcaaagataggtattcattgcacttaagacaaagaacaaattctttaaactactcataatcccatcagatctagtccctgcctacttcagctgttaattatacaccattctctctatctmcattttaggactctgtccatactggccatgtggcttttccagcttttcatgccatttgttctatctggagagcttcctgacacattactcagcctttaattaattgctactcaacttttatgtagaactcaactcaaattcacttccaaagggtaatattttttcatg

SEQ ID NO: 881931 - DNA, 615 bp, Homo sapiens
gctgaagttgcttatcagcttgagattttaagctgagatgatggggttttctaaatatacaatcatgtcatctgcaaacagagacaatttgacctcctttcttcctatttgagtatgctttatttctttctcttgcctgattgccctggtcagaacttccaatagtatgttaaatgggagtggtgagagggggcatccttgtcttgtgctggttttcaagggaaatgcttccagcttttgcccattcaatatgatattggttatgggtctgtcataaatagctcttattattttgagatatgttctatcaatacataatttactgagagtttttagcatgaagcrgtgttgaattttactgaaggctttttctgcatctattgagataatcatgtggtttttgtcattggttctgtttatgggatggattacatttattgatttgcatatgttgaaccagccttgcatcccaggtatgaagccgacttgatcatggtggataagctttttgatgtgctgctggatttggtttgccggtattttattgaggattttcacatcaatgttcatcagggatattgacctaaaattttctttttttgttgtgtctctgtc

SEQ ID NO: 881932 - DNA, 637 bp, Homo sapiens
ggtagatccctactcagcacaaggaggcctgcctgcctctgtagactccacctctcaggacacagcatagcagaacaaaaggcagcagaaacctctgcagactaaaatgtccctgtctgacagctttgaagagagcagtggttctcccaacatggagtttgagatctgagaatggacagacttcctcaagtgggtccctgacccccgagtagcctaactgggaggcaccccctagtagggacagactgacactgcacacggctgggtacccctctragataaagcttccagaggaatgatcaggaagcaacatttgctgttcagcaatattcgctgttctgcaacctctgctgctgataccaggcaaacagggtcgcagtggacctccagcaaactccaacagacctgtagctgagggtcctgactgttagaaggaaaagtaacaaacagaaaggacatccacaccaaaactccatctgtacatcaccattatcgaagaccaaaggtagataaaaccacacagatggggaaaaaacagggcagaaaagctgaaaattctaaaaatcagagcacctatccccctccaaaggaacacagctccacgccagcaacggaacaaagctagatggagaaagac

SEQ ID NO: 881933 - DNA, 637 bp, Homo sapiens
ggtagatccctactcagcacaaggaggcctgcctgcctctgtagactccacctctcaggacacagcatagcagaacaaaaggcagcagaaacctctgcagactaaaatgtccctgtctgacagctttgaagagagcagtggttctcccaacatggagtttgagatctgagaatggacagacttcctcaagtgggtccctgacccccgagtagcctaactgggaggcaccccctagtagggacagactgacactgcacacggctgggtacccctctgagataaagcttccagaggaatgatcaggaagcaacatttgctgttcagcaatattcgctgttctgcaacctctgctgctgataccaggcaaacagggtcrcagtggacctccagcaaactccaacagacctgtagctgagggtcctgactgttagaaggaaaagtaacaaacagaaaggacatccacaccaaaactccatctgtacatcaccattatcgaagaccaaaggtagataaaaccacacagatggggaaaaaacagggcagaaaagctgaaaattctaaaaatcagagcacctatccccctccaaaggaacacagctccacgccagcaacggaacaaagctagatggagaaagac

SEQ ID NO: 881934 - DNA, 533 bp, Homo sapiens
tttgagttatataggaggaataagtttaagggatctattgcatatcatagtgactacagttaaaaatagactatatattggaaaattgctgatagtagatattaagtattctcaccacacaaaaatgctaagtatgtgaggaatggatatgttaattagcttgatttagccattccacaatataaacatatatcaaaatattatgttgtattccataaatatatacatttcttctctgtcaatttaagtaaatgaataaatattttaaaattaaaatattttttaaaattttrtctcctaaaaataatcaaattcaaatctctctatcataagtcagcaacctttttcacagctccctttgccttgtcattagtgaccaattctttcatagagctcatgtataagagagaggggatagggcattagtttaaaaaaaaaaaaaaaagattgggctggggggattgatctgttcattcctcatttaaataagcagccactccaaggctgcaggaatatttcaaggctgaaggaac

SEQ ID NO: 881935 - DNA, 589 bp, Homo sapiens
ttggtttaaagtctgtgttatcagagactaggattgcaacccctgcctttttttgttttccatttgcttggtagatcttcctccatttctttattttgagcctatgtgtgtctctgcctgtgagatgggtttcctgaatacagcaccctgatgggtcttgactctttatccagtttgccagtctgtgtcttttaattggagcatttagcccatttacatttaaggttaatattgttatgtgtgaatttgatcctgtcattgtgattttagctggttattttgctyattagttgatgcagtttcttcctagccttgatggtctttacaatttcgcatgtttttgcagtggctggtaatggttgttcctttccatgtttagtgcttccttcaggagctcttttagggcaagcctggtggtgacaaaatctctcagcatttgcttgtctgtaaaggattttatttctccttcacttatgaagcttgttttggctggatatgaaattctgggttgaaatttcatttctttaagaatgttgaatattggcccccaccctcttctggcttgcagagtttctgccgagagatctgc

SEQ ID NO: 881936 - DNA, 589 bp, Homo sapiens
ttggtttaaagtctgtgttatcagagactaggattgcaacccctgcctttttttgttttccatttgcttggtagatcttcctccatttctttattttgagcctatgtgtgtctctgcctgtgagatgggtttcctgaatacagcaccctgatgggtcttgactctttatccagtttgccagtctgtgtcttttaattggagcatttagcccatttacatttaaggttaatattgttatgtgtgaatttgatcctgtcattgtgattttagctggttattttgcttattagttgatgcagtttcttcctagccttgatggtctttacaatttcgcatgtttttgcagtggctggtaatggttgttcctttccatgtttagtgcttccttcaggwgctcttttagggcaagcctggtggtgacaaaatctctcagcatttgcttgtctgtaaaggattttatttctccttcacttatgaagcttgttttggctggatatgaaattctgggttgaaatttcatttctttaagaatgttgaatattggcccccaccctcttctggcttgcagagtttctgccgagagatctgc

SEQ ID NO: 881937 - DNA, 585 bp, Homo sapiens
ctttctcttgcctgattgtcctggccagaacttccaacactatgttgaataggagtggtgagagagggcatccctgtcttatggcagttttcgaagggaatgctcccagtttttgcccattcagtatgaaattggctgtgggtttgtcataaatagctcttattattttgagatacatcccatgaatacctagtttattgagtgtttttagcatgaagggctgttgaattttgtcaaaggccttttctgcatctcttgagataatcatgtggtttttgtctttggttttgtttacatgatggattatgtttattgatttgtgtatgttgaaccagccttgcatcccagggatgaagcccacttgatcatggtggataagctttttsatgagctgctggattcagttttccagtattttattgaggatttttgcatcgatgttcatcagggatattggtctaaaattctcttttttgtgtgtgtgtctctgcctggctttggtatcaggatgatgctggcctcataaaatgagttagggagcattcttactttttctattgattggaatagtttcagaaggaatgg

SEQ ID NO: 881938 - DNA, 585 bp, Homo sapiens
ctttctcttgcctgattgtcctggccagaacttccaacactatgttgaataggagtggtgagagagggcatccctgtcttatggcagttttcgaagggaatgctcccagtttttgcccattcagtatgaaattggctgtgggtttgtcataaatagctcttattattttgagatacatcccatgaatacctagtttattgagtgtttttagcatgaagggctgttgaattttgtcaaaggccttttctgcatctcttgagataatcatgtggtttttgtctttggttttgtttacatgatggattatgtttattgatttgtgtatgttgaaccagccttgcatcccagggatgaagcccacttgatcatggtggataagctttttcatgrgctgctggattcagttttccagtattttattgaggatttttgcatcgatgttcatcagggatattggtctaaaattctcttttttgtgtgtgtgtctctgcctggctttggtatcaggatgatgctggcctcataaaatgagttagggagcattcttactttttctattgattggaatagtttcagaaggaatgg

SEQ ID NO: 881939 - DNA, 585 bp, Homo sapiens
ctttctcttgcctgattgtcctggccagaacttccaacactatgttgaataggagtggtgagagagggcatccctgtcttatggcagttttcgaagggaatgctcccagtttttgcccattcagtatgaaattggctgtgggtttgtcataaatagctcttattattttgagatacatcccatgaatacctagtttattgagtgtttttagcatgaagggctgttgaattttgtcaaaggccttttctgcatctcttgagataatcatgtggtttttgtctttggttttgtttacatgatggattatgtttattgatttgtgtatgttgaaccagccttgcatcccagggatgaagcccacttgatcatggtggataagctttttcatgagctgctggattcagtttkccagtattttattgaggatttttgcatcgatgttcatcagggatattggtctaaaattctcttttttgtgtgtgtgtctctgcctggctttggtatcaggatgatgctggcctcataaaatgagttagggagcattcttactttttctattgattggaatagtttcagaaggaatgg

SEQ ID NO: 881940 - DNA, 663 bp, Homo sapiens
ccaaagaattatctattcttctcaacacaggaggtagctgtaaatataaggccagataatttgcttctatcctttctagggttttgtcaatcatcaaggacacctgctgaatcacatccactcctgcacctgacaaaaccagagacactgcctttcgctttttagtgtaaggtgcagatgaaacacagtgagaaggcaatttgactgaggctactacaggagttccccagcccaccattcccattctagaccacacctgttccattcctcatccatcctgcaccctgttaggccacaggacctttacaattcaggtgtataacagaaatgctcaaaattttcatctctctttagagcttccactggcmaatatagtaaaatgagttctaaaactaatggattgatggtgtaggcaccatgtctgtgtggccacatggcttccaaaagggaagagaaacagattccaagccaagatcaggcaggtgcagccaaaagtatgaatgctggatgattcacacctctggcaggagacatcaaatgtagcaaacccacagggtagggcagggtctcaaatatggggcaaactgaagggggtgagcctcttgacatcaacctaggcttgcagtcttgcaaaaatgcttgaagcaccctttgtgtcctgat

SEQ ID NO: 881941 - DNA, 641 bp, Homo sapiens
agcaagcactgtgagagttagagtccagtcatcagccagcataacactagtagggtgcctgctggcagaccagtgccccagagagccagactctatcatttctgtgctatttaggcaccgaatggggaaacagaatctgtgcccaaggacagttacacagtaggaaaaactgtgatctataaacaggtaatataagagatagccaggctgggcgcgttggctgacgcctgtaatctcaacactttgggaggccgaggcaggtggatcacgaggtcaggagatcgtgatcacctgaccaacatggtgaaaccccgtctctactacaaataaaaaaattagctgggcgtggtggtgcgtgcctgtaatcccagctactcaggaggctaaggcaagacaattgcttgaaccagggaatcrgaggttgcagtgagccgagacgttgccgcagtactccagcttggcaacagagtgagactcagtcaaaaaaaaacaaaaaacaaaaaaaaaaaaaaaacaaaaaaagagcaggagagccaaaaacaaaaccaaaaagatggatttcagtatgtatttgctcagggaactccctaccgtatctagtggctaaggagaagctgggaatagctactttggaaaacaaa

SEQ ID NO: 881942 - DNA, 576 bp, Homo sapiens
ttaattaagctgagcacttttaaagaaaatccttttaaattccttgttacttgagattgctgcaaatgagaggtgcatggttccagcagagtctatgaaggggagtattgaacaagtcatcggggtcaggcaacgatgtccatggatggaaagaataaactaaaatcttgagtcaattgtgtaaaaaggagggagccataaaaagcatcaatgatgaaaacaaaaaaaccctgcataggtgttaatcgtggtaggactaataaaagtatacgcaaacaatcctctgtcagagatacacatgctccccaatggactgtacagatgacaaggtgaatgtcaagcctgagtgaggataaactctcatccacaaaaagggtggatgcttcacagacctgtctactgcaaaagaggcctcagtcytgaagcccatattcatgggtttgcagcctccaagaccatgagctgggtttccttttccatttatgtcaaagagaaatggtgtatctaggtgtccgtgtagttctgcaagtaggtgatttagtggattttggctgtgctctaaactaggaactactg

SEQ ID NO: 881943 - DNA, 682 bp, Homo sapiens
gacccggtctgatgtacaaatttatcaagagaatggccttaattagtttaaggtaaaatctatgagaaattgagaaggcctagaataagaaccccccccccaccccgcccaatcttcttaaaataaaataaaaagagacgtattttccatctcttttatggattttcctttttgcttaagtgatgaggtgatgctgacattaacaagaggcagtcacagcagtgtgtctcacatgggctccttggtgacagcggagctccctgtccaaacggctgaggaacggagcacagggtgtgagaggatggaggaggggccaagggagmtactcagttgtctatgatgcagaggtgtgaaaaaatctgggtctgggggaaactgtaaagtaggaaagaaatagccatggaatatgaaggaaaaggacgaggaaacagaagtattgaaagaagaaagtgaaacaaagctagaagtcaaaatgacttttgaacaggcatggagtaaacagggtctatggtcaagcagccccatggatctgaaattgttggagctgttaaaccaagcacagaccagtttcactggggtacctgctttcccagtacattggcactgatcaatacaagatcaagggcactcacatttgcctaatacagatgccttgaatttccacggaaaagctgtccacgat

SEQ ID NO: 881944 - DNA, 674 bp, Homo sapiens
  misc_feature 633: n = A,T,C or G
ggttgccactgctgcttgggcagcctgcttttattcctttatctggctccacccacatcctgctgattggtgcattttacagagagctgattggtctgttttacagagagctgattggtctgttttgatgggtgctgactggtgcatttacaatctgagctagacacaaaarttctccaagtccccactagattagctagacacagagcactgattggtgcatttacaaaccttgagctagacacagggtgttgattggtgtgtttacaaaccttgagctagatacagagtgctgattggtgtatttacaatcctttagctagacataaaggttctctgagtccccactagattagctagacacagagcactgattggtgcatttacaaacgtttagctagacacagagtgctgattggtgcatttataatcctctagctagacataaaagttctccaagtccccacaagattagctacatacagagtgctgattggtgcatttacaaaccttgagctagacacagggttctgatgggtgcatatacaatcctccagctagacataaaagttctccaagtccccacttgactcagaagcccagcttgcttcgcatgagtggataccacaccanggtccatgggcggctagcccgccagctcccgcactgcgttc

SEQ ID NO: 881945 - DNA, 674 bp, Homo sapiens
  misc_feature 633: n = A,T,C or G
ggttgccactgctgcttgggcagcctgcttttattcctttatctggctccacccacatcctgctgattggtgcattttacagagagctgattggtctgttttacagagagctgattggtctgttttgatgggtgctgactggtgcatttacaatctgagctagacacaaaaattctccaagtccccactagattagctagacacagagcactgattggtgcatttacaaaccttgagctagacacagggtgttgattggtgtgtttacaaaccttgagctagatacagagtgctgattggtgtatttacaatcctttagctagacataaaggttctctgagtccccactagattagctagacacagagcactgattggtgcatttacaaacgtttagctagacacagagtgctgattggtgcatttataatcctctagctagacataaaagttctccaagtccccacaagattagctasatacagagtgctgattggtgcatttacaaaccttgagctagacacagggttctgatgggtgcatatacaatcctccagctagacataaaagttctccaagtccccacttgactcagaagcccagcttgcttcgcatgagtggataccacaccanggtccatgggcggctagcccgccagctcccgcactgcgttc

SEQ ID NO: 881946 - DNA, 584 bp, Homo sapiens
tatgtgccacattttttttaatccagtctatcactgatggacatatgggttggttccaagtccttgctattgtgaatagtgccgcaataaacatacatgtgcatgtgtctatagcagcatggtttataatcctttgggtatacacccagtaatgggatggctgggtcaaatggtatttctagttctagatccttgaggaattgccacactgtcttccacaatggttgaactagtttacagtcccaccaacaatgtaaaagtgttcccaattctccacatcctctccagcacctgttgtttcctgacttgttaatgaatgccattcttrctggtgtgagacggtatctcattgtggttttgattttcatttctctgatggccagtgattatgagcattttttcatgtgtctgttggctgcataaatgtcttcttttgagaagtgtctgttcatatcctttgcccacttgttgatgaggttgtttgcttttttcttgtaaatttgtttgagttcattgtagattctggatattagccctttgtcagatgggtagattgtaaaaatgttctcccattctgtaggttg

SEQ ID NO: 881947 - DNA, 596 bp, Homo sapiens
ggagtgttagttcaagccaaagaaagctactttggtcgctccgtggcgtgtgctgggacatgaacccctgattgttagcttttgtgatcactgctttcaaatgctgacttagtgtcagaacactgatgaactgttgagcaatataaacgtgagatcatacctaggtttccataattgtctttgatggaacatttaaacaataaaatcaaaaggcaaatcgattaacacaaaaactttttgttcaagagtacgactgagagaaagaagaggagagtggttcctgtaattatgtcaaattcagcttgagtttaataatgaagaaccaacytaaacaatttcctaagaagtttgttcagctcaccagttatctgcacaagtagctcctgggcaagtgttgcctaatttcactaatataaggataaattattttcccattaacttggaacaatagtgaagcactggtttatttttatttttgattattttttacataagtatgtttttcttccttccaaaagaaaccaccagggaagcctcattttcgttacattaatatggtgtgccattcttggcggggaactgtaggtgttgctgaa

SEQ ID NO: 881948 - DNA, 687 bp, Homo sapiens
gccttcccaacagtcccccaaagtcttaattcatttcaacattaacccaaatgtccacagtccaaagtcttatctgagacaaggcaagtcccttctacctacgagcctgtaaaatcaagagtaagctagttacttcctagttacagtgggagtatagatattgggtaaatatagccattccaaatgggagaaattatccaaaacaaaggggttacagggcccataaaagtctgaaatacagcaaggcagtcaaattttaaagctccaaaatgatctactttgactccaggtatcayatccagatcatgctgatgcaagaggtgggttcccgtggtcttaggcagctctgcccttgtggctttgcagggtacagcctccctcctggctgctttcacaggctggcattgagtgtctatggcttttccaggtgcatggtgcaagctgccagttgcatctaccattctggggtctgaaggacagtggccttcttctcacagctccactgggcagtgccccagtagggactctatctcggggctccaaccccatatttcccttccacactgccctagcaggggttctccatgagggccccacccctgtagcaaacttttgcctgggcattcagacatttccatacatcttctgaaatctaagcagaggttctcaaacctcaattcttgactt

SEQ ID NO: 881949 - DNA, 580 bp, Homo sapiens
acacattgataaatatggtttgtgtagagcaggatttatacaaaagtggagtgacagatatagctctgtcatcatttaaggcatgtgagctccttagagccagaaatgtttggtggttttgttcacagctacttttccagcactccaaacagtgcttcattacagtagacactcaagtatttattaaatgacttaatgaatgaatatagttcaagattagctggaagctaaccagttcataaagcaaaatatttgtgtatttctaaatggaggaatgataaaataggatgctgccacttacaccaagggttggcaaactacagcctaaggaccaaatcaggactaatgcctgattttgtaaataaagctttattggaatacaaccatgttcayttgcttacatattatctgtggctgttctcacgctatcatgtcacagttgattatctgtgacagaggctgtgtggtccacaaagctggaaatatttactatctggcttttctatagaagaagcttgccaacctctgaactaggaaattaagttcaaattaagactttccatgaactaatatgtttgta

SEQ ID NO: 881950 - DNA, 612 bp, Homo sapiens
tatagaattgatacaactcttacatgtacgctactattttgggaggatgaacggtatctattaaaatgaatatgattctaatagattgcaaattataaaattttataatatttaaaggaatatataatgcaaatttataacattaagaggcaatatttgtgccattttaactaccacaaatctcaatttaaatcttgacttatgacaacatataaatgtayatatattttaaattagtatatacctagatgcacaagcctgcttgggaattattttataattcagggatgtaacctttgtgactttcttttatatctaatatctgcacacagataactcatccttattgttccaaagaaggaaatctctaatgctacattacacaagaaagctgatctgataaatcttgtttgcatgtatacattaaagaatcaatcaaaacaaacgtgtattttaagaaaggatggctgcagaggactaaaaaatacaaacgtaagtacatactaatatatgtaccaaattttttattgcagcagtgcaacagaagtgagtacataaaaatgggagtaattgaataaattataatacatccacatgtgtatattacattga

SEQ ID NO: 881951 - DNA, 612 bp, Homo sapiens
tatagaattgatacaactcttacatgtacgctactattttgggaggatgaacggtatctattaaaatgaatatgattctaatagattgcaaattataaaattttataatatttaaaggaatatataatgcaaatttataacattaagaggcaatatttgtgccattttaactaccacaaatctcaatttaaatcttgacttatgacaacatataaatgtatatatattttaaattagtatatacctagatgcacaagcctgcttgggaattattttataattcagggatgtaacctttgtgactttcttttayatctaatatctgcacacagataactcatccttattgttccaaagaaggaaatctctaatgctacattacacaagaaagctgatctgataaatcttgtttgcatgtatacattaaagaatcaatcaaaacaaacgtgtattttaagaaaggatggctgcagaggactaaaaaatacaaacgtaagtacatactaatatatgtaccaaattttttattgcagcagtgcaacagaagtgagtacataaaaatgggagtaattgaataaattataatacatccacatgtgtatattacattga

SEQ ID NO: 881952 - DNA, 563 bp, Homo sapiens
taaaaagtgctgcaggcttaaaaaaaaaaaaaagatgggagcgtatgttcattggaaggaaacacacaagtatttccattaaaatggctatataataaatgtgaataagttatataatgtctccgtgaaactgccaaaaggaagctaggtattaatgttaactaaatgagaaaataaagagtgaaataactataatagagcaacacctactatgactgaaaggagtaatatgtagagtcaactttgtaaatattcaagatacagatgacagatgagggaggttcactaacaatgagaaaataaagtgtgatataatgagtggtgaataatggaatagagaactayagctcttcaattatgacaatttttaaaggcgaaaacaggaaaaccagcaacggcaaattatagatagaaaagaaaaaaacatgcatgtaagattgagagtggaaaggcctgatcattagatgctaaaattaataagcagagatgaataacaattcatatgcataaaaatatttattcaagataaatatttcaacaattcaaggaagaggaaatgttaa

SEQ ID NO: 881953 - DNA, 623 bp, Homo sapiens
gcagttcctgtaaccttttatcagggttctcagcttccttgcattgtgttagaacatgctcctttagctcagaggagtttgttattacctaccttctgaagcctacttctgtcaattcgtcaaactccttctctgtccagttttgtgcccttgctggagaggagttgcaatcatttggaggagtagaggcattctggtttttggaattttcagtatttttgygctgattttccctcatcatggatttatctacctttgatctttgaggctgatgacctttggatggagtttttgtgtggaggtcttttttgttgatgttgttgctgttgctttctgtttgttagtttttattctaacagtcaggtccctctcctgcaggtctgctgcagtttgctagaggtccactccagacgctgtttgcctgggtatcaccagcagaggctgcagaacagcaaagattgctgcctgctccttctctggaagctttgtctcacaggggcatcagcctgatgccagctggagctctcctgtatgaggcatctgttgacccctgctggaaggtgtctcccagtcaggaggcacaggggttagggacccacttgaggaggcagtctgtcccttag

SEQ ID NO: 881954 - DNA, 614 bp, Homo sapiens
tgcttcccttcccttcttttccctagatgttgattccaagacctctcgaataaacacctgcaagctaacctccatctcagagtcggcttcccaagagcctcagagtctgtgtcccaaggccagacccattttcctggctgacagtctgcatttgatcatttcaactaccttgtgaggtagagaggacaagtatttttttggctcacttcacagatttggaaactgagactgacggcaggttagtgacataaacaagaacccacgactagtgtgtggcagaataggaaatctgacctgaactcttttgatccctggcttagtacctttataaaatatatgaaaacagaactgtactaraaaaataaaagatggggatttatggaaaaccccagccagggaggcaaaagcattgcggtaaggatgtactgaagtgtaaatgacatggcatagatgtgtaaccatggaaaacggcagcaatggagacgcccgctggcctgggaactctcggaggcagtggagataaggggtgtggggttcgtagaagtcgctctgctctccctgagggggaaacagtgaaaactgagacctgtggcagtgtctgggattggtagctc

SEQ ID NO: 881955 - DNA, 629 bp, Homo sapiens
gggacgtgctcataggctgtgctaatggttgggttgcagaaatctgaaaaagagactttgatgattctgagacaagggacccctatgctttcctctagatgaggaggctctctgctttgtgatttccctaagtgcaaagggggtaatcagggagacattttsaaagtgtagaattaggatggtgacttttgctcttctgaaaaaccgtgaagatacctgcagggtgaagattgcatgtcttgaccatcggggtgaagggtgagaagcaacctttgcaggcggatgtagcaatactgtccaccaccaccccaggggcacttggagaagccagtcatcatttctcacctgagtggctgcagcagcctccctgctggtccacctgcctctaatattgctcctctcaaatccattctccacaaaaagttcatttactggtttttttgaggaattattctggccacagactgcattaggtgttagggatatgtcaccattttaaaacataaatctgatcatttacttccaagcttaactccttcagtagtttcctattccccgtaagataaaatcaaaatgcctgaatttggcataaaattccttgatgatcttacccctggcttgcatttcca

SEQ ID NO: 881956 - DNA, 626 bp, Homo sapiens
ctttatctttgatcccctctggcttatgcatatattcgcctgcttaccattccgatttgaatgtctcagaattaaactgctcatcttctaacctactcccatttcagagaatggcaccatttaaaatctaattatttataccagaagcctgtgacattttttacacctccctgaaccccatacccaatcaataaaatgttgtgcctttcaaacaattaaaatggtattgaatctgccttcttcacttaatcttttctgtcagtactctcatccaaatcctcctcctgtgtcgagacttctgccacagctctaactggactccttgctttgatytgttttcccccaaatcctttctacactcagagagattttcttaaaatgtaaatgaaatcatgctcttgcttacaactttttaacacctttcttgttgcacataaaatagcaattattaatatgttacataaatatctacataatatagtcctgtagtcaacttcttcaacatcatttgctgtcattcagctcctctattaccacattagaaagactgcgtaagatgattaccttataaaattatcatctttattgtaggagtatattttgtccagaagtctgttttgtctgca

SEQ ID NO: 881957 - DNA, 602 bp, Homo sapiens
atgtgctctttgcatatatttaattaatacctccctctgtatatacacacatacattcatgcccctcttcctacccattcacgtgagcttaatttacagtccgctgacatggaaggcagatatgattaatgtgcatcattctcaaaatatgaggctagcaggtctgtggtgttacaactataatagcatcattttcacagcttgtatgctgttttgcaaatagccygaaagtattttgcgtggtggtcaccaatttccaagagaaatgagatattcttttcactggtctggaaaagagcaagttgcagtggctgacttcagaatgacccattgttccaagcctaacaggtgcaggttttgacactaagggtcggatcccattaccactcaagttgcatggatcactgatttcgaaaggggtctgcacacacatcagtgtgggatctgtcctttacgagccacggccactaatctgaatggctatttagggtgtgaatagcatttagctggcgtccctccattcttccatgctcattgaagaatctcagtccttctcctcctgctcattagaactgacacttcccaggccagagggatgacca

SEQ ID NO: 881958 - DNA, 547 bp, Homo sapiens
gtctgaaatcacccaaagagttctacttaaaaaaaaatgtttagattgagttatccagttaaaatcaaactctccaggctgactgatatcaatggctcatatgtgcaattggctttcctcctggttgtaagcaagaggacaaggaccacatcttccctgtgcacccagcataacatggcccctagcaggtgctccataggcacttgttgtacacatgtacaacagtaattatggcttgttgtaattattcaacttgttgaatgaaggttgaacatcatcaggagagactcacttggccttcgtctgtggaagcaaaggatgaaaatgtaatasagaataatagaatagagacatcttcatggtccctgactcccagtaaagctaggatctttgtacctaatcataagtaacagggatattctgaaggggttctgtggccccttgacaatcataagtgattttgagaaataaatattttgacatctagtcccaaagcattagtcatgagactgacaatcattgatgagacagtggaaatgtggaagtt

SEQ ID NO: 881959 - DNA, 591 bp, Homo sapiens
aggttgggtcaacataaacaaattgataaataggattcatcacataaacagaactaaagacaaaacccacataattgtctcaatagatgcagaaaatgcttttgataaaatttaacaccacttcatgttaaaaactctcaataaactaggtatcgaaaggacgtagctcaaaataataagtgcccacagccaacatcatactgaatgggcaaaagctagaagcattttccttgaaaaccagcacaagacaatcaagcaaaagaaagaaataaatagtatccaaataggaagagaggaagtcaaactattcctgttttcagacatgatcytatattcagaaaaccccatagtcttggtccaaaagctccttaagctgacaaacaacttcagcaaaatttcaggatactaaatcaatgtgcaaaaattactagccctcctatacacagtcaagctgagagccaaattggaatgaaatcccattcaaaattgccacacactcaaaataaaatacctaggaatacagctaaccagggaggtgaaagatctctacaacaagaactacaaaacactgctcaaagaaatcagagatgg

SEQ ID NO: 881960 - DNA, 644 bp, Homo sapiens
agaagatcccctttcacttcttctataccttgacctcacaccagactaagagattgtgtgaacagttaagaacaatcaacttcaaagtaaaaccttagatcagacctctaccgtcagggaaaaccttgcagatcgccagctcagggctgagttaggtaatccaatcttctaggcacctagtgcttcctccaatcactgcatgtatactttatgttatacatgtccgtttatctgtcttatccattagattctaaggtaaagtgaccatacaattcaccaaaccaggacacttttgaaagtgaaagggacaacttcctataactgcactccatcatgtgtsgtcaccatagtcgaagttccttaaaagccttgtcttattctcctttgattcctccatgcctagcactgagttcagctcacaataggtgctcaataaatttttactgaatgaataaatgtgataaaggtaagtccacatttgagagtggttagtaagtcactagtagctagtgtagatagctacaatgcaatacagctatctcactgcccatgaaaaataattcctggtatttagtggcagcctcagcacaacacagattctctcattttcaccagatgaataaaggaaaagtactagtatccca

SEQ ID NO: 881961 - DNA, 576 bp, Homo sapiens
catttgtttcctcatatggatgcagttctcaaactttctcttgtgctcataaattcacaattgttccattcagatattattcaagggagattcaggagtcatggtaattatagttaagattctagaatctagaggaatagatatcattatgcctataattaattatgtttcagaagaatgatatttttcttargaaaagctggttatttcagtgaaaactcaagtgatattagtagctgaaatgaagacattctctttctggaagacactacctatttctgaaagcctgaaaagtggctgctttagccttgattcacttatgaattttgtaaaaatgtaaccatattccactgcccagtttgttaaactttactccacaattttgaaaaaaaaataagtgtcaccaaaatgcaaacaggcatcagagactcatgaaagcaagctctgaagctatcatttgttgtacactgtctattaataaaatcacttgtgtgcttgtcactcatgttatatctcaaccacctcaggcgctgatgttcacactaatatttttgaattatgaaatgaaattattaa

SEQ ID NO: 881962 - DNA, 627 bp, Homo sapiens
atacagaattatgattgcttttattttttagagtatacattacaattatagagaaaagcatgatgtctggaatttgctttgaaagaatccagacagagagaaaaatgagaagctgtgtttatgaaacaagattaaccatgagatgactgttaaggctggttgatggagccttggggggaattcatcatactcttctctctacttttgtacayacttgaaattttgtataatatcatttgtatatgtacatgcatgtatgttttaaatatgtataaatcataggtacatatgtatatatgttagtctgtgatttttatacatgtgtgtatacatttgtttatatgtatataatacatattcatattggtaagacgttgaggtaagtttctctctacccaacactggacttcaactttttctgatgaaagtcttaatgtctgtcatccttgctgagatgttttcatgagtgattcattctatacccaccatatgtcagaccccatgttaggggatcactgatgaggttgctgccttcatggagcttacattctagaggaggagacagacatttatcaagcacacgaatgaataagcaagataagcccagaatgtgatcaatgctttgag

SEQ ID NO: 881963 - DNA, 666 bp, Homo sapiens
aaattgaacaacctgctcctgaataacttttgggtaaataattaaattaaggcggaaatcaagaagttctttgaaactaatgagaccaaagagataatgtagctgaatctctgggacaaagctaaagcagtgttaagagggaaatttataggactaaatgcccacatcaaaaagctagaaagatctcaagttaacaayctaacatcacaactaaaaaatctagaaaacccagagcaaacaaaccccaaaggtagcaaaatacaagaaataaccaagatcagagctgaactgaggaagatagagacacgaaaaacctttcaaaaaaatcaatgaattcaggagctatttttttgaaaaaattaataaaatatatagactgctagctagactaataaagaagagagaagtttcaaataagcacagttagaaataatgaagagaatgttaccactgaccccacaagaaataaaaataacaatcagaaactactaggaacacctctatcctcacaaatcagaaaagctagaggaaatggataaattcctggacacatacattctaccaagactcaacctggaagaagttaaatccctgaatagaccaataacaggttttgagattgaggtaataaatagcctaccaaccaaaaataagcccaggaccaga

SEQ ID NO: 881964 - DNA, 664 bp, Homo sapiens
attcactaccaaagctctgagagaacttcatgtccttcaaactctgtctgggtattgacttagggttgagtttggggtttgtttcttcaatttgcagcaatgtggcttttgagaagtggtagtagtaatggagccaataatgtcccaacaaggcaagttctgagcagcatcactgcaactcaggtattgaggatttagtggcatcttcttgttaaaggtgctaaagactacagcacacagtatctgtgagcttcccatcaacctgccatgagacagaaagtgtttcagaaaattgaagttcagaccttatgctaagcgatttgagtcactgactaccaactacattgtttgtatcaacaaattctctcaacaggctggtggccagggaagcacctgctaccaccacagatgtcactgcaatgaagcattctgctcaacaattacatatccaagacccagaatgaagctctcctgcaaaagtgacattttaattagacttgattctctttgagaaataatgcagtaagmtaaattctccctttgccacctacccttaaagtcatcactctaagccaaaacaacttttaaaaaaagaaaacaaaattagagggctaacattctgatttcaagatttattataaagatacatggatccagacaatat

SEQ ID NO: 881965 - DNA, 683 bp, Homo sapiens
catgtatgtgtattgcaacactattcacaatagcaaagacttggaaccaacccaaatgtccatcaatgatagattggattaagaaaatgtggcacatacacaccatggaatactatgcagccataaaaaatgaggagttcatgtcctttgcagggacatggaaagctggaagccatcattcttagcaaagtatcacaaggacagaaaaccaaacaccgcatgttctcactcataggtgggaattgaacagtgagaacacttggacataggatggggaacatcacacactggggcctgtcatggggtggggggaggggggagggatagcattaggagatatacctaatgtaaatgacgagttaatgggtccagcacaccaacatggcacatgtatacatatgtaacaaacctgcacgttgtcacatgtaccctagaacttaaagtataataatartaaaaaaaaaagaaaacttttgtcaatgcttttatcattttggaatcaatgaaaacttttatattaaacaatgaaaacttttatcgaagaaattaaaattgtttctttcctgaagagacctcttgaaatgtcaatatcaactgcctgagacttctctaaagattttcttaatgattaaactgacaataaaattggaatgggatgatgtgtgtgctgtaaggagggcctc

SEQ ID NO: 881966 - DNA, 683 bp, Homo sapiens
catgtatgtgtattgcaacactattcacaatagcaaagacttggaaccaacccaaatgtccatcaatgatagattggattaagaaaatgtggcacatacacaccatggaatactatgcagccataaaaaatgaggagttcatgtcctttgcagggacatggaaagctggaagccatcattcttagcaaagtatcacaaggacagaaaaccaaacaccgcatgttctcactcataggtgggaattgaacagtgagaacacttggacataggatggggaacatcacacactggggcctgtcatggggtggggggaggggggagggatagcattaggagatatacctaatgtaaatgacgagttaatgggtccagcacaccaacatggcacatgtatacatatgtaacaaacctgcacgttgtcacatgtaccctagaacttaaagtataataataataaaamaaaaagaaaacttttgtcaatgcttttatcattttggaatcaatgaaaacttttatattaaacaatgaaaacttttatcgaagaaattaaaattgtttctttcctgaagagacctcttgaaatgtcaatatcaactgcctgagacttctctaaagattttcttaatgattaaactgacaataaaattggaatgggatgatgtgtgtgctgtaaggagggcctc

SEQ ID NO: 881967 - DNA, 637 bp, Homo sapiens
ctctcttctgacttgtagagtttctgctgagggatccactgtgagtctcatgggctttcctttgtgggtaacccaacttttctctctgactgcccttaacattttttccttcatttcaaccttgttgaatctgacaatcatgtgtcttggggttgctcttcttgaggagtatctttttggtgttctctgtatttcctgaatttgaatgttggcctgccttgctagattggggaarttttcctggataacatcctgaagagtgttttccaacttggttccattctccctgtcactttcaggtacaccaatcaaacatacatttggtatttttacatagtcccatatttcttggaggctttgtttttttctttttactcttttttctctaaacttgtcttcttgctttatttcattaatttgatcttcaatcactgatatcctttcttccacttgattgaatcagctattgaagcttgtgcattcatcacgaagttcttgtgccatggttttcagctccgtcaggtccttttaggtcttctctacactttattctacttagcaatttgtctaacctcttatcaaggtttttaccttccttgcgatgggttagaacatgctcctttagctcggagaagtt

SEQ ID NO: 881968 - DNA, 658 bp, Homo sapiens
aggaaccaaaagcagaagctgccaggccagttaaggctgcaccccacactggtccagggtcattttagttctattctactagtagaagcaatcttagggcccacacaagttcaaaggagtggggagactagaaaagcggggtgactagattccaactcttaatagggatgtcaaggcaacattgcaggggaacatatagaatgggaggtagtgttgtggctgccattggaaaataaaatctatcacctcagaggtactgaaatcagtaataataatgacagaactagtgtagaagggagagagagtgaaccaggttctaaaataatgattaggcaaaaaactcagagctccacagatgtctgtaactaggaagaatagatggcaataagcttgctgacatgagcaagacaagggcttaagggaggagaacgggacaatggtgggcatgtcttaygaaaaggtgctttcacccccatccctgttttagctagtcctcaatttggtacagtgtgtgaggcccacctccagagttgagtcccacctcctgcttcagcttgagaacacctctttcctttagccctcgcatatgtggatattttctttcctcctgtgttacttggcctgggagcgaggcaggtagcctttttgttcctctctg

SEQ ID NO: 881969 - DNA, 598 bp, Homo sapiens
gatttctagatctgagtttgaagcatctttagattgtgaaatgacaattacagtggcaatctgatgtattttcctggtttgcagttttgaatgtctctggatatgtcatttggtgttttaatgaactctcagagtaaacaatataccagtaggcatgaaggatgtccacacataatatgttgtactgatttttatgaggtttaaagtcttccagtttcagcttgccaggcttgggaaaagagcagttttagttttttgttaaactagaaaaatgtaggattcaattcagtttacagttggataagaaaacctcaaagaaaatgaacaggacmagaatctgatcatgggtgcattatagttttctattaaaacataatctccttttttcagtggtttctatttttgtcaaaagtaattacaaaataaatctacttttatctaacttgagtatttatatatgtaacaagaataataatgtcatgtatattttaaaataagatattttagctggagctttgttagtatccaagggtttttattgacttagtatcagtcagccttaattttttaaaactagctggtaatgaggaatctttgg

SEQ ID NO: 881970 - DNA, 598 bp, Homo sapiens
gagcgcctttaatggtccacttattaattcatcagtcattggaccatatggctagcccattttcaatgacccatgagtctataaatatgtagcaggaatttgctgttggagtagccagtacagccatcagtactacatggacttggcccattcagcagaacatctcatctggtctcagtcaaaatatgaccatccttggggcaggggctgcagtggcccagtggtctccatcagctttgartttcatatatccatccatgaaccaagccatattatcagctggaacatttttaaactgtgggattcatttagctaacagagggacaggggtatctcctatgggtattttgacctcctccagtgaggcggctacatattcatggagttggctgactcactgaggccttggtctaacattattttggatgtgttattttcatttaatgatggagctttgctgagcctattttacactattagtgaaatttgtgaatacccacatgaggataagttgctcaggtctttaggtgacatatgttgctctgttttcattagggcccaacagcaggctagtcgttgccatttgaagaagttctac

SEQ ID NO: 881971 - DNA, 652 bp, Homo sapiens
cctgtgctttaggagcgttgacgagcgctctctgtctaaacctgtgactccatctttccaggcttcacttcctcagctccttattcccatagtacttgctacagctctgcatccctaactgtcacttctctactcattaccctttctgtaaaaccccttataaattttaagaracctcgacctcatcttaaccatgtgatcaaagttagcaccagtaaggagacaaatgacaccatgtgaattttaatgtttccctgatatgaccacaacagaatttctgatgtatccctgccaaaaatgggtaacctgaatctaataatgaaaaaagactgcataaacccaaactgaggggtattttacaaataattgacctcttatattaacaatatatcaaggttataaaaaaaaatctaaggagcatttcgaagtaaaccagagacatgacaaccagccaaatgcaatatacaatcataaattagacctcagacaagaaaacaagttttcctctgtaatagaaagacattggttgggcaattgatcaattttaactacctatagtttaaagcactgtatcaaaattaatttcctgattttaataattgttctgtgttaatttaaaaaatgcctttatttataggcagcgtagactgaa

SEQ ID NO: 881972 - DNA, 641 bp, Homo sapiens
aggcctgggaaggccaactggggcaaggagctctgccatctgagaagacttagcttttctctggcaagggcacactgaaggtaaggacagagaagacaagaaggctcttaggcctatcaacttttaaactgtccctttataatgatccctgtgaaataattatttctatcaatggtcagctagtacaggggatttaagatagtgggttcattaaagagagtcaggatcacaaactcatttaagtctccttgaacctgtttaatcaaaatgattttctgctactctcgattacgggctgagtttccgtgatgacagattaatgactgatccactaagccataccacctcttttgtcaccagccccactgactgggccagccactattttatcaataggctccacttgcccttgaaactcattatagctgatatgttagatcaaatgagcagatcagatgctcgctgccaccccagctctrctacaaagaccaccaaatcccacagagcatgtgccagaaggaaaaagaacagaagttggtccttgtgctcttattagaattacacactcaggtcactccacagtaagataaattccagccaaggcagcacttctgattcttcaggcccgctaaaggtaatta

SEQ ID NO: 881973 - DNA, 619 bp, Homo sapiens
ttcagcaaagtctcaggatacaaaaatcaatgtgcaaaaatcacaagcattcctatacaccaacaacaggcaagcagacagcaaaatcatgaatgaactcccattcacaaaaagaataaaatacctagaattatagctaacaagggaaataaagaacctcttcaagkagaactatgaatcactgctcaaagaaatcagagatgatacaaacaaatggaaaaatattctatgaccatggataggaagaatcaatatcgtgaaaacagctgtacttcccaaagtaatttatagattgaattctattcccattaaactaccattgacattcttcacacaattagaaaaaactattctgaaattcatttggaaccaaaaaagggcccaaatagccaaggcaatcctaagcaaaaagaacaaagctggaggcatcatgctacctgacttcaaactatactacaaggctacggtaatcaaaacagtatagtactggtggtacaagaacagacacatagacaaatggaacagaatacagaactcaggaatcagatcacacacctacaaccatctaatctttgataaatctgacaaaaacaagcaatggagaaaagatttccctgtt

SEQ ID NO: 881974 - DNA, 678 bp, Homo sapiens
tttacagacagcatatcgtggtgcttctcagcctccatagtcctgtgagccgatttccagaataaattctttctctctctctctctctctctctctctctctctgtctctctctctttctcctctctctcttgaaaggggtgccaggggtgccctcaactcctgatttataaatcatttctcacgagagagagaggagagagagatatatattatgttggtgcaaaagtaattgcgatttttgccattaccattgacactattggttctttttctctggagaaccctgactgatgcaatgggcatagcatggcaagaaaatccctatattaattctgaaattccaggtcactttggctgtgatctggagtctttaataaatgttcagtctccacagtgcaagccaacctcaacattttatctattagatctcattctatgttacacttcctgagtaaaaacattgcccaaataggctggtcacagtcaccaaaattgttcctatagagaagtsgttctcgaacagggaaattttgcctcccagggaagatttggcaatgtctggtgacatttttgggtgtcatcatggagaaatgctgctggtgtctagtgggtagaggccggagatgctgctaaacatcctacaatgcacggagcagccgctcacgacaaagaagat

SEQ ID NO: 881975 - DNA, 544 bp, Homo sapiens
ctgtttgtggctgttaatttggatttttacttaaacttgagtgtaagatgtttgtgatctagattaatatacaacattggtatacctcccttcagtttccctaggaaacagtctatgtcctccaactctatatagaaattaaatatttaatataatgtttgtatctggatcacccttttaagagatttcatccttagtgatgatttctgtagacaaggacccactcaggcactgttcttgccagtgccgagaagatatctggacatgggcccactagcaacattcccagggtcctttaagaactcctcatttcctgaccgggcacaatggctcacacctgyaatcccagcactttgggaggccgaggtgagtggatcacttgaggccaggagttcaagaccagcctggccaacatggtgaaaccctatgtctactaaaaatagaaaaattagccaggcatggtcgcacagtcctgtaatcccagctacttaggaagctgaggcatgagagttgctcgaacctgggaggcagaggttgcagtaag

SEQ ID NO: 881976 - DNA, 645 bp, Homo sapiens
ctgaatgtctctctagacccactgacctcagattctcaagaggttagcccaagaatacaattttttagagctgccagtgattctgatgacccaccagataggcaattcattgatacaggacagtggttctcaaattgtggatcccaaccagcaccatcagcattagaagtgcacattattgggcctccttgaaagcctcctgaatcagaaattctgggggacagggcccagccagcaacctgagctttaggaaggcctctaggtgattctgatgcaggtgaaatgtgagaatcattgctctagagaacttcagtcaagcctgggccaaaaagamcaaaaagatttcatccttacctagttactttctagagattctgacagtaattacttacagagggagcaaacagagcataggactgtactaaatatgactatgaggaagaagagacacctaaagatgcttagaagatttcatgcctgacaataagcatgtgagagagtaattggggaacttctgtttcctgacatttgctggggcattttaaagagcttgtaataatatcttctagttacaggaataaacctaacttaattgttttatttatgtgaatttttgcctgtctgaacagaaaaaaattctcttat

SEQ ID NO: 881977 - DNA, 674 bp, Homo sapiens
taccacattttctttagccagtctatcattgatggacatttaggttgactccatgtctttgctattgtgcatagtgctgcaatgagcatatgcatgcatgtgtctttataacagaatgatttacatccttcgggtatacacccagtaatgggattgctaggtcgaatggtatctctgyctttaggtctttgaggaatcaccacactgtcttccacaatggttgaactaatttacactcccactaacagtgtgtaagcattcctttttctccacaacctcaccagcatctgttatttattgactttttaataatagccattctgactgctgtaagatgatatctcatttttgttttcttttgcatttctctaatgattagtgatattgagtatttttatatgattattggccacatgtgtgtcttcttttgaaaagtgcctattcatgtcctttgcccactttttatggatttgtttgtatttttcttgtaaatataacttccatatagatgctggacataagacctttgttggatgcatagcttgcaaagattttctccctttccgtaggttgtctgttcactccaatgatcatttgtattgctgtgcagaagctctttagtttaattagatcccatttgtcaattttacttttttgcaattgcattggcatct

SEQ ID NO: 881978 - DNA, 613 bp, Homo sapiens
ccaggtgattcagatgcacagccaggtttggaaatttaagaccttggaagagagtcacattgcctctctctgagtctcagcttccttgtctgtgaattggggaggagtgagagttggtgtgagtatcaaagaagacgctgcaggtaaagtctttagggccagccaggcgtagtggctcatgcctgtaatcccagcactttgggaggccaaggcgggtggatcatgaggtcaggagttcagcctggccaatatgatgaaacactgtctctattaaaaatacaaaaaaattagccaggcatggtgccaggtgcctgtagtcccagctactcaggaggctgagacaggagaatcgcttgagcccaggaagcggaggttgcagtgagccgagatcacaccactgcactccagcctgggygacagagcaagactctgagaaaaaaaaaaaaaagtctttaataaggccaaggcatatggaaaggactcaggattggaactgaataattaaccgtggatatcagtatcattgataccaatactgttgttttattgtaactacttcactatcatgggttgaatagcggcatcaaaaatatatgtccagttcctaacccct

SEQ ID NO: 881979 - DNA, 593 bp, Homo sapiens
aaaaagatgaaaaaatatgtgcattctaactattttctacaaactatatacatagtagattattccattgttgacacttctgaatcatatggccatggaaattaaggggatcccttaattgaacccctcaattgaaagaggagcaaactaaagcacagagtacattgtccatataaacaaccacttagggctgccatcttcaatgggaaggtctctctcaagttatagactgaaatctaagyctggcccagcattcactgggcaccttattttctacctacattttcataagatgtatcacaaacttcagcaattatttgttgtgtactatctgctatatatttatgcaagttaacattgaaataataaaatgagaagccattagacaggaaccctgggttcctacctaaggaaactaaaacctagctcagcctcatttcatgcaagaggctaatttaaaagaaatgaaacttaagctcaaccaatcacatagccaactgggcattgattattgtcttgaacttcccaccaagatagtccaaatagggcaattttccaaacttcaaccaatcaaataatttctttgctctgct

SEQ ID NO: 881980 - DNA, 498 bp, Homo sapiens
ttctaggtgcagctcaatgtttctcaagtttaaattgcttttttatgttgaaattggaattgtttttctgtataagaatattcctttacagttggacataatgcccagaccagcagtagcagcagccgcagcaacagtagcagcagcagcagcagcagcatattctttatgaaagaataaggctcacggtaaaagctgagggaagcaacacccrtgtgtctaccttcaaagctaaaagatccttcaggcttcattgattaaactctttgctagctacgtacaaaaaaaaagctgctttttggcaatttgaacagtttcctcctagtgtcatttagctggttcctttttatccttctttttcctgtaaactgggaattgggtctaagagcttgattagatttagattaagcattttggggatacttcacactgatgctataatcgaataatcacactgggagtcacatagtttcaacttgtctgtcagtaatactaggt

SEQ ID NO: 881981 - DNA, 686 bp, Homo sapiens
taataaccctgatctgatcactatatattgtatgtatccacacatcagtatgtacatcataaatatgtacaattattacatgtcaaatcaaatatgtaagaaaacagaaaataagtgttgatgaggatgtggagaaattgaaaaccttgcgcactgtgggtgggagtgtaaaatgacattgactctatggaaaacagtatcgtgttttctcaaaaattaaaattagaatgatctcattttccagtaatgccaattctggatatataccccaccaaaaaaaatggtggtataaaagaggtatttattcacccatccttttatcagcattattcatattctctagagggaaaagcaacccaataaatagataaacaaaatgtggtacatacttataatataatataattcatccttaaaaaagaaatgaaattctgacacatgctacaatatggatgatccttaatgacattttgtcaagtaaagtaaaccagtcacaaaggaacaaattatgtatgattccacttaaatgaggtayctggagtagtcaaatgcatggaggaagaaagtagaatgatggtttctaagggctgggagaaggggaaatggggattattgtttaatgaaaatgaagttccatttttgcaagataaaaaatgttttggagattaatggtagtgaagattgca

SEQ ID NO: 881982 - DNA, 666 bp, Homo sapiens
ggaggcatcacgctatctgacttcaaattatactataggactacagtgaccaaaacagcatggtactggtacaaaaacagacatagagaccaatggaacagaataaagaacccagaaataaggccacacctacaactatctgatcttgaacaaaactgaccaaaacaaggaatggggaaaggactccttgttcaatatatggtgctgggaaaactggctagccataygcagaagattgaagctggacaccttccttaaaccatatacaaaaatcaactcaaggtggattaaagacttaaatgtaaaacccaaaactataaaaatcctgaaagacaatctgggcaatacaattctggacataggaacaggcaaagatttcatgacaaaggtgctaaaagcaaaagcaaaaattgacaaatgggatctaattaaactaaagggcttctgcatagcaaaagaaaccatcaatagagtgaacagaaaacctacagaatgggagaaaatatttgcaaactatgcatctgacaaaggtctaatatccaacttctataaggaacttaaacaaatttatgagagaaaaacaaacccattaaaaagtgggcaaaggacatgagcagacacttttcaagagaagatatacatgaggtcaacaagcatatgaaaata

SEQ ID NO: 881983 - DNA, 656 bp, Homo sapiens
aggctggccaacatggtgaaaccccatctctgctaaaaatacaaaaattagctgcgcttggtggcacatgcctgtcccagctactcaggaggctgaggcaagagaatcacttgaacctgggaggcagaagttgcagtgagcaaagatygtgccactgcactccagcctgggcgacagagcgagactccacctcaagaaaaaaaaaaagaaagaaagaaaagaaggagggaaagaaagaaagaaaaagaaggaaagaaagaaagaaaagtgaagcctcttttcagagaacatcagatcttagttttggaaggaaatccaattgtatgctgctcacacttctaatatacctaagaggtaataatagtgattctgcttgaacatttccagtgatggagaacttaactacccctcagaaaatttcattttataattggataatttagttatgaataaacttatattttatattgaacagaaatctacctttccgtaaattccacctactggttccagtggttaaatagcaaagcagtggtttttaaattgtcttgtgcagaaatgtttcagaagttcttaaaatgtttgatcaaaatttcatttttttaaaaaggaagttttgaatcatttgttaaaactgaaaaatttaaaggatgtgt

SEQ ID NO: 881984 - DNA, 701 bp, Homo sapiens
aaggggatcacttcatagcaaaatggagacttggtcccacatttaccttccttgtcttccaatgctatctgaaatgacccaacaaatagagcacaacaaataagcaagaagctttttggtatttctgggaggtattgtgcagttgtgataggatggacagagtttggagcagcagcaatttcacacctgcagaagtaaagcccatctgggaagcagtgataagatgataagcagagctacagacctgggcaaactcaagtcaagagagaaagagaacaaatctgggctgtcaaaagatatcatcatattttcctatgctattcaccaatcctttcttgacttaatgatggccaaggaaaaagtaacttcttttttttgttgtttttttctcttgagatagagtctcgctctgttgccaaggctggagtgcaatggcttggccttggctcattgcaacctctgcctctcaggttcaagcaattctcctgcctcagcccctgagtagctgggactgcaggcgcatgccaccacacccgrctaatttttgtatttttagtagagacagggtttcaccatgttggccaggctagtcttgacctcctgacctcgtgatccacctgccttggcatcccaatgtgctgggattacagacatgaaccaccatgcctgcctggcaaaaataacttctaatgatgtcatgg

SEQ ID NO: 881985 - DNA, 589 bp, Homo sapiens
aatgagataccatctcacaccagtcagaatggttattattaaaaagtcaagaaacaagaggtactggtgaggctgcagaaaaatagaaacatttttacactgttggtgggaatgtaagttagttcaaccactgtggtagacagtgtggtgatttctcaaaagtttagaagtagaaataccatttgacctggtaattcctttactatctacccagaggaatataaaccatgctattataaagatacatgaatgcatatgttcattgcagcacaattcacaatagcaaagacatggtatcaacccaaatgtccatcagtgatagactggataaagaaaatgtggtacatattcactatggaatactatgcagccataaaaaggaacaagatcaygtcctttgcagagacatggatggagctgaaagctgttatcctcagcaaactaacacaggaacagaaaaccaaacaccgcatgttctcacttgtaagtggaagctgaacaatgagaacacatggacacatgtggggagcaacacacactggggcctgttggaggcgtagtgagaggaagaacatcaggaagaacagct

SEQ ID NO: 881986 - DNA, 648 bp, Homo sapiens
tccaaatgaaaccaaccagaacagacttacccaggaccatgtagctgtcaccatctgaggccacttacctagcccccaaaaggccctaatggccctcagtgccattccaccctgacctggttctctctctgccccctaccatctgatgccatccacacttgtactgccctggcacatcctgagggttcagacctagccgtttttcctctccaccttggatgttcaaaagaagagtacctgtcctaattgaaaagtttggctaaagtagacagctttcacattagagggtgatgggccttggaccarctctgattaaagacaccgtcctggtgtttgccgtcaggatagggcctggaaactggcaggagaagactcttgtgaccattttggatcccttcactgacagtaggtgataaaagaccctctggcccccactattaatgtaactgcatttgtgttatgtatgtgtttccatttgtgctcttttaaaattatgtctgtacatatattaatatattatgtagttacacacatacacacacacacacacacacacacacacacatatatatatattctgcacaactccagtctcaactcagttatccctcttctgtatgtccaagttctcttgtgggcatctgcaag

SEQ ID NO: 881987 - DNA, 648 bp, Homo sapiens
tccaaatgaaaccaaccagaacagacttacccaggaccatgtagctgtcaccatctgaggccacttacctagcccccaaaaggccctaatggccctcagtgccattccaccctgacctggttctctctctgccccctaccatctgatgccatccacacttgtactgccctggcacatcctgagggttcagacctagccgtttttcctctccaccttggatgttcaaaagaagagtacctgtcctaattgaaaagtttggctaaagtagacagctttcacattagagggtgatgggccttggaccagctctgattaaagacacygtcctggtgtttgccgtcaggatagggcctggaaactggcaggagaagactcttgtgaccattttggatcccttcactgacagtaggtgataaaagaccctctggcccccactattaatgtaactgcatttgtgttatgtatgtgtttccatttgtgctcttttaaaattatgtctgtacatatattaatatattatgtagttacacacatacacacacacacacacacacacacacacacatatatatatattctgcacaactccagtctcaactcagttatccctcttctgtatgtccaagttctcttgtgggcatctgcaag

SEQ ID NO: 881988 - DNA, 592 bp, Homo sapiens
gtaatttcattactgtgtgtctagggtgaaatttcaaattcttccattcttcaacttctctttcttagccctcaactctttttctatctctgctgtattctggatgacttcctctgataatctttctgttttacttattcacttcttaatcctgtgtagtctgctgattaaagtgtccttaaagtttcctccatacccataccaatattttttgtttctgaaactagctatttttccccaagtttttccgtcctcttccattatctccatttttatggattctatccttttttaaactttcaatattttcaacatacttatattaaagtactttttcagctgattttattacttctactttcttgggcatgaacgctctatttgttgcatctgctagacttacctctcayagtggtgtttttcagtgttttgtgatattttctcctcagcttatcttcaattggaattttcttcagtgagccctgggttatgaagccctccttggggggatgtttcctagagactttcagctggggtcatgtgcattcaccggttctggactttctcatttagtcctcagctcaggtttcct

SEQ ID NO: 881989 - DNA, 652 bp, Homo sapiens
gtgctgcctaataataaatataaaatagttcggtaaatcttctttgccagcaaacatagaaaaacttgtctcctgccttgggcaccatagtttgtccatataacttgttttcctttcccaatattgagcctagcacatgcattaaaacttacgtgagcgtaccaaacaattgccctcaagaagacaaaatgtagcactgaaatacatcagaggctcaaaatttagaaggccttaagaacatctattttctctcttcagccagctgtcctcaggcttgagaaagatgtcccctttcttgaacaaactctatatgaggtgtcctcctcatactcttgccattacttatcctttaagtaacatcctttaagaatcaactcagctgtgatctctgcaagaattcctcttgacaccgcaagtttggttacagataccattgtgtgtccctatccctctgtgcttacttttgtcacactgstataattcttcatatgtctctttctttgaagagatgcagattcctgcacagtaaggctgggttgcatttatctctataaacctagcaactagtactgggcctggaatgtagttggagctctgtaatgctgaatgaagcaaggtggatgggaataatcaaaccatatacccctcccag

SEQ ID NO: 881990 - DNA, 611 bp, Homo sapiens
cttttttcctctctggtataactgaaatgaatctaagagctagctgtgcacctctgagcttccctgacattaaggaataatgcatgctgcacacagaagtttaacccatcatttcaacccatatcacatgtaagcatatagctacatgctccaaagcaaaactgtgctacttcaaaacatcaactgtgccacaatcatggtctctgtggccatgagaacctgcccacaatgctgccaatagtctactgtggtaagcaatcttcttattttgtactcttggtgcacagtggtgacaggtaacattttgcctaaccagtgtcagggaagatccatcataggtcaccccttargactacctgcctttccatggagatcatgttctttcaacaccattcaaaaagtgctttagctaatgtaatttctggctctgagatagatcagggaggacaaagacaagatcattctctaaaggaagccagaagagtgtatattaccctcgtatggataccttaggtaggtgccagcttctgatgacaccatccaaccatagcctccaagtgaagttccatttgggctagaatccctcttttattctcaggttctcagcttca

SEQ ID NO: 881991 - DNA, 569 bp, Homo sapiens
cattaggacaatttgtatgaaacaatatccaatttgctgtctgttacttctaccttatcatgtctaatttttcctcatctttgtgaaatcctgcatctacaataggcaaaaaaacaaaaaacaaaaggaatcttattctattcacagccatcagaaaaatgtgttactattcctgyagtcagttaggttctaaatcatacatttgagatatatctcaaacatgtcataaagaaaataagcatcatatttctaactaaatagcacctgaaatattccatatgaaaggaaaaatacaaaaaactaaacttttaattactaacctccttaaaggaaaataattctatatgatttgatatttcataatggatgtccaatacctgagatataaattccattttctgtgtcttaacatctcaccttcagaaaatctccaatattgggttatttggattatatatttaaaactgaatatacttgaagatgtgaatgatttgttgctgcaacaaatggtttagcaattatctgcattaaaatgtgttccatgaacaacagaaaaagaatatttctac

SEQ ID NO: 881992 - DNA, 618 bp, Homo sapiens
tttattgacttgaattgtagaaataatgaattgtgtctttctgcttttgtttgtttttataaatttcttttttcacttgataaataaataaaattggtattttattcatattatcagattttccagtatagatcttatgaatttatagacacggaaaatgtttcttgaattactgactgattaagtagtaaatatgacattttctgaagatttctttttttttttaaataggaaagaaaagcactaccagcaactggacaaaaagcaaatggtattggtattataaaaagtgctccatgagagmaatcaaataatgataatgttgtattttgtgtacaataaaagatggtgaggtagtgaatatagctgaataattttctatgctttaataatataatttttgaaaataaatataactaatttaaatataatttaaaataaatttaaaattaaattaattgttaaattacattaaattataagcctaattttaattaaattatagttataatttattaattttaatagtaaatataatttaatttaaacatactttttcttaaaactttggtgaacacttaaacttgtagatcaaaatataatattcattgttgagaa

SEQ ID NO: 881993 - DNA, 542 bp, Homo sapiens
gatctaatatttaattaaataataaagaataatacatgtcttcagcataaaactgaattaattttatctacatagcagagacagagatgttgaataagctaatcagtaatcactttctattttactttttattccctgcatattaagaataaaactggattcctttttttttttttttgagagggagtctcatactatcactgggctgcagtgcaatggtgcaattttggcccactgcaacctctgcctcccaggtttatgtgattctcctgcctcagcctcctgagtagctgggattacaggttcaactacaacacctggctaattttttgtatttttagtagagatagcatttcactaygtttggcagactggtctcaaactcctgacctcgtgatctgcccacctcagcctacaaaagtgctgggactacaggcataagccactgcacctggctgatagtttttaaaataattattctgtgtaaagaaaaatatctgttttatactctgttggtcgaattataaattaatataaacatt

SEQ ID NO: 881994 - DNA, 542 bp, Homo sapiens
gatctaatatttaattaaataataaagaataatacatgtcttcagcataaaactgaattaattttatctacatagcagagacagagatgttgaataagctaatcagtaatcactttctattttactttttattccctgcatattaagaataaaactggattcctttttttttttttttgagagggagtctcatactatcactgggctgcagtgcaatggtgcaattttggcccactgcaacctctgcctcccaggtttatgtgattctcctgcctcagcctcctgagtagctgggattacaggttcaactacaacacctggctaattttttgtatttttagtagagatagcatttcactacgttkggcagactggtctcaaactcctgacctcgtgatctgcccacctcagcctacaaaagtgctgggactacaggcataagccactgcacctggctgatagtttttaaaataattattctgtgtaaagaaaaatatctgttttatactctgttggtcgaattataaattaatataaacatt

SEQ ID NO: 881995 - DNA, 612 bp, Homo sapiens
tgggtttatagtcgtatgcccccatgctcagctaatttttgtgtttttagtagaggtggggtttcatcatagtggtcaggttgggcttgaactactgacctcaggtgatctgtctgcctcggcttcccaaagtgatgggattataggtgtgagccactgtgcccagcttagttttttttttttttttttttttgagatggagtctcgctgtgttgcccagcctggagkgaagtggtgtagtggtgtgatctcagctcactgcaacttctgcctcctgggttcaagtgattctcctgcctcagcctcccaagtagctgagactacaggcacatgctgccacccctggctaagtttttatattttagtagagatggggtttcaccttgttacccagctggtctcgaattcctgagctcaggcaatccacctgccttggcatcccaaagtgctaggattacaggtgtgagccaccatgcccagccattcccggctagtttttgtagatactggggtctcgctgtgttgcctaggctggtctcaaacccatgggctcaagtgatcctcccattacagcctcccaaagtgctgagattacaggcatgggccactgtg

SEQ ID NO: 881996 - DNA, 653 bp, Homo sapiens
tttcccccttaaagcatgtctgtttgacatgtcctaactctgagaaaatccagtgtgtgcttttcagagaatagcagtaaggagtggaaatggccaatggtcaaagtgtcacttgtcctcttggctccccttcatgaatgttaaactctaaactactcaggtcacaatttagaacccctttgttgatccctatagagtgttcccagatatcaaatgacaaataggtctttgatgaagaaacaccctgtaaagccatattgctctggtttttgtgtgtgagtgtgtgtgtgtgtgtgtatgtgtgtgtattttcttctcttttgaaaactgtaaatagaggaattttcattacaaatgaaaatgtttctgttccatatktatttcctgtctaatgtactttgctcttcctggatctagtaaggatctcagcttgtcttttttatacctgcaaaaaattacatcaagcttcatttttcatgtcaattactgacatattttcaagccttcacaagttatttctgaatatttggtgcatcaaggagagactgtcattgtagttaaagaagtttttaaataggttatattcaataaaatttcagagcttgtttctctggaaagcatagacatagtggtgttatgggtagttaaacata

SEQ ID NO: 881997 - DNA, 602 bp, Homo sapiens
ataattgctttaaagacccttccagccgggagcagcggtcacgcctgtaatcccggcactttgggaggccgaggtgggtggatcacctgaggtcaggagtttgagaccagtctggccaacaaggtgaaaccccgtctctactaaaaatacaaaaattagctgggcctggtggtgggcgcctgtaatcccagctactcgggagtctgaggcaggagaatcccttgaacttgggaggcagaggttgcagtgagccaagattgcagcactgcactccagcctgggcgacaagagcaagactttgtctcaaaaaaataaacaaaacaaaaaaaacaaaccctcccagagaggcttgtgtaatacggattatctgtcaaatccaggactgtgtgtgtgtgtgtgtgtgtgtgtgtgtgtrtgtgtgtgtgtgtgtgtgtgtccatccatgtatccatctatccatccacctacctacctacctatcatcctgctgcccaatcattatttgctcctggtttttgtctgcctataatgtttacactgataccatgcaaccatggtgatggctgcccgccagaattatagttgttcctgaactctacctg

SEQ ID NO: 881998 - DNA, 652 bp, Homo sapiens
tgtactgagcagaagacattttaggaagaggtttctgttgtcctccactatttcataaaacttgtgatgaggagggtgttcattccaaacatgcttccataagagaccaaataaaactttgaatcctgtataaaaaatcacaagcaagaagaaaatacaaacagaggatggcaattgtgtttaaatgtctccaggtctaaaagtcctctgttaacattcccatcctgtaaagaaggctcatgacacacccacttcaacaactaagacctccttcccttagtgaagtgccacctccacataaggtctcttgcttattcctctggtacctccactgactcacctatgctgcagaagcagccgtgccaccccattctacctgctgcacaatcaagacttttctaattataagaaaagcagtcccctgagcacgcacaaaaacatgcgatgtgcaatcatcacattttggaaatgggggcccagagaggtattttccakgaaaagtaatttacattttttagctacaaatgcatcttttcttctaagaagaatcatctgtacaacagatttgtatctgaaaatagaaggccggatttatgcaaaaatgatctcaggggatcatcacagaaacacaaaaaaagtaattttctgccaa

SEQ ID NO: 881999 - DNA, 643 bp, Homo sapiens
ttcagagccatgtcctccagctattgctgtcctgctttgacctgcagtgatcctgtggtctccctgatggctcctgaaagcatctctgtcagcagggagatctatattccaggtctctatcccttactcttggtactgtacccaaagtacargggtgaacatgtgttcaccaaatcctgtttcactctccttctcctgggcacacagatggcaacatttgacattctccctcacagttggtttgagttctagtcaatatagcaaaaaagggatgtgagtcacttcacagtatagatctcccatactagctactatagccatgacaataaatgcaatgacttaaaacaacagaaatttattctttcacttttatgggtacaaggaatctaaaatccagtgtcagtagggtcacatcccctccaaaggccctaggggagaatctctccctggctcttccaattcctggtggctccggcttaaccatcttgccacagcatcactccaatctcttcctatcttcatatggccttcttccctctgtgtgtctctgtgtctagatctcctcctttctcttacaaagtcaccagtttttggatctagggtccactctaaatccagtatgatttcatctcgagatccttaa

SEQ ID NO: 882000 - DNA, 643 bp, Homo sapiens
ttcagagccatgtcctccagctattgctgtcctgctttgacctgcagtgatcctgtggtctccctgatggctcctgaaagcatctctgtcagcagggagatctatattccaggtctctatcccttactcttggtactgtacccaaagtacaagggtgaacatgtgttcaccaaatcctgtttcactctccttctcctgggcacacagatggcaacatttgacattctccctcacagttggtttgagttctagtcaatatagcaaaaaagggatgtgagtcacwtcacagtatagatctcccatactagctactatagccatgacaataaatgcaatgacttaaaacaacagaaatttattctttcacttttatgggtacaaggaatctaaaatccagtgtcagtagggtcacatcccctccaaaggccctaggggagaatctctccctggctcttccaattcctggtggctccggcttaaccatcttgccacagcatcactccaatctcttcctatcttcatatggccttcttccctctgtgtgtctctgtgtctagatctcctcctttctcttacaaagtcaccagtttttggatctagggtccactctaaatccagtatgatttcatctcgagatccttaa

SEQ ID NO: 882001 - DNA, 643 bp, Homo sapiens
ttcagagccatgtcctccagctattgctgtcctgctttgacctgcagtgatcctgtggtctccctgatggctcctgaaagcatctctgtcagcagggagatctatattccaggtctctatcccttactcttggtactgtacccaaagtacaagggtgaacatgtgttcaccaaatcctgtttcactctccttctcctgggcacacagatggcaacatttgacattctccctcacagttggtttgagttctagtcaatatagcaaaaaagggatgtgagtcacttcacagtayagatctcccatactagctactatagccatgacaataaatgcaatgacttaaaacaacagaaatttattctttcacttttatgggtacaaggaatctaaaatccagtgtcagtagggtcacatcccctccaaaggccctaggggagaatctctccctggctcttccaattcctggtggctccggcttaaccatcttgccacagcatcactccaatctcttcctatcttcatatggccttcttccctctgtgtgtctctgtgtctagatctcctcctttctcttacaaagtcaccagtttttggatctagggtccactctaaatccagtatgatttcatctcgagatccttaa

SEQ ID NO: 882002 - DNA, 590 bp, Homo sapiens
tcctattggtacaatgttcacaattcaggtgaggggtacactatcagcccagactttaccactatgcaatatatcaatgtacaaaaattgcactgtaccccctaaatctatacaaataacaaaaattttaaaaagaaaaaaagtttaaaatgccataagaaagaaataatctaaataaaaacttcaggaatggaggagctgactttgaaacctgcttaaacagactataaagactattttttttatatttagtttttggaactgctttgagagaatagatatatactattttaatttttttatataaaatccttcttaccaagagaaaaaagaacaagacttgatcaggstgaaatatttgatgaagaacattttaaaataagtataaatttaagaaacatcatggaaaaaaacttgcaagtgtactcttttttttctttaaaagaacacaaaatcagcaacagtgaaattctgggaagaccctggaaccagataaaacaatcttattaaacattgaatcatggttaaaaagcagttacccagcaaccaaagacctcatcatttcctcctaatctttcacagtgaatttt

SEQ ID NO: 882003 - DNA, 598 bp, Homo sapiens
cctgtggaagaggccatctctcttttcccttgggtgttgtgacatgtgaaagacagccacagattttcgtttgcctaggacagttccagtttatgcccactgtcctacagtaagtattaattacattacctttcactctccagaattttccaggtaagtgataaattagacagttgccttagaaatatagatataaaacaaaggattgcattggatatttttccagtatgaaaaaagaagaaaaaaagcaatgctaaggaaacagccaagggagaacacagccagggaggcacttagcctgaaatcattctctagctggattactrcagtagatttctattccaatttatttccttacttttgaaatcagtttgaatttggatctctagtatctgcagctaaaggcaacctaactgatatactccgtcacctcaagtgatacgtgataagagcttgatgtgtattcttccacatttctccttggtcatacaacaagtacattctcttacatacatatttcacacaataggtttttgggtttttggttgaagtttgtttttatgagagtgaagttattacacatgtatttaataacata

SEQ ID NO: 882004 - DNA, 622 bp, Homo sapiens
aagctcaagagggaaaaaatgtgtttttcctctttttattcttagtctaccccttcccagtgtgaatagatctttagtgttaatgattaggtttttttataagacatttcaaaatatctttattgctctgcttttgaagcaaattattatgttttcccattctattttcttttttgccggggaaatttagtaccaaggcaatcagacatacartttccttcctttatttctgcttatttatagcacagtctatatcaatgaaataatgctatattattttcttgctgattgcttaatgttcacagttcaaaattccagccaaggtcctgaagtggttttacccttatttaagatttcctgctgaaaacattctattacagctttgcaagtaagtacctccctggcctcaagtcactataaaggtaatttagtaattaaaataaacaccctttgcaaatctgtttcctcccttctgggagactagggaagtagtttccatcatatttcaggtttctccccattttccttaaatgatcagccttcaaccaagaagttacttggtaagttgtctgtaatgtagctccagggcaaacacaaagtgtacattgtgggaaaataaagc

SEQ ID NO: 882005 - DNA, 635 bp, Homo sapiens
aaatttagtaccaaggcaatcagacatacagtttccttcctttatttctgcttatttatagcacagtctatatcaatgaaataatgctatattattttcttgctgattgcttaatgttcacagttcaaaattccagccaaggtcctgaagtggttttacccttatttaagatttcctgctgaaaacattctattacagctttgcaagtaagtacctccctggcctcaagtcactataaaggtaatttagtaattaaaataaacaccctttgcaaatctgtttcctcccttctgggagactagggaagtagtttccatcatatttcaggtttctccccattttccttaaatgatcagccttcaaccaagaagttacttggtaagttgtctgtaatgtagctccagggcaaacacaaagtgtacattgtgggaaaataaagcaaaacaacaacaacaaaacacarataaaaaatgtttctcaacagctagagtccatgagcatagttttataatttgcttcctgctccggtaggaaatttaaatcggttcttgaaactatgtagttattatgattaatcaaaatctatagctgtggtgctctgtctgaagccaggaactcctgtgccccactcccta

SEQ ID NO: 882006 - DNA, 607 bp, Homo sapiens
agatctggtgcacgcccctaaaacaatctttaagacaagggaacatttttttctgataggcttagacttgggatacatgttccaacccatctggtccacacagaccaagtactatttaatgcacttataactaccaccttaaaagtatctatgcacttataactaccacattaaaagtatcttcacaaatatcattgtaatgtcggtgtactatctcattttactgttatatcaacattttatttaacatgcttctcttattagatatttaggctgtgtccaacatttctttttttkttgttgttgttgttgttgagacgaagtctcactctgtcacccaggctggagtgcagtggcgggctctcggctcactgaaagctctgccttctgggttcacaccattctcctgcctcagcctcctgagtagctgggactacaggtgcccgccaccacacccagctaattttttgcattttcagtagagatgggggtttcaccatgttagccaggatggtctcgatctcctgacctcgtgatctacccacctcggcctcccaaagtgctgggattataggtgtgagccaccgcacctggccaacatttctgt

SEQ ID NO: 882007 - DNA, 596 bp, Homo sapiens
ttacacattaagaggtgatttctgtgggaacatggctttatttagccccagtgtatttccagaggccctagaacatggcgtagagcatctgcatgttttccatgccctgaagaagaacaaagaaataattgaaagagatctgaccaagggaaggcctaggaacaagggtgagtgatgtcaaaatagcaactagtgtgaacagggagccaagaacaagttggggttatgtacatttcagtggagcatggagtaacaaagcgccagatcctacccttctgactgctgatgatctgaatgcttgtgttaaaattcacatgttgaatcttaatccccaatgcaacaatattaagaggtggggccttaaagaagtgatgaggtcatgaaggtggagccctcatgaatgggaygagtgcccttataaaagaagctcacaagagatagcccctttcatcatgtgaggacccagcaaaaaggtcccaactatgagaaagtggccctcatcagacactaaatctgttgacgccttgatctgggacgtcacagcctccagaactatgagaaataaacttctgttgcttatgagctacccagtttat

SEQ ID NO: 882008 - DNA, 645 bp, Homo sapiens
cttcttccacaagcatgttcctccctcttattttggactaccagcttcttctagaacctgtggtaagaataacttgttataaaattaattcagaagcatccatttctgaattatttatcacaatatatggcactttaaaatttatcatcttatctttttctctgttttatactgcaacctttttaagtgyaactacattctcttataagtatgtcctcagagttctaacatgaatcagatgaacattaattaaattatgaattaaattagactaggtggttttagacaatttgagacaccatagcagtgatagactttgagtcccattaggattttaatatgcccctttagtcaaaaattgcttctggagctagactgactaaattgaatcctggcttcttcatctacaaggtgtatgaccctggaccacttacttaagctctcatattcctcacactaaattaatgataatgttgcctatttaccgcatacagttggtaagtttaattgagcctatcgtgtagaacatgatgaggggcacactggagatgctgaaaaagtagattattttgtttcgttgaacaatttacatatacatatttaaaatcattttaagattgccctattatctctagttcctcaggt

SEQ ID NO: 882009 - DNA, 654 bp, Homo sapiens
aaacggaatccagcagcacatcaaaaagcttatccaccacaatcaagtcggctgcatctttgggatgaaaggctggttcaacatacacaaatgaataaatgtaattgatcacataaacagaaccaaagacaaaaaccagacaattatttcaatagatgcaaaaatgcctttgataaaattcaccatcccttcatgttaaaaactctcaataaactaggtactgatggaacatattgcaaaataatagagctatttataacaaacccacagcccacatcatattgaataggcaaaagctggaagcattcctttcaaaaactggtacaagacaaggatgtcctcygtaaccacttctattcaacatagtattggaagttctcaccagggctatcaggcaagagaaagaaataaaatgtattcaaataggaagagagtaagtgaagttgtctctgtttgcagatgacatgactttatatttagaaaaccccatcatctcaattcaaaaacttcttgaactgataagcaacttcaccaagttctcaagatattaaatcattgtgcaaaaatcacaaacattcctttacatcaacaatagttaagcagagagccagatcaagaatgaactcccattcacaattgctataaagagaataa

SEQ ID NO: 882010 - DNA, 686 bp, Homo sapiens
gtttgtcataaatggctcttattattatgagatatgttccatcaatacctagtttattgagtgtttttagcatgaaggggtgttgaattttatcgaaggcctttctgcagctattgagataatcatgtgggttttgtcattggttctgtttatgtgatggattatgtttattgatttacataagtagaactagccttgcatcccagmaatgaagccaacttgatcatggtggataagctttttaatgtgcttctgggtttggtttgccagtattttattgaggatttttgcattggtcttcatccggaatattggcctgaaattttcttttttttgttgtgtcgctgccaggttttggtaggatgatgctggcctcataaaatgagttagggaggagtccctctttttctattttttggaatagtttcagaaggaatgatagcagctcctctttgtacctctggtggaatttggctgtgaatctgtctgatcctgggctgcttttggttggtaggctattcattactgcctcaatttcagaacttgttattggtctattcagggattcgacttcttcctggtttagtcttgggagggtttctgtgtccaggaatttatccatttcttctagattttctagtttatttgtgtagaagtgtttattttatcctctgatggtagtttgt

SEQ ID NO: 882011 - DNA, 686 bp, Homo sapiens
gtttgtcataaatggctcttattattatgagatatgttccatcaatacctagtttattgagtgtttttagcatgaaggggtgttgaattttatcgaaggcctttctgcagctattgagataatcatgtgggttttgtcattggttctgtttatgtgatggattatgtttattgatttacataagtagaactagccttgcatcccagaaatgaagccaacttgatcatggtggataagctttttaatgtgcttctgggtttggtttgccagtattttattgaggatttttgcattggtcttcatcmggaatattggcctgaaattttcttttttttgttgtgtcgctgccaggttttggtaggatgatgctggcctcataaaatgagttagggaggagtccctctttttctattttttggaatagtttcagaaggaatgatagcagctcctctttgtacctctggtggaatttggctgtgaatctgtctgatcctgggctgcttttggttggtaggctattcattactgcctcaatttcagaacttgttattggtctattcagggattcgacttcttcctggtttagtcttgggagggtttctgtgtccaggaatttatccatttcttctagattttctagtttatttgtgtagaagtgtttattttatcctctgatggtagtttgt

SEQ ID NO: 882012 - DNA, 480 bp, Homo sapiens
atttccctctacaaactgcttcaaatgtgtcccagagattctggtatgttgtgtcttttttctcattggtttcaaagaacatctttatttctgccttcctttcgttatgtacccagtagtcattcaggagcaggttgttcagtttccatgtagttgaacggttttgagtgagtttcttaatcctgagttctagtttgattgcatggtggtctgagagacagtttgttataatttctgttctttttcatttgctgaggagtgctttacttccaactatgtggtcaattttggattaagtgcaatgtggtgctgagaagartgtatattctgttgatttagggtggagagttctgtagatgtctattaggtccacttggtgcagagctgagttcaattcctggatatccttgttaactttctgtctcattgatctgtctgatcttgacagtgggatgttaaagtctcccattattattgtgt

SEQ ID NO: 882013 - DNA, 638 bp, Homo sapiens
agaaactgcatcaactaacgagcaaaataactagctaacatcataatgacaggatcaaattcacacataaccatattaaacttaaatgtaaatgggctaaatgctccaattaaaagacacaaactggcaaattggataaagaatcaagacccttcrgtgtgctgtattcaggagacccatgtcacttgcagagacacacataggctcaaaataaagggatggaggaagatctagtaggcaaatggaaaacaaagaaaggcagggtttgcaatcctagtctctgataaaacagactttaaaccaacaaagatcaaaagagacaaagaagaccattacataatggtaaagggatcaattcaacaagaagagctaactatcctaaatatatatgcacccaatacaggagcacccagattcataaagcaagtccttagagacctacaaagagacttagactcccacacaaaaataatgggagactttaacatcccactgtcaacattagacagatcaacgagaaagaaagttaataaggatatccaggaattgaacccagctgtgcaccaagcagacctgatagacatctacagaactctccaccctaaatcaacagaatatacattcttctcagcaccaca

SEQ ID NO: 882014 - DNA, 648 bp, Homo sapiens
tctttcaactcagcatgcagttcttttaacaagactctctgccatgcatttttttctttgtgttcaactgatatcacgtggattaatcatgctgctagtctctaagagataacaggaagcagtcgccccccaggaagactctacgtgcatgtagagtccatatggttggaaatttcagagctgaaacctgacaccattttgtgcttaggctacctttggattcacaaaactgggaacagactgaagaagggcagtggaggctttgcaaccgtgacacattctggcaagtcgggtgtaaagtttacacagcagcaatgctcattgactttatacaaaattgtgaggatggagctgctgtcagacaacccacttggcttagagttttcatttatctaacaaatatgttagttacataaagtttaattattaatttttaacagggcacagccactgcctttaaaattttaaatatctgggggaaaaagtgttatatgaccctaggcygattttaaacttttgtgcctcagtttcctcaactactggaaattggaaattacagtaataactatcccatcccgtagtgatgaaaatgaaatgagataatacagattaaatgcctagaacctccttctcagagctgatgtctgg

SEQ ID NO: 882015 - DNA, 549 bp, Homo sapiens
ctgagaatgatggcttccagcttctttcctgtccctgcaaaggacatgatctcattcctttttatggctgtatagtattccatggtgtatatgtgccacattttctttatccagtttatcattgatggatatttgggtgggttccatgcctttgctaatgtaaataatgctgcaacaaacatacgtatgcatgtgtctttatagtagaatgatttatattcctttgggtacatacccagtaatgggattactgggttaaatggtatttctggttctagatccttgaggaatcaccatactgtcttccacaatrgttgaactaatttacattcccaccaacggtgtgaaagccttcctatttctccacagcctcatgagcatctattgtttcttgactttttaataattgccattctgacaggtgtgaaatgatatctcattgttgttttcatttgcatttatctaatgattagtgatcttgagcttttttcatatatttcttggccacataaatgtcttcttttaagaagtgtcttttcatatcttttg

SEQ ID NO: 882016 - DNA, 622 bp, Homo sapiens
ctttttatatttttagtagagacggggtttcgccatgttggtcaggctggtcttgaactcctgacttcaggtggtccgcctgccttggcctcccaaagtgctgggattacaggcgtgagccaccacactcagcccctaatgcccaatttgaagatgattttagacatactcaacactcagaccaacatcagcacaaaatccaagaatatttcagtgtgagaaatatttgtcattaaagatcaaattatcaaatagtcaattcatgctttgtacattttaagtctttatttaaaaaatttaaatattaaatatttgttctatttttcaattttaagtgatatggaggaaattgatgtttctgttaatgttccattcttttgatattttctatcttaaatgtttatataagataaagtttaattttatctgatacagaaatataaaatrttataacatattggcttataatagtgaattatgcatttattgttatatatttacagtaacctctgaaatatttaatatgtacctaacacatgggaaaattttaaaaaatacagtaactattattatggtgactcattattatttaaaaacacatacataaagaacatctcttcaa

SEQ ID NO: 882017 - DNA, 689 bp, Homo sapiens
agttgaagaatggaatctcattatgatgattttcaatatgaaataattcatgatttagcaggtaaatcttgaacttcgaattattaaaatataaaaaggactatttgggggctttaattattttttaattgacaaatagcatgtatttatcctgcatacaacagatgttttgaaatacatatacacattatggaatgactaaatttagctaattaacaaatgcatgatctcatagagttatcatttttgtggtgagaacacttaacatccactctgttagaatttttcaaggaaacaacacaatgtaattactggtccctccttcagttcagtaggaacttactaaacaagaatgasgtgctagttgcaggtatttgatgtttgcacgtactcgaaattatcactttttgaggccacaggtgatacagatattgtaaagaggtaaacaaacttagaggtgttatttagaggtaaacaaacttagacttgcatactgcccatatgatcgtgggcaagatacttaggtgtatttggtctagtttcctcatgcaggaaatggaagtgataccaaagttgcaagaccactgtcaagattaaatggcaacataatcaatgtaacacaggcagcaggatgcctgacacataacagaggctcaatagttgttattattacctttaaacacaaaacc

SEQ ID NO: 882018 - DNA, 689 bp, Homo sapiens
agttgaagaatggaatctcattatgatgattttcaatatgaaataattcatgatttagcaggtaaatcttgaacttcgaattattaaaatataaaaaggactatttgggggctttaattattttttaattgacaaatagcatgtatttatcctgcatacaacagatgttttgaaatacatatacacattatggaatgactaaatttagctaattaacaaatgcatgatctcatagagttatcatttttgtggtgagaacacttaacatccactctgttagaatttttcaaggaaacaacacaatgtaattactggtccctccttcagttcagtaggaacttactaaacaagaatgaggtgctagttgcaggtatttgatgtttgcacgtactcgaaattatcactttttgaggccacaggtgatacagatattgtaaagaggtaaacaaacttagaggtrttatttagaggtaaacaaacttagacttgcatactgcccatatgatcgtgggcaagatacttaggtgtatttggtctagtttcctcatgcaggaaatggaagtgataccaaagttgcaagaccactgtcaagattaaatggcaacataatcaatgtaacacaggcagcaggatgcctgacacataacagaggctcaatagttgttattattacctttaaacacaaaacc

SEQ ID NO: 882019 - DNA, 610 bp, Homo sapiens
agctagtcaatctcgaaaggcttgaatcttgcccgcatatgcatattttaaacttactgaaagtaaaattttgtcacaaactcttctggttatgcacctctttgccttagtacagtgttaaatctggaggaaaacgatcaataaattccccccaaataaagtggcagaatatttatttgtgacaataatttattataaaggttaatgacgttttttactatctggaaggagaaaggtcctgacgaataacatccaaaagaaatgctgtgcagacatttttatttcctacacgttttaaacttgaatttaagttttcctcaaacagtttttagaaaggtccaatttggcatccagcacaaggttatytgagaaataattaagtgaggtggtaaacttgccaaaatatcagtgttcccaagaattttattcctgacttagcaaatagtcttttatttgtgactattcactttttttctctatcttatatctaaatattgtttccaagggagagccagtatgactacaagtaagtaatatgcagattagtgacttctctttcctactcatcaaatctcctactaaaatgagattcaaggattatttttatttt

SEQ ID NO: 882020 - DNA, 693 bp, Homo sapiens
aaaaagacaagatacatgccagaatctctgggatgcagctaaagcagtgttaagagacacatttacaccactaaatgcccacatggaaaagatagaaaggtctcaaatcaacactctaacaacacaattaaaagagctagagaagcaagaggaaacaaaccccaaagttagcagaagacaagaaataaccaagatcatagctgaacttaaggagatmcagacatgaaaaccccttcaaaaaatcaacaaacccaagagtagttttttttgaaaaaaataaataaataaaacaagtaaaccactagctatattaataaagaagaaaagagagaagaatcaaatagacacaataaaattgataaaggggatatcaccactgactccacagaaacacaaacaaccatcagagaatattataaatgcctctatgcaaataaagtaaaatctagaagaaatggataaattcctggacacatacatccttccaagactgaaccaggaagaaattgaatcccagaatagaacaataacaagttctgaagagggagcagtaataaacaacataccaaccaaaaggagcccaggaccagatagatttacagctgaattctaccagaggtacaaagaggagctggaaccatttcttctaaaatgattccaaacaaattaaaaggagaaactccttcctaacta

SEQ ID NO: 882021 - DNA, 693 bp, Homo sapiens
aaaaagacaagatacatgccagaatctctgggatgcagctaaagcagtgttaagagacacatttacaccactaaatgcccacatggaaaagatagaaaggtctcaaatcaacactctaacaacacaattaaaagagctagagaagcaagaggaaacaaaccccaaagttagcagaagacaagaaataaccaagatcatagctgaacttaaggagatccagacatgaaaaccccttcaaaaaatcaacaaacccaagagtagttttttttgaaaaaaataaataaataaaacaagtaaaccactagctatattaataaagaagaaaagagagaagaatcaaatagacacaataaaattgataaaggggatatcaccactgactccacagaaacacaaacaaccatcagrgaatattataaatgcctctatgcaaataaagtaaaatctagaagaaatggataaattcctggacacatacatccttccaagactgaaccaggaagaaattgaatcccagaatagaacaataacaagttctgaagagggagcagtaataaacaacataccaaccaaaaggagcccaggaccagatagatttacagctgaattctaccagaggtacaaagaggagctggaaccatttcttctaaaatgattccaaacaaattaaaaggagaaactccttcctaacta

SEQ ID NO: 882022 - DNA, 608 bp, Homo sapiens
caacagacgtatgaaaacatgctcatcatcactggccatcagagaaatgcaaatcaaaaccacaatgagataccatctcatgccagttagaatggtaatcattaaaaagtcaggaaacaatagatgttggagaagatgtggagaaataggaatgcttttacactgttggtgggagtgtaaattagttcaaccattgtggaagacagtgtggcgattcctcaaggatctagaggactatcacaagggcagaaaaccaaacaccacatgttttcattcataagtgggagttgaacgatgagaacacatgcacacagggcgggraacatcacacactggggccggtcggcaggtgggggactggaggagggatagcattaggagaaatacctgatgtaaatgatgaattgatgggtgcagcaaaccaacatggcacatgtatacctatgtaacaaacctgttgtgtgcatgtaccctagaacttaaagtttaataaaaaaaagaaaaaaaagataatatgtaaaagaagggaaaagatacatgtgtgacaggatgagacagtaaaacatattcctaatttgagaaagataaagtagagtgactagaagaca

SEQ ID NO: 882023 - DNA, 608 bp, Homo sapiens
caacagacgtatgaaaacatgctcatcatcactggccatcagagaaatgcaaatcaaaaccacaatgagataccatctcatgccagttagaatggtaatcattaaaaagtcaggaaacaatagatgttggagaagatgtggagaaataggaatgcttttacactgttggtgggagtgtaaattagttcaaccattgtggaagacagtgtggcgattcctcaaggatctagaggactatcacaagggcagaaaaccaaacaccacatgttttcattcataagtgggagttgaacgatgagaacacatgcacacagggcgggaaacatcacacactggggccggtcggcaggtgggggactggaggagggatagcattaggagaaatacctratgtaaatgatgaattgatgggtgcagcaaaccaacatggcacatgtatacctatgtaacaaacctgttgtgtgcatgtaccctagaacttaaagtttaataaaaaaaagaaaaaaaagataatatgtaaaagaagggaaaagatacatgtgtgacaggatgagacagtaaaacatattcctaatttgagaaagataaagtagagtgactagaagaca

SEQ ID NO: 882024 - DNA, 656 bp, Homo sapiens
gctggagctgaagcagctggggatgcagggctccatgtcctgaggctgcacagagcaggggggtccctgggcccattccacaaaaccatttttccatctaggcctcccaccctgcgatgggaggggctgcagccaagatctctgacatgcccttgaggcattttccccattgtcttggtgattaacatttggctcctggttacttagggaaatttctgcagccagcttgaattcctycctggaaaattggtttttcttttctatcccatcatcaggctgcaaattttccaaacttttatgctctactttgaaacataaattccaattttagatcatctctctcaagttcaaagttccacagatccctagggccggggcaaaattctgacagtctctttgctaaagcatagcaagagtgatccttgctccagttcccaagaagttcctcatctccatctgagaccacttcagcctgggtttcattgtccacatcactatcagcattttggtcaaagccatttaacaagtctctaggaagtttcaaactttccccatctttctgtctttttctgagccctccaacctgtttcaatctctgcctcttacctggttccaaagttggcttccacattttcaagtatctttatagcagtacc

SEQ ID NO: 882025 - DNA, 656 bp, Homo sapiens
gctggagctgaagcagctggggatgcagggctccatgtcctgaggctgcacagagcaggggggtccctgggcccattccacaaaaccatttttccatctaggcctcccaccctgcgatgggaggggctgcagccaagatctctgacatgcccttgaggcattttccccattgtcttggtgattaacatttggctcctggttacttagggaaatttctgcagccagcttgaattcctccctggaaaattggtttttcttttctatcmcatcatcaggctgcaaattttccaaacttttatgctctactttgaaacataaattccaattttagatcatctctctcaagttcaaagttccacagatccctagggccggggcaaaattctgacagtctctttgctaaagcatagcaagagtgatccttgctccagttcccaagaagttcctcatctccatctgagaccacttcagcctgggtttcattgtccacatcactatcagcattttggtcaaagccatttaacaagtctctaggaagtttcaaactttccccatctttctgtctttttctgagccctccaacctgtttcaatctctgcctcttacctggttccaaagttggcttccacattttcaagtatctttatagcagtacc

SEQ ID NO: 882026 - DNA, 692 bp, Homo sapiens
aaaagctgagagagttgattactgctagacctgccttacaagaaatgttaaagtaagttatttaggttaaaacagaaggatattaattagtaacatgaaaacatataaaaggttacagctcattggtaaagttacgtatatagtcaaattcagaatattctaatactgtaatggtggtacataaatatcttaaatttagtgtaaaaatgaaaaaacaaaagtattaaacataactacagctatagtaacttgttaatggttacacaatatacaagatataaattgtgacatcaataaartctggggagtatggagaaatacaagtgtagagtttatctatgcaattgaagttaagttgttataggcttaaaatagacaaatataagatgtttatgtaaccacacacgcaaaaacaaatgaaaaacaataaaaacaatcttgcaacagatacacaaaataagaaaagaaatcaatgtataccactatttaaaaaaaatcgaatcacatagaaagaacaggaagaagaaacaagggaagtataaaagagaaaataattgataaaatggcaatagtaagtccttacctaccaataattactttaaatataaatgggtcaaattctccaatcaaaagaaatagcatggatgaacagataaaaaaacaacaatatccaacactaggctacctataag

SEQ ID NO: 882027 - DNA, 692 bp, Homo sapiens
aaaagctgagagagttgattactgctagacctgccttacaagaaatgttaaagtaagttatttaggttaaaacagaaggatattaattagtaacatgaaaacatataaaaggttacagctcattggtaaagttacgtatatagtcaaattcagaatattctaatactgtaatggtggtacataaatatcttaaatttagtgtaaaaatgaaaaaacaaaagtattaaacataactacagctatagtaacttgttaatggttacacaatatacaagatataaattgtgacatcaataaagtctggggagtatggagaaatacaagtgtagagtttatctatgcaattgaagttaagttgttataggcttaaaatagacaaatataagatgtttatgtaaccacacacgcaaaaacaaatgaaaaacaataaaaacaatcttgcaacagatacacaaaataagaaaagaaatcaatgtataccactatttaaaaaaaatcraatcacatagaaagaacaggaagaagaaacaagggaagtataaaagagaaaataattgataaaatggcaatagtaagtccttacctaccaataattactttaaatataaatgggtcaaattctccaatcaaaagaaatagcatggatgaacagataaaaaaacaacaatatccaacactaggctacctataag

SEQ ID NO: 882028 - DNA, 618 bp, Homo sapiens
cattgattcactccagaaaggtgggacaacttgaaacaggggagctcccatgtcataggtgcattcaaagattttctgattggcaattggttgaaagagttaagttattatccaaagacctggaatcaatatgaaagtgtgtctggattaagataaggagttttagagaccaagattcttatcatgtagatgaagccttcaggtagcakgcttcagagacaatcatagtaaatgtcccttaccagacttaagaaggtgctagactcttagtctttcctggatcaggaaaagacccggaaagggaagaggcttctctatagaatgtagattttccccacaagagacagctttgcagaaccatttcaaaatatgccaaagaaatctattttggggtaaaatactttgatttctttcaggacctgctatctgtcatgtgatgctatagtagagtcaggttggactttggtatctcattgctacaaagagtctgttttgttagtcttaagatctctgttttaacgtgaatgctggtcagttgtgcctggattccaaagaaaggggagtgtaatgaggcctgtctcacctccctttccatcatggtctgcgctagtttttcag

SEQ ID NO: 882029 - DNA, 565 bp, Homo sapiens
ttacaattacaaatagattttttgtttgattgccttctgaaataactttcttttattaaaaaacccattgctgtggattcttcaataacaattcaaaaaatcttagtagaaaattgaaattatatttctctgtatttataccaccccagaaataaaacagctaggttaagaamacattgagagacatgtaataatttcctctaactggaaatgttaactcaaatgcacataggcaaataatcacctcagccctgaacatacagaggtattggtggaattaagaccataggccctcaatgagcaacagagttttgtcagaaccgatgctaaagtatattcaatcatcatcagtgcccttggtcaaaagaaaaaaataagtaaatctaaaacagtcacaaaagaagcaacctttgcttcatttactggggtgactaactccccttggaaataattggtaaggcagctggataaaaacatagctccaggaccctgctcctaagaaatatacctgcggcttttactatgaaaccaagaaatatctgttactctatgctctatctgtaat

SEQ ID NO: 882030 - DNA, 672 bp, Homo sapiens
tttgggaggctgaggtgggtggatcacaaggtcaagagatcgagaccatcctggtcaacatggtgaaaccccgtctctactgaaaatacaaaaattagttgggcgtggtggcatgcgcctgtagtctcagctactcaggaggctgaggcaggagaatcacttgaacctgggagtctgatgttgcartgagccgagtcatgccactgtgctccagcctggtgacagagcgagacttcgtctccaaaaaacaaaaaaggatactcagtgagtacttgttaggtgaatgcatgaatgtcaggaaagcctaatcgccattactcattctattgctatatataaggcaatgataatttatttggctcatccagaaagctttagcaagactgataacaacccccagggaagaactcatgaactccatactgcccaacagaatctttttcttggcttctccttcttttttgtcactcctccacttttgcttttctccaccctatgctacctcctaataaaattccttgcttgaattctgtccaatgcaaggctcacaaaaataagttaaacagatctttccagacaactagtggtttctactatcctggaatttcactgcaatacagtacatttctatcacgctaccttttaatgaaatctttaccctgaatactcaaa

SEQ ID NO: 882031 - DNA, 646 bp, Homo sapiens
tgaccatttcataagtgttagcaagtggatgggcatcaaggaatatggaatggcattagagacctcctgtgatttttaaaattgcaatttagaaaaagagtgctctggagtgaggtggtcagtgctgatatgaagaatgaataagctgttcaagaagagaaattgagtgggcattttagttgagggaaatttcttggaaatgcaatactcaagggaagagtacgtttggtcaaaacgtagaatttgtgtcagcaggtagtggataatgatgctggaaatgtaggttggcgatcacatttacygtaaagagtttttagtgttaagcttctttattttgacattatttcataaaatacatcagttattggaggctttagtctaacaagatgaaagcttaacagtaagctttttcactttttgccagtgttcaggaaccagcataagcctggctgttggtcaggtgaagggaatccttgtggtagccagacactctgtagatactgatttaaagtatatgcacccttgaaattttctcaaaaagtcacccataaatacctgtcaggtatattcactgcttgtaataatttttataatagttgagtgagtccatgattgggtagaaatgaagggaaaatttaagatgttt

SEQ ID NO: 882032 - DNA, 607 bp, Homo sapiens
tggattagctaggaaatgtgtatttacatcagtctagtctttttgctggtcttcagaatctgtcttcaatgttgagattcaaagaaaaagaatatcaattatgtattcaagacacctaaaaatattgagcaatttctacaatgatctttcctagcatctgcgactcactttatttttttttaattttgctttggattggtctagtccagtaaaatgggagtcctcattcccagacttctatagtrtttaagccaaactctgaaatggattttcacccatatcaaataatgtagctggaatttatgtagggtaaactgtatcaatttaaagtatgcaattctaggagttttcgcagttgtatatgcctatgaaaccaccaccacaaccagggcagactattttcatcatatccaaaatattccttatccttctttgtatataatctcttcttctggcagttttcactctaggcaatcactgatttcctggtctttcttgggtaaatcaaaagttaaaccgagaaagaaaaccaaaatggagtcaactgaatgtctctctactggaaaatgtgtttctatttgttctagttttctgacattgatcgcct

SEQ ID NO: 882033 - DNA, 605 bp, Homo sapiens
actccagacctgcctgaggttctccatcacttgctccaccactagggcagccccagtgaccacaggacccagactgtttcagtgccagacccaaccctataaccccaggcttcaggcctactccagtgccagattggcacctgaagaccacagcaccaggccgtccaccatggccttgggcaccattccaacaccagcagacccagtatccaggctggccctacagatacaggctctaagcccaccaactgcaggccagtttcccccrtggccacaagcaccaggctggtacccatggacccaacctgcagggtgttccctgtggacacaggccacaggcccactcagtgccaggatggcccctgtgatctggcacagtgagaactctagggccttcagtcacatcaacaagcacgaaccgcctgtgttctacaggagcactaagaagtcacgaatgacccagctcctcttccaaagtgcccttctgaattgctatgccaacaaaatggagaagtactgtttggggaataatatacctttcaagatcttgcttgctgcgaataacactcctgcacatcctcttatttctcaccccaatatcttat

SEQ ID NO: 882034 - DNA, 567 bp, Homo sapiens
agccaggtgtggtagcatgtgcctgtagtcccatccacttgggaggctgaacaggaggattgcttgagcccaggagttcgaagctgtagtgtgcaatgatcatgcccgtgaatagctactgcacatcagcctgagcaacagagcgaaaccgtcccatcattagacaaaacaaaacaaaacgaacaaacaaaaatttatttctttctttcctagctttgttgatatattgatataaaagaacgtgaatataattaatgtacataatttgatgagtttggacatatgcgtacatttatgctaccatcaccacagtcaaggtaataaagatatctatcatctccgacagtttccttgtakctcttcgtgattttttcttttttctttttgtagtaagaacaattaacatgagatctacactcttgacgaattgttaagtacacaataccttatgtttaactagagatactatgctgtaacaatgagaatgaaaaggcaacctatggagtgggagaaaatatttgcaaaccgtatatttaataaggggttaattaccaaaaaatttaagga

SEQ ID NO: 882035 - DNA, 606 bp, Homo sapiens
gccataaacagatgtttatctttttgacatagagaacacagaaattttggataatttcattgttaagaggtggcattggccaatgttggtatcattaaaacagattgtagatgcctaataaattgcatgcgaatttactttttctgaaactaaggtcaactctttatgtcttattagctttcaatgttttcagaaagaaagaacagttagagaaaattasaacagggatattaaaatggtttttcacttgattttccaacatcttagaaaaaagacctaggctttgtgcagaccagtgtaaaaaattatgccttgtctggacataattaagccaggaaaatgaacactttccacttagtatttatttgtaaattcataatcaaaaaggtaatagttatcattcctaacttcttcaaagatacaggggatgaaaaaagacttttataataacctctttagaatagatttttatgtgaaggaagtgcagaatcaccagtgtttttttgtcagcatacctctgggagttacactgggattaagtctcctctaatcaccaattgttagctgacaaggtggactttgaactagtgcgttcaaacatggggt

SEQ ID NO: 882036 - DNA, 636 bp, Homo sapiens
attctgaacttccaggccccgatcaatgaatacatctgaaggctatgaatactataacaaaaagcaggagatgacatatgacctaagatgtgtgccaaatgtttggggaacttagacattgggacaatcccatctaactgaaggattcataataaaattcacaaaaggagatcttaactgaattgtgtgttgaaggttgagctgagattgggagtggatttatagaaagaaggaaatyctgagataactgagagggagttaagtccaggatatgtttagggtgtagggaatgatccacgtgttaggcggctttcaagatgacccgcaatgatccccacttcctaatatttacactagtgtgttgtcacctcccattcagtgtgggatgaccccccacccaagtaacttgcctctaatgaacagaataaggcaaaagagatgagatgttatttccatgattagattacaaaagaatgacttctatcttgctgtgttctttctattgccgtcttggcttgcaaaccttgatgaagtaagcaaactaccatgctggaaaggccatgtgccaaggaactgaagactgccttcagtcaacagcaagtaagaaactgaggcttgtattccaacaaccagcga

SEQ ID NO: 882037 - DNA, 636 bp, Homo sapiens
attctgaacttccaggccccgatcaatgaatacatctgaaggctatgaatactataacaaaaagcaggagatgacatatgacctaagatgtgtgccaaatgtttggggaacttagacattgggacaatcccatctaactgaaggattcataataaaattcacaaaaggagatcttaactgaattgtgtgttgaaggttgagctgagattgggagtggatttatagaaagaaggaaatcctgagataactgagagggagttaagtccaggatatgtttagggtgtagggaatgatccacgtgttaggcggctttcaagatgacccgcaatgatccccacttcctaatatttacactagtgtgttgtcacctcccattcagtgtgggatgaccccccmcccaagtaacttgcctctaatgaacagaataaggcaaaagagatgagatgttatttccatgattagattacaaaagaatgacttctatcttgctgtgttctttctattgccgtcttggcttgcaaaccttgatgaagtaagcaaactaccatgctggaaaggccatgtgccaaggaactgaagactgccttcagtcaacagcaagtaagaaactgaggcttgtattccaacaaccagcga

SEQ ID NO: 882038 - DNA, 636 bp, Homo sapiens
attctgaacttccaggccccgatcaatgaatacatctgaaggctatgaatactataacaaaaagcaggagatgacatatgacctaagatgtgtgccaaatgtttggggaacttagacattgggacaatcccatctaactgaaggattcataataaaattcacaaaaggagatcttaactgaattgtgtgttgaaggttgagctgagattgggagtggatttatagaaagaaggaaatcctgagataactgagagggagttaagtccaggatatgtttagggtgtagggaatgatccacgtgttaggcggctttcaagatgacccgcaatgatccccacttcctaatatttacactagtgtgttgtcacctcccattcagtgtgggatgaccccccasccaagtaacttgcctctaatgaacagaataaggcaaaagagatgagatgttatttccatgattagattacaaaagaatgacttctatcttgctgtgttctttctattgccgtcttggcttgcaaaccttgatgaagtaagcaaactaccatgctggaaaggccatgtgccaaggaactgaagactgccttcagtcaacagcaagtaagaaactgaggcttgtattccaacaaccagcga

SEQ ID NO: 882039 - DNA, 585 bp, Homo sapiens
ttggaataacaagtgatttttcatttgatattggtattatggatattatataaggagaccctggaacatttttaaaccttttgttttagctggctttctctggtagcactttagcagggaaagggagacaccagcttctttctacaaggtatgaataaaaatacaacttccccactcagcctctgttgacacctaaggggtagggattttgattactgctgcatggagaagggagattcagagccctgctaggtcttctccatggataactaactgtattagcctgttttcatgctgctgatgaagacatacctgagactgggtaatttataaagaaaaacaggtttaatggacttacagttccacatgattggggaggcctcacaatcatggcagatggcaaaggcacatcttacatggcagcagacaaragagaatgagagccaagtaaaaggggaaaccccttttcaaaccatcagaccttgtgaggcttattcactaccactagaacagtttgggggaaactgccccatgattcagttatctcccaccaggtttctcccacaacacgtgagaatgatggga

SEQ ID NO: 882040 - DNA, 608 bp, Homo sapiens
gcagccaaagaaacacaccactttgcatttatcattttatgatcctatctttgcattgccatttgagagcctagttctgtgacatctctagccatagtttgtaagggagagcccccaatgcactcttcatgatatgaatggtcttttgtcactcatgtattctttactgctttggtaaatggaatatctcagaacattggcattaggtgagtttttaggctttacaaaatatacccactcctgcatgctgcttctccgagcccttgtttccttctgctaccatagcaattttgacgtttctacttcatttatggtaggctgttgcttcctccaagcacactaacacttttcccaagggtccttgacaggatattacattctgtattccaggacaatgatcccacatcaacatatttttcytcattcaactttatgttctgtcccttttgatccagcacccctagaatctactacgactcctagttttttctggtccatgttgactagatcctacacctcctttggtgtcctttatcccccttgtcaggtctaacacttctccagccaggttatgttgtgattttaaccctaattattgctctgaagga

SEQ ID NO: 882041 - DNA, 623 bp, Homo sapiens
gtaaaatttgcctcagttggttattcgaatctgataatctgatcatcatgtctttaacagctttcagctctgacctacaagtcatgtctggattcttttatagcttttgaatccaaacaagctcctgaccttgctaactatagcccagcaccaggagatttctgacagtataaaattcaaggccgaatcttaagactatgtaatgaaattgataaccataaattccaagctgggctcaggacaacaggacttggcatttctggccattacttccaaagcaaatcatatctgtatatgaaatacaacaaagtctgctagtccgaaagcatgttaaatatggcttgttatgttcagcctttccacactgctcttataaacaggagttggactgtttccatcagactctgaccaagtaaacttaaatgtaatgatgttacagtctgagtctttttgttttttaagaaaagcaacrtaagcaacaaaagcttccctgcctttttcccgcggttgctcccactccatctctcgcttccattttctttcagaacactctgaaactctcaagcattttctataagagaacttgcagttctccatagggatcaggagaggcatagatgatt

SEQ ID NO: 882042 - DNA, 524 bp, Homo sapiens
ttagggccaaagtcaggaaaaattataaaatggacaaaggttatgtattacttctttaagtctagtttgttgttgttgagtttctaatattcatctttattaattttatcagcaacgcacacatgaaacattatggatcagagacagatttcttatgaattacctcacagtaaataataagtgcattggtcttcttgcctcaggacttatccctgggacacagtgatgaaaaccaagtcaaataccctrtgtgagtagccagacactccataggttagaaatgaggcaaaaggatttttctgtgcttataaaaggtagagaggcagctgccccttccctcctaaacaggtttccttggaagtgtaaaggtcttgagtcctaactcaaaccctttggtgtggaaataaaatgtgtccaggagccagataggtccaggtgtctccaacctagagatgtctctaagttctggtcttcctctcctttgatgtgtaaatatgtagaaaggtcatgtttcctgttttcag

SEQ ID NO: 882043 - DNA, 601 bp, Homo sapiens
gggctggacctgtgagggaatgccatcatgaacttcgtaacgtctacaggtgagcccagcctctaagctttgcttctctttttgctttgcttctctttttgctttgcttcccttgtatcaataaatgggagcccacctaggaaaatgcaattgcacaaaakaatctatttattatttatactttacctctttccataaaggatattaaactaaaatgtaaatgaaagcacattagacaccataacttccaaacaaatgttaattattattttcaaggtactaattattttgaggaaaccctgtaactttctacgattctatgaatgaaatgggcatttttgtgtgctctgacaaccagaaaaaaacctgcgtggaagaagagagagttccgtggctatgttcctgtaagggaatctatcttcaggctgccactgtcagagctgaaaatgcacactggcaacacatttctaagtcactgagaggaacccagcatttgcccaggagacgtttttgagcaagcctcttttggatgagcatttgaacgggcagaatggtattccggcaaggcattcatcagcaaggtcttctattcttacaagct

SEQ ID NO: 882044 - DNA, 597 bp, Homo sapiens
gtttttcccaccggagcctgatccccagcttatgcctggaggcctccagcgcctggagcttgctttctctcgactgagcctcctctctctgttaggaaatttcctccctaggaccaacagaaggggccccaaggtcacttttcccatccaccttagcagtacccttggggccaaatctaattcctcctccacccaccagcaaggatgtaaagaacgtatgtcttcccaagtctttctgcaggtggagcaccccagtttcttakccaccttccctctaagcccctggtgtgaggctggagcttacacataaagactccccaggtggtcctgccactcagagggcacagccatgccctccctccacaggcagcttctgggaatgctgcctgcaatccccctccctttcctggagtattttagcatttcacctccattctgtcatccagtcttcgtaaaaaccctctgaagtaggcagggctgctatcattggattcatttttcagatggggaaagctgaggttatacacaaactgcagttcaactccagggcttttggtgacaagcctgaagagcccaggagactttagggtttgcatc

SEQ ID NO: 882045 - DNA, 656 bp, Homo sapiens
atttaattctcttgcctcagtcagctcaggtgtaaaactgggtgaaaactatcactgatggtccacatgagtggtttgattaaagatgtccaagcaaattaagtgagattaaatttaaagtgccttctgagactgaaatgaactcaaactaaacacttcataaagttgttgaagtctatctatagttatcagaaaattactctatttcttttgaaagttccatgaaactttaataggataaagcaaatttatagcaggtaatttgtttccaaaaagatgctccgcctccatttttctctaggaaaatttagatcctatggacttaaatatcattgcaaatctattcagacttgcaagcccttattgggttcccctgtgatctrggtttcttcctatcctcctcctcctcctgcccctcttcctcctcctattcctctccctcctccacctctttcttcttcttctccttatcctcttatccttctctttcttcctctccttcttcttctcctccttcaccttcttctgctcctccttcacctttgtctgctcctcctccttcacttccttctacacctcactctcctactccatttgctaccactgtatttttaactggaatgttttaatggatataggttgcccataaaaagttt

SEQ ID NO: 882046 - DNA, 555 bp, Homo sapiens
aattcgattttctattcatctactgggtgtttgcaggaggtagaactctgtgtttatctcacacaattgtcgtgtctcagcacatgtggcagcctgatattcaaagaaacaatggttagtgataatgaaacactagtgaacccatatttttgcaatgaagtaaagtttataagtcatttgtaatcagcaattctaacgtactttgaatatgaagttcatgaataacccataggttcattgggaaactgtattatggggcaatcatgttacaatttctgttagtaaaactactctgtaatcaattccatagaygtgaggactgcaaaacaaatgatctaaaaccactttataaatgtacaaaaatgaattaactgaaatgtattcttttaacttgaagtgactcatgcaaatgtgaaaatgaacacacactattaaatgagaacacaggctatttattcagaatttgctatatcaagacaattagccaccataattcgcatttgacagagttttaaaggctgacagagttttaaatacagacagagcagtggaaaa

SEQ ID NO: 882047 - DNA, 665 bp, Homo sapiens
ttgaattcctgcgttattcttatatgagtaataataaatacatgtatgttaatcacatttttatactacaattttgtatctcacttggttttttaaattatcattatcccatgttaatcgtaagtcattttgtaatacagacaatagctgcctgaatgcttcaacatcttccagtctgcagtgttcttcttaactattaacatctacacctgctaccaatcattaactctaagccttaaggcagcatctctttttagcttactttttgcatgcgggtaccatctctcttccttcagcatagctctatgattacacakgttgacaccaaagtcagagagccagataccaacttgctcatccaccaccgactagctgtgtgatttgcgataagtcacttacactccctaagcctccatatttttccctccgtgaaatgggtgtgaatccagactaaaaggtaaaatgcacaagtgtatagcatagtgcttagcacagagtaggtcatgggcttgcattgacttgtaaaagtagaaagtcaggaaaaatagcaggataaattatattgataatggtagttataataacatttctccaaacactattaacacaagattcttgagtatagtggactttatttaaagtctgaagataaatttacagcataa

SEQ ID NO: 882048 - DNA, 694 bp, Homo sapiens
taactgtataccaaaatatttatagttctaatttcatagtgtgtcttgagtcatctaacttaatcacattgcttcctttaaaatttcccaagtataaaaactagatatagctgtagatgcagatattagttgccctgcagacaaaattctagagcctggagcaataaaaactagaaagcagagtaccttctgcaacgttggcttattgggggcgggatgcgctctaggtttcacaggtacagataccattaatttcccatcacccaacagaggtctaagggagaggaatagaagtctgtaatactacaaaccactctcatagatctcacaccaatccttcctctaccccttatgatccaccacaaaacacacatacattctcaaaaataaaaagaaaaaattacacacacacacacacacacacacacacacatcagtcctataggattagtatctcacccttaagatctcattaaccttagttactttccttaragacctggtctccaaatacagttacattggaggttagtgcatatgaatttgggaaggaagaacacaattcagttcataacaatagaacagtgttcagaaagcaggatacaaattatgtttgctctgtgactacagttacatgaaacatatgcataggaaaaaggagtaaggaaggaaatgcataaaagggggaaaatta

SEQ ID NO: 882049 - DNA, 570 bp, Homo sapiens
tgcccaggctggagtgcagtggtgtgacctcggctcactgcaacctccgcctcccgggttcaagctattctcctgcctcatcctcctaagtagctgggactacaggcatgtgccactacacccagctatttttttttttatagtagagacggggtttcaccatgttggccaggctggtctggaactcctgacctcaggcgatctgctcacytcggccacccaaagtgctgggattacaggtgtgagccactgtgcttggctagaggaaaaaaattaagtgttcaagggaaataatgccatttgataaatttataactgcagaaattatcattgaatagtgcaagcattataaaagcgtttttagaaaacaaacagtaagagaattcatcacacacatatgcttgctaaaataacaagaaacggatttacctaaggaaacagaaaattaacccagattggagtgagctgaaataagcaatgaactattaaattgtaaaaactataagtaaaattaagaattgactgcataagtaacaataataattgattttttgtttgcaagtatagtat

SEQ ID NO: 882050 - DNA, 699 bp, Homo sapiens
aggcagcctagaattttaaaaaattactctcttctccttgggggaaggcctgaagacttgtatttgttgtgaagcctgaagaaaaaagcgccaccagttctcagggctcctctccactgtgactgggagctttgatgtgcccttttgatgttcctgccttgaggcagctggagaagattatcaaaagtagccttaacagttcagggtggagttgggggtgcagcaccataacacgtgggactgcacatccctcacagtaactcactgagatggggttgccgtagtgcaggtgggattgccaggtgccaggtgcccctactgcagcctgcacggaggggaccgtcattttcagactgtccttttagcaggacttcaatgtcaggtaataaytgactcatttgctattttcttttggtatcataaccactattattttttttttaaatcatgagatgtaattgtaagtagaaaatgacttcaattcaccttccaaagggattgtagttttctcctaagaatcagaaagctcaattttgaaaagattctcttgtggcaaaagggtctttgaaatgtaaacaaacaatccccttttattttagggacaagaaaacagagatctggtatgtcagtttaagattcttagcatatgctgattgattgtggttagactatgactaacttaagaagaaaggaatttac

SEQ ID NO: 882051 - DNA, 424 bp, Homo sapiens
aaatgctgccagtctctttgctaaagcatagaaagagtcacctatgctccagttcccaacagttcctcatctccattttagaccaccttagcctggatttcattgtccatatcattatcagcattttggttgaaaccattcaacaagtctccaggaagtttcaaactttcccacatcttcctgtcttctgagttctccaattctctaggaagttccaaactttcccacatttttatgtcctcttctgagccctccaaactcttccaayctctgcctgttacccagttccaaagttgcttccatcgttatagccatgccctactccttcagcaccaatttactgtattagtccattctcaaactgctagtaaagacatacgagagactgggtaatttataaaggaaagaggtttaattgactcac

SEQ ID NO: 882052 - DNA, 540 bp, Homo sapiens
tgctgccagtctctttgctaaagcatagaaagagtcacctatgctccagttcccaacagttcctcatctccattttagaccaccttagcctggatttcattgtccatatcattatcagcattttggttgaaaccattcaacaagtctccaggaagtttcaaactttcccacatcttcctgtcttctgagttctccaattctctaggaagttccaaactttcccacatttttatgtcctcttctgagccctccaaactcttccaacctctgcctgttacccagttccaaagttgcttccatcgttatagccatgccctactccttcrgcaccaatttactgtattagtccattctcaaactgctagtaaagacatacgagagactgggtaatttataaaggaaagaggtttaattgactcacagttcggcatggggaaggaggcctcaggaaacttacaatcacggtggaaggggaagcaaacatatttttcttcacgtggcagcagaaaggagaagtgctgaacaaaggggggaaagccc

SEQ ID NO: 882053 - DNA, 677 bp, Homo sapiens
taaatttcctgagacctcccagtcatgcttcctgttaagcctgcagaactatgagctgattaaacattttttccttcataaattaccaatctcagatagttctttatagcagtgtgagaatggactaatacaaatttcttctggtgctctttagttcaggacttgtctcaggcaattgcctgtgggcaagccatctgggaccccagcatgggagctgtggccccaggctgcccccacttgccattggtacggattctccctcatgatgacaggtgaagccagctggaattcctgggtcaagtggggacttggagaacttttctgtctagctagaggattataaatgcaccaatcagcactctgtgtctagctaaaggattgtaaatgcgccagtcagcaccctgtaacattgcaccaatcagcactctgtatctagctagaggattgtaaatgcacctatcarcactctgtaaaatggaccaattagccctctgtaaaatggaccaatcagcaggacatgggcagggacaaataaggggataaaagctggccactccagccagcagtgacaacccgcttgggtccccttccatgctgtggaagctttgttctttagctcttcacagtaaatcttgctgctgctcactctttgggtccatgccatctttaagagctgt

SEQ ID NO: 882054 - DNA, 607 bp, Homo sapiens
atatacttacccttttctacttggttttctacactgtcatgcccatctttgagtggtgttttcactttaaccttttttgcatactcacaaatgaatcagcatgcactctccatcctatgcctataaagaccccagactcagtaagtggagggaaagatgacctgactttggggaagagacaacctgactttgggaaatacgacctgtctttcctgtcccctctctatctccctttttcactgagagctgtttttattgctcaaaatttctccaccttaagcatccttcaacaatccatgtgatctcattcttcttggattccagataagagctcargacccactgagtgtgggtacccagaaatgctgtcacaccagccctttgcccttgtgggtgaaggtaagctgcccaatgcaatgaggcaaggggccaactgagctgctaacacaatcttgtctgtggataaaggaactaaagaagcaatgtcacacactctctggggattcagggtcatgggcatcctcacattggcatcactccactcctcttgaggtgacacacatggtctggctgtggtccccacacagagcttgctccagtgtcagtg

SEQ ID NO: 882055 - DNA, 609 bp, Homo sapiens
agctgtggtttcaggccaagagtttgtgtgctcaaacttgcaaagctcatgcctgcagccttggaagagaagactctattcaatgcgtggattcagtcaagtctaacagacccaattttctcacccagccttgaaggttctctctactcttctaccaccttcaaggtacactgatgttcctgaccttcttttttcttcaaaccacatataaggctttttagtctccactggatgcacttaaggaaagtagataaactgtatcttaatacagagcaargtctgctgatgtagaagatcaaataacacatttcatgaacttgaaatggcagatggacgaattataattatttgatgcctgagcaggggtcctgccgtaaagacttctgtggaattcaataatatgaaagaatatcagatcctggtaaggggtgcttacagcctaagtagagaaacaaaacataaagacacgtgaggaacaatcgcagagctcacgtaaacctaggcagaattatgcagcacatactggaaaaggacagactgaagctgaatttagctctattctccttaactgccattttgagcattcactgtgagccaggcacagtgcta

SEQ ID NO: 882056 - DNA, 604 bp, Homo sapiens
tgtgacagctgcagtatttggtaatagggttataaaaatgaataagctgtggtcttgaagtatgcattttggtgaagaccgatgtgaaaacaaaacaaaattataaaatgggcatgggccttagaaaatgtttgtaaaaagcattctgggagcagatgagatgagtgaatatttgcctgggagaggagctaggttctcaaccctctgagctagggtttgaagcatgagtttcttgctgacttcccaagtgcagaaggggaaaggggtttccaagcagagtagggcaaagtccatgttgttatgtgggaacaggaaggggctcagcttgttgtgcatcatggacaatgacacaaagtatgcacaaggaatccaggcttttagatgcagagttgctcaagttgttgtcttaaagcagatcattgtaaagcggaaacmtaatagcaggtgtactatatcttgactgcacatgcagcatcactttcatacttttactcaacagcagaaggagggcgaagtgtagataaaggtattaagaagttacatggaggtctttatgagacaacatcaaacgaacagagctgtaaaatgcagatgagaggaaagt

SEQ ID NO: 882057 - DNA, 599 bp, Homo sapiens
agaaataacatttgacccagcaatcccattactgaatatatacccaaaggaatataaatccttctattataaagacacatgcatgtgtctgttcattgcagcgctattcacaatagcaaagacatggaatcaacccaattgcccattaatgatagaactggataaagaaaatgtggcacatagtataccatggaatactatgcagccataaaaaggtacaaggtcgtgtcctttgcagggacatggatggagctggaagccattatcctcagcgaactaatgcatgaacagaaaaccaaacaccacatgttctcacttataaatgggagctgaatgaagagaacttacggacacatggtgaggaacaacacacactggggcctgtcgggtggagatggagagggagagcatcaggargaacagctaatgggtgctgggcttaatacataggtgatgggttgatctgtgcagcaaatcatcatgacacacgtttatctatgtaacaaaccagcacatcccacacaggtaccctagaagttaaaatatatgttgacaaatttaaaacaggaaaaaaaagttttacactattccattgtatg

SEQ ID NO: 882058 - DNA, 649 bp, Homo sapiens
caggaagcaggccaatgagagaagggagtggacaggggagttgagagagttaaagaggtaacaaaataagaagctgagatgtgaagcctaagggatctccatcagattggatgggacaataataaagtcatttctaatgatttgccaagttacaaagcagaagatgaagtcatggaaagctgctgagatatcagggagctaaaatgtcccatgttttaaagaaaaacccattctctaccagacttttttatttctgtacygattttaaatttagctatgagaataaaactaaagaaaactgacttcagggaaggtcaggaactcagctgttaaaaagcctttctaaggaagatatgcaatattttccagctgtgcttagactaaattcattaggtttgtccacggtgaatgatgagctctaacagtcactcacagctctgtgatgctgcaagtcatctacccctctgctgctttcctggtctccatcttattctgccttgatttttttttttttaataaacccatcatcccattcagcctgatttctactgcaggctgagttctgcaatgagttctcagcccacaatgaaattttcatcagctgagtcattgtagttgaatagacatagtcccgtccccaggaagagga

SEQ ID NO: 882059 - DNA, 552 bp, Homo sapiens
ccttctggatggcacagctctgtagagtgttttgttctccatcccagtttctttcactagataaccttggcaatacatattcattgaaatgggattttaaaaactcaaaaacaaaaacagaaatgcatgcttagctgagattggttttgcctttcaattttgcatcacaaggcctgatgcaagtggctctctctgcttactttcagtaaagaaragactctgcggatggctcttaggaatgcccttgtttttgttcccatcagctacttaactaaatgtgtgtttccacttcccaggcaatgagtgggtggatgtctcaaggcaaactctacccattgctttaaaaaaaaaaaaaaaaaaaaaaaaaaaaagaaagcatccgtggctcttccaattgagagcatcccaggagcaaattctgttttatacctttctttctgttgcagttttacaattattatgctgttaacatgcattattcaaataattttttttggtactaatccttgaactactctctgagctggctattattttccctgttttaagatg

SEQ ID NO: 882060 - DNA, 545 bp, Homo sapiens
taaagccttcaggttaattccaagccttctggatggcacagctctgtagagtgttttgttctccatcccagtttctttcactagataaccttggcaatacatattcattgaaatgggattttaaaaactcaaaaacaaaaacagaaatgcatgcttagctgagattggttttgcctttcaattttgcatcacaaggcctgatgcaagtggctctctctgcttactttcagtaaagaagagactctgcggatggctyttaggaatgcccttgtttttgttcccatcagctacttaactaaatgtgtgtttccacttcccaggcaatgagtgggtggatgtctcaaggcaaactctacccattgctttaaaaaaaaaaaaaaaaaaaaaaaaaaaaagaaagcatccgtggctcttccaattgagagcatcccaggagcaaattctgttttatacctttctttctgttgcagttttacaattattatgctgttaacatgcattattcaaataattttttttggtactaatccttgaactactctctg

SEQ ID NO: 882061 - DNA, 545 bp, Homo sapiens
taaagccttcaggttaattccaagccttctggatggcacagctctgtagagtgttttgttctccatcccagtttctttcactagataaccttggcaatacatattcattgaaatgggattttaaaaactcaaaaacaaaaacagaaatgcatgcttagctgagattggttttgcctttcaattttgcatcacaaggcctgatgcaagtggctctctctgcttactttcagtaaagaagagactctgcggatggctcttaggaatgcccttgtttttgttcccatcagctacttaactaaatgtgtgtttccacttcccaggcaatgagtgggtggatgtytcaaggcaaactctacccattgctttaaaaaaaaaaaaaaaaaaaaaaaaaaaaagaaagcatccgtggctcttccaattgagagcatcccaggagcaaattctgttttatacctttctttctgttgcagttttacaattattatgctgttaacatgcattattcaaataattttttttggtactaatccttgaactactctctg

SEQ ID NO: 882062 - DNA, 611 bp, Homo sapiens
tactatgaaaaagggcagagatataaagggaattgaaaactaatcttcaacttgaaaaaaaacatgagaatagtcatttagatcatagagagaaataatgattacctttgattcctagagaaagttaatttaaagtgtaatccaagttccactgtacagccaaaaaaaaaaatctgcaaagttgagatacatctttagtagatggaaacgagtcacaagggtcacctctcttgaatattgggaagatgctcattcacaatgattgggggaaagaaagattttggagattaactgaccttggtttaggatacmcagtgttttttaaatacaaatgatatttggtatcatgataaagacaaaatctgtcctgaatgacagtctctaaggaaatgcactcaacagtcagaaaaccaccaatttgattgcttatgtttttgtgtttaccaaattagaatctataactatttaaagcaagtccttaggatccatgtccagtggaatctttcaagttcatgtgcactttgaaagtatagatatctgtggcccatgaaataaaataggcataaaacttcgttggtttataaatgggtttagcacaagaaaagaaatta

SEQ ID NO: 882063 - DNA, 619 bp, Homo sapiens
agttctttactgtacacttacctgcaagatagattacttagtgttgctatgtgtattcgttcatttttacactgctgataaagacatacctgagactggaaaaaaagaaggtttaatttgacttacagttccacatggctggggaggtctcataatcatggaaggagggcaaaaggcacttcttacatggcggcagcaagaaagaatgaggaagaagcaaaagcagaaacccagataaacccatcagatctcatgagaattagtcactggactagcaagagaaagaccagcccccatgattcaattacctccccctgggtcccacgtgttgtgggaattctgggagatacaattcaagtggaaatgtgggcagggacacaggcaaaccatatcatcctgcccctggcccytccaaacccatgtcctcacatttcaaaaccaatcatgccttccccacagttcctcaaagtcttaactcatttcagcattaacccaaaagtccacagtccaaagtttcatctgagaaaaggcaagtctcttctgcctatgagcctgtaaaatcaaaagcaagctctacttcctagatacaatgggggtacaggtatttggtaaatacaga

SEQ ID NO: 882064 - DNA, 664 bp, Homo sapiens
tttttttttttttgctgtatccttgtctggtttcaatatcagaaaattaatggcctcatagaatgagttgcagaaatattctttattcctctattttcagaagagtttgagtaggattggtattagttcttcattaaatgtctggtaaaactcatcactaaagtcattgggacctaggcttttttttgtttgtttgtttgctgggagacattttattatggctttgctctcattattctcctctgggctgttcaggttttggatttcttcctggttcaatctggcaggtcatwtgtatctagcaagtgatccatttcttctagattttccattttattggcatatagttgctcatagtagcctcaaatgatcctttgatttgtgtgacattggttttaatgtctcctttctcatctctgatttttttgttttttttttcttaactagcctgactaaagatttgccaatgttgtctacattccaaaaaaaagctttcctgttacgttgatctttgtatcattttgattcaattctattcatttctgttctgatctttattatttctttccttctaccgattattggtttggtatgctcttgctttcctagttctttaggatgctttgttaggttgtttacttgaagtttttcttctttttttgat

SEQ ID NO: 882065 - DNA, 633 bp, Homo sapiens
  misc_feature 522: n = A,T,C or G
tgcttgccactatttttactttattcatattcagttataaagctgctcaactttgttgatagaaatattctaaattttaaaccagttaagaaaatataaagttactttgcaaataatgaaatacacattttttggttttaaatttaaggtgtaaaaactgcagtactccatttcatatcaatggtgtgcttaaagaaaactatcaacaactaaccataataccagaagtaatatcagacaataacaccagaaatagaaactaactactttgttcattttttaataccattatctgtctaatttcccagggtgtctattttaggactggatgttaaaactatttcaggtaaaatttcattcagtascaatgcctaaactggaggtcccagactctaatcctgatggtaaaaagcttctctggagcctgttttactgttctggaaaaggagggtattaaaaagagtaaagatggcaataatggctaccttttagttctgagccacagacctctaggctgagtanaggctcaaaaggagttgactgattagtgatgcccgcatgggtgtataatatgacattatttagagtgcaaaccatgaatatgcatgccatccacacactgcaagattctga

SEQ ID NO: 882066 - DNA, 687 bp, Homo sapiens
  misc_feature 363: n = A,T,C or G
aggggtggaaaacagaaaggaatttatagcaaccacaggccacagcctggcagtgttttgtttgggtttttgaaataaattaggtctatcacctttttgttgtcctttacttctttctcttaaaaagtagagtatatgaaaatactggttgcrtaagtgttctatttgattatataatacctactttatagagttgcatacaattgcattacagaattatatagtgtgatcttacctatacaatgaaaaagaaagatggagagaggactcaaaggaactgtaccaaagttaacagtgagtgacactgggcagtggaatcatagataatatttcctgcttctttatacttttctttcaacgttntctctaatcagcatttattactctgaagatctggaagatgctgatcaaaattaaaaaaaaaagattatattgtacagaaaggttgttttcaacctaatttatctttcagaggttttgccattttctacctatgtgaccttgagtaagttacttaaccctttgaatcttagcttccctcctccgtaaaatggggataataagtacttacttccatcaagaactgtgtgaaaattaaatggaaaaacacaaacaactcatctagtactgagcctgatgaagcacagacactcaatagtgggtaatcaaaaactgtgaagtaatatc

SEQ ID NO: 882067 - DNA, 687 bp, Homo sapiens
  misc_feature 363: n = A,T,C or G
aggggtggaaaacagaaaggaatttatagcaaccacaggccacagcctggcagtgttttgtttgggtttttgaaataaattaggtctatcacctttttgttgtcctttacttctttctcttaaaaagtagagtatatgaaaatactggttgcgtaastgttctatttgattatataatacctactttatagagttgcatacaattgcattacagaattatatagtgtgatcttacctatacaatgaaaaagaaagatggagagaggactcaaaggaactgtaccaaagttaacagtgagtgacactgggcagtggaatcatagataatatttcctgcttctttatacttttctttcaacgttntctctaatcagcatttattactctgaagatctggaagatgctgatcaaaattaaaaaaaaaagattatattgtacagaaaggttgttttcaacctaatttatctttcagaggttttgccattttctacctatgtgaccttgagtaagttacttaaccctttgaatcttagcttccctcctccgtaaaatggggataataagtacttacttccatcaagaactgtgtgaaaattaaatggaaaaacacaaacaactcatctagtactgagcctgatgaagcacagacactcaatagtgggtaatcaaaaactgtgaagtaatatc

SEQ ID NO: 882068 - DNA, 525 bp, Homo sapiens
agtagaagataaagattaaagataccaatttaaagtaaattggtagaaattctttaggaaaatctatggcagtacattagaggagatttagatatccttacacttgactgtgtcagatttgcttggagaaacttaccraaagaacataacgaaaatattttaaaatgaagagttacttataaagttcaatatatggaagacaaaaaatccactaataatgtctcatcatataaatgacagtacatatttcagaaaagattaaatatgcataaccatttattgtgaacaccttttaacaacacgggcaccacacacacattcacatgcgcatatgctccccccgaccccccctggacacacacacaaacattaccatgagattacagagacattatgagcattattactgtgattatttctatctaaaatattcatgtgtcacccgtagaacaataagaaagaataaaaatagtcatatgaacaagtgttatccaagctgtgttttttttcaataatctatacaat

SEQ ID NO: 882069 - DNA, 645 bp, Homo sapiens
gcatccctgtcttgtgccagttttcagagggaatgcctccagtttttgcccattcagtatgatattggctgtgggtttgtcataaacagctcttattattttgagatatatcttctctagttcttttaattgtgatgttagggtgtcaattttagatctttcctgctttctcttgtgggcatttagtgctatcartttccctctacacactgctttaaatgtgtcccagagattctggtatgctgtgtctttgttctcattggtttcaaagaacatctttatttccgccttcatttcattatgtacccagtagtcattcaggagaaggttgttcagtttccacgtagttgagcggttttgaatgagtttcttaatcctgagttctagtttgattgcactgtggtctgagagacagtttgttataatttctgttcttttacatttgctgaggagtgctttacttccaactatgtggtcaattttggattaggtgtggtgtgaaaccccccaacatcttatacaatgttgtggagcctactgtatgttattaaaatgtgttgacagggcttcagattaacacactggtgattcttagggctttttggttgttgttatttttgtttctttgtggccaaacttagggct

SEQ ID NO: 882070 - DNA, 645 bp, Homo sapiens
gcatccctgtcttgtgccagttttcagagggaatgcctccagtttttgcccattcagtatgatattggctgtgggtttgtcataaacagctcttattattttgagatatatcttctctagttcttttaattgtgatgttagggtgtcaattttagatctttcctgctttctcttgtgggcatttagtgctatcaatttcyctctacacactgctttaaatgtgtcccagagattctggtatgctgtgtctttgttctcattggtttcaaagaacatctttatttccgccttcatttcattatgtacccagtagtcattcaggagaaggttgttcagtttccacgtagttgagcggttttgaatgagtttcttaatcctgagttctagtttgattgcactgtggtctgagagacagtttgttataatttctgttcttttacatttgctgaggagtgctttacttccaactatgtggtcaattttggattaggtgtggtgtgaaaccccccaacatcttatacaatgttgtggagcctactgtatgttattaaaatgtgttgacagggcttcagattaacacactggtgattcttagggctttttggttgttgttatttttgtttctttgtggccaaacttagggct

SEQ ID NO: 882071 - DNA, 640 bp, Homo sapiens
ccttgctggaggaggtgctgtgaccatttgaaggagaagaggcactctggccttttgggccttcagcgttgttttgttaatttttttctcatcttcatgagtttgtctagtattgatctttgaggctgctgacatttgaatagggtttttgtggggacttttttttttttgttggtgctgttgttgctttctgtttctttgtttctcttgcaatggtcaggtccctcttctgtagggttgctgcagttttctgggggctcactttaggccctattcatctgatttgctcccatgtctggagatgtcactcgaggaatctggagaacagcaaagatgggtgcctgctccttcctctgggatctcgaggggcaccaacctgatgcctgtgggctcrctcctgtatagggtttctgatgaccccttttggagggtctcaattggctgggttttatggggagcaggacccacttaacaaagcactttggctgtcccttggtggagggggtgtgctttgctggggggaaagcccacttgtctggtctgccttgcttcctccaaactagtaggaggaaagactatgtctgctggtgtgcagagactgtggccacccctcccacgaggggttcaggcctaaggagat

SEQ ID NO: 882072 - DNA, 607 bp, Homo sapiens
  misc_feature 276: n = A,T,C or G
tctctttccagacttgcagttgccaaagcctcaaactggcaccctccctctggccttatttaaattcctgggtgctccctccttcacctgattggtgcctctgtctgcatggggctcatacttcatccctcaagagcccagctgcagctctcacacctttgactttcctcctcctatttggtcttctccacagtatgatgaccatcttggagtatactgaattaagaataacagttaacattttcgagctccatgcatatgctaragactgtgcanaactctttatatcatttagggaacttctgaggtagtacaaacattactgacattccagatgagaaatatgagacaccaagaatttaaaaaacataatctcatcaaggttcccactgaataagtagcaactttaaaaatgtaaacaccgaggtaccctcacttcagagtttttcctgaaacaggctttaacagggaactgggcataagcctttattccgggatttggaaagagctccatggaagagaaggatcacagaaaatagagatggggccagcaaataacaacttctcttacttcccaatgttgcctcccatcaattttgttcttcag

SEQ ID NO: 882073 - DNA, 593 bp, Homo sapiens
ccaaaacaacagaatatacattattctcatctgcacatggcatatattctaaaattgagcagacagttggcaataaaacaattctcagcaaattcaacaaaaagctgaaatcataccaaccatactccctgagcacagcacaataaaaatagaaatcaataataagaagattgcgcaaaaccatacaattgcatgaaaattaagcaacttgctctggcatgatttttaaataaacaatgaaattaatgtctaagtcaataaattatttaaaactaatgagaaaacaggtataatatatccgattctctgggacacagataaagcagtgttaagggaaaaaagcttacagttctaaatgcccacatcaaaaacttataatgatctcaaattaacaacstaacatcacacttagaagaactataaaacaatagcaaaacaatcccaaagctagtaggacaagaaataaccaaaatcagagtagaactgaatgaaattgatacatgaaaaccctccaaaggatcaacaaatccaggtggtgactatttgaaagaataaataagatcgacagaccactagctagaccaataaagaaa

SEQ ID NO: 882074 - DNA, 593 bp, Homo sapiens
agtggcatgtgcctgtaatcccagctacttgggaggctgaggcagaagaattgcttgaatccaggaggcagaggtttaggtgagccaagatcacaccagtgcactccagcctgggcaacagagtgagactctttctcaaaaaaagaaaaaaaaaatcttcaaccaagaatttcatatccagccacactaagcttcctaagtgaagaagaaataaaatcctttttggataagcaaatcttgagagagtttgttaccaccagacctgctttacaagagatctttgaaagaagcactaaatatagaaaggaaagaccactacccrctagtacaaaaacacaaatacacaagtcagtgacactataaagcaatcacataaacaagccagcctaataaccagctaacaacacaatgacaagatcaaatccacacatataaatacaaacattgaatgtaaacaggctaaaagccccacttaaaaggcatagagtggcaaattggattaaaaaacaataccaaatggtatgctgtcttcaggagacctgtctcacacataatgacactcataggctcaatgaactgaagaacatctacca

SEQ ID NO: 882075 - DNA, 517 bp, Homo sapiens
tacatgttgaatgtctgtccctgcaggaagccggccccagggcccaggggaggccttggctcagaaagcctgggagctgggctagccggcaaaagtcacactcactcacattcacacacacactcacatgcactctatagccaagacctgcaactytgcagtccctacaaataaaaaaagaagccttgctttttagcctttctgcctctacagctaatgaaccgttcccttccacagtgctggagatgagggaagaatgaaaagcgtaattaaccttcccctaaacacagatttttttttttttttttttttttttttttttttgcaaaacacatcaaaatactgcaagaagactgtgctccaagtgccaaatgcaataaagaagccctaagcccgggtaatggtcaagtaatagcaaataaaccgccttcctagaaggggcctcggcctccgttgggagaaggattttcctcctcagaagcaatctgaaataaacaaataaaagtattttttaaaa

SEQ ID NO: 882076 - DNA, 631 bp, Homo sapiens
cttcttttgagaattatctattcatctccttagcccgctttttgatggaattgttttttttcttgctgatttatttgaattctttgtagattctggatattagtcctttgtcagatgtacagattgtgaagagtttctcctactcagtgggttgtctgtttactctgctgactgttccttttgctgtgcaaaagctttttagtttaattaagtaccaactatttacctttgtttttgttgcatttgcttttggattcttggtcttgatgtctttgcctaactcaatgtctagagagrtttttcttatgttaccttgtagaatctgtatagattcaggtcttagatttaagtctttgatccatcttgagttgatttttgtataaggtaagaggagaatccagtttcattcttccacatgtggcttgccaattatcccagcaccatttgttgaatagggtgtcctttccccaccttatgtttttgtttgctctgtcaaagatcagttggatgtaaatatttgggtttatttctgggttttctattctgttccattgttctatgtgcctatttttatacccgtatcatgctgttttggtgactatggccttatagtacagtttgaagtagggta

SEQ ID NO: 882077 - DNA, 631 bp, Homo sapiens
cttcttttgagaattatctattcatctccttagcccgctttttgatggaattgttttttttcttgctgatttatttgaattctttgtagattctggatattagtcctttgtcagatgtacagattgtgaagagtttctcctactcagtgggttgtctgtttactctgctgactgttccttttgctgtgcaaaagctttttagtttaattaagtaccaactatttacctttgtttttgttgcatttgcttttggattcttggtcttgatgtctttgcctaactcaatgtctagagaggtttttcttatgttaccttgtagaatctgtatagattcaggtcttagatttaagtctttgatccatcttgagttgatttttgtataaggtaagaggagaatccagtttcattcttcyacatgtggcttgccaattatcccagcaccatttgttgaatagggtgtcctttccccaccttatgtttttgtttgctctgtcaaagatcagttggatgtaaatatttgggtttatttctgggttttctattctgttccattgttctatgtgcctatttttatacccgtatcatgctgttttggtgactatggccttatagtacagtttgaagtagggta

SEQ ID NO: 882078 - DNA, 599 bp, Homo sapiens
aatatggcaatcagtcacaagagagattttagaaatcctgcttcatccctgtgtagagtttctattaggctcagagacggaggggaatatttgaatatgtctgtggcaggcaactgatcaggggtggaagacctgaagacagaagaccccagggatgasaaataaggacaaagagtaaattatcaagggccaatctgagcctcaagtttaattaaccatcctaggaagattttgttttaatttaacttgtattcctgtttgaatagcaaatacagttatatggtttgaaattgtttgggggctcagaaaacaataccccaaaatgaagacttcagaagcagcctcagaagcaaaagtttctctctgaccttcttcttccctcctgtctctggccactcattctcctccaaggacaccagaatccctcttccccaaggcaggttatagaaaccagaatcccttttccttaaagccagccaggaaacctaaaaatattattctaacttctccccctggcctttctgtgtaaaaactggccataaagaaattatctgacctaccttgtttgactgtaggtcataagagccccattccagaga

SEQ ID NO: 882079 - DNA, 590 bp, Homo sapiens
gcctctgggaaggcatttaacctcaagttattgcacaacctgttgatccaccttttatcaaagctcactccagacacttcaaatgtccatgaagattaagcaactaagacttcttaaaggcacaaggggatttacccactcagcactgcagtcagaccagtgttccccagtcaccaaacagcatcagcgcacataactcttttgtttctaaaacaagatactgccaaagcctgagataaattaaaaacatttyttcagcagttaaaattcatgttggtaaatatttgtgtaaggaatcataactcaagcttcattaactatttaatgttgaaatttaaaatatgaagaatagtttcttttcctttttttctttgagaacaagcaaaaaatttaaattatctataataacagaagtgacattaatcaaatcagtgatggtatccataaagctatgtcaagatatctagatttatagtttcataaatgctaggatttttttttaaaacaaatatgctagtgccatttttaccagatattaacctatgttaatgaagggcaggtagatcctactttcctagtatttagtcatt

SEQ ID NO: 882080 - DNA, 570 bp, Homo sapiens
ctgaaactgggtatttataaacactagacatttgtttctcacagttcttgagactgaaaatctaagatcaagatgcagacattttgtgtgtagtaggagctgcatcctccaaaaaaggagaaacactgtatcttcacagtgtagaaaatgggaagacaagaggggatcaactctttcmaacccctttatggggacacctaattccattcaccaggtgagaatgccttagacctaatctcttcttaaaggccccacatcttaatgccatcaaactggccattgagttcaaacacctaaattttggaagagacacattcaagcaatagctatcaaacatattctgagctataaaataaagatcaataaatttaaatactttaagtcacataaagtgttctctttgatcatacggaaatcagttataaatcaataacagaaggaactttggaaaacaccaaaatatatgaaaactaaataacacacttctaaataacccatgggttaaagaagaaatcaaaagaaaaattacaagatattttgactgaataaaatggaattacgacatatcaa

SEQ ID NO: 882081 - DNA, 626 bp, Homo sapiens
cagtcccaagccaggggcccttcctggtaaagagtacgggtgggagctcacagggaggagagactggggttctcttcgcatgttggctgcaacgagatggaggtgccagtgtagcatccagaccctttttcccttccccagctcaagtgtagttagtgcaataccgctgcaactgcaatggaagaggggctgtgggttgtctctgggatttcctcctcagagaaatgcagagctgcttctgactgaagtgttcaactgggggcagggtggttgtcctggagtcttaggccaaragggtccacccagtgagaagtgggaatgaggatgtgtatggaaaacagtctgaccagttttccatggggcaactgcactgtgctagggatctgcaccagaagctagtcaccactcacatttcagagcctgagggcaacagcagtgagggctaagaggcagcaaaaatggtggcctgcctctccctctgggagctccatcccagagaatggcaaagctgctaaaagcactagagcccaagtgcagctggtgtggccatgctagggccccatgacagtgggctttatcctacaaggtgcagtggagtcgaggcctgcagtccattgctactcaga

SEQ ID NO: 882082 - DNA, 653 bp, Homo sapiens
taagtaatatttggtcctgtaccgtgtgtgtgtatgtgtgtgtgtgttcaatatttaggattaatttagagacagaatatttaaacactctttctaagtgtcttgaaaaatggaccctgatacaaccccttggggggatattgtttatgtgggacctgatccaaggaagagcaaataaggaagtaggaaaagtgaggcagtgaaaggagaaaatataattatgggtgaattaacgcaaaggtcacttttgtgaccacctataaatttaattccactggagacccttgaaggaatagtgcagagcacatttcagacttgtttccttgaggatacattttttgggtaatatatccactaatgtctaccttttaytgattaagcattgaccatggagatgtgaaaactcagcacttccatactctcttctttgtggtctgaaggaccctctatggatctggagaacactcccaggcagagaagcagagatgcaggctcttgaggaaggaagccttcagcatacacataaaaattccactgcagctataaagagcttccggatgggcagaaaggatacacatagggcggggaaaccacagcatatgttatacaattaaatggatagctgtatttgcactctaataatgaaagttaat

SEQ ID NO: 882083 - DNA, 619 bp, Homo sapiens
catacatttaatgtggtattatctacaatgaatatattttactttttaaataaagaaaggagtgaaggcagctttattatggaagcaaaacagggaaggtctgggttttatcttcacttctgatacaagctagctctttggtataggcaagtcattgtaacattttaatcctcagtttcctcctttgtaaagtaaagagcagtgggtctcccactagactcttgtgatccctagatgtttcatgtaacaccacaagaagtggaatatgagaggtggaatatgagatggaatgtgagatatccaacctgttttctaaaccagaggaacacttaacatatttgctctatytacaaagcttgaatgtcagtttccaagggtttctgtagtataaaattttgaaaaaaaaaaaaaaattaaaaagttttttaaaaatggggcttgataattcctaagtcctttttagttttaacactctttgaagttaatccccaagtcaaagtttctactagaaatatagtaatttactcacagaaaatagtcatcttctgtaattgcttttacttaatccaagcctgttggtcacatttgaacattcagagtctttacttttgtgaagtat

SEQ ID NO: 882084 - DNA, 673 bp, Homo sapiens
aattaatttgtaatatacaaggtatattatggttgaactagtttttgtggtcttaggctggaaattaaacacctagtatatagaagcaataatatttcaagtatacatattcatttatagcattatttctatgggaaaatgcacccagaattctaactaggatcttcaagaacaactctccccaggtcagtgcatggagcagaaagagaagggaaagggatagaatgtcttcatgactttaatcctagtatttgaaaaaaaawaatcaaaccttgcacctacaaatttctgtcttgatccagaaagtcattagcataaaaaagataatagtggccttctcacctaacgccaccaacatggtgttcaggcgcttcgtggaggttggccgggtggcctatgtctcctttggacctcatgccggaaaattggtcgcgattgtagatgttattgatcagaacagggctttggtcgatggaccttgcactcaagtgaggagacaggccatgcctttcaagtgcatgcagctcactgatttcatcctcaagtttccgcacagtgcccgccaaaagtatgtccaacaagcctggcagaaggcagacatcaatacaaaatgggcagccacacgatgggccaagaagattgaagccagagaaaggaaagccaagatgacaga

SEQ ID NO: 882085 - DNA, 673 bp, Homo sapiens
aattaatttgtaatatacaaggtatattatggttgaactagtttttgtggtcttaggctggaaattaaacacctagtatatagaagcaataatatttcaagtatacatattcatttatagcattatttctatgggaaaatgcacccagaattctaactaggatcttcaagaacaactctccccaggtcagtgcatggagcagaaagagaagggaaagggatagaatgtcttcatgactttaatcctagtatttgaaaaaaaaaaatcaaaccttgcacctacaaatttctgtcttgatccagaaagtcattagcataaaaaagataatagtggccttctcacctaacgccaccaacatggtgttcaggcgcttcgtggaggttggccgggtggcctatgtctcctttggacctcatgccrgaaaattggtcgcgattgtagatgttattgatcagaacagggctttggtcgatggaccttgcactcaagtgaggagacaggccatgcctttcaagtgcatgcagctcactgatttcatcctcaagtttccgcacagtgcccgccaaaagtatgtccaacaagcctggcagaaggcagacatcaatacaaaatgggcagccacacgatgggccaagaagattgaagccagagaaaggaaagccaagatgacaga

SEQ ID NO: 882086 - DNA, 687 bp, Homo sapiens
gcacagtgcatatcacagtgaatgacaagttaggttgatacatttaagcatgacaaagggatattttgaaatatggaatatgaaatacagtcacattccacataaaaaatagtacatccatgtaaacttgtgtgctgcttcctacacaagaatatcttgtttctgcgtattttcctttcccatatgctttccttttgctttatggcaaaactagaaatattgatagacttgattttgccagtctatggacttcctatagaaggaatgagtaccccaaatcacttcctccacaaaacctttcactagcactattcttcctcttccctgtagccttgtgtgcttggctctgggcatgatgggtttgtactcatttgcttctttgtaggtcttctatcgcctttctccttatgagcctgtttcatattttaaaagataagggagggggagcacattttccatttttagctgtstactgtgactaagagtctgtggctggtaactaatttgtctggtaactgtctcttgacagttagatgcattttggtttaaatgccagtcttgcagagcttgagagaatgcatgctgctgtattcccaggtctaatttggtttcccagtcctaagccacacaaccccccagcgcctggccattgtggtgtcatactcatggtaggtactgagtacttgt

SEQ ID NO: 882087 - DNA, 623 bp, Homo sapiens
tcatgctgctttaaagacacatgcacacgtatgtttactgcagcactaatcacaatagcaaagacttggaaccaacccaaatgtccatcaatgatagactggattaagaaaatgtggcacatatacaccatggaacactatgcagccataaaaaaggatgagttcatgtcctttgtagggacatggatgaagctggaaaccatcattctcagcaaactatcgcagggataaaaaaccaaacactgcatgttctcattcataggtgggaattgaacaatgagaacacttggacacaggaaggggaacatcacayaccaggtgtggggtggggggagggggaagggatagcattaggagatatacctgatgtaaatgacgagttaatgtgtacagcacaccaacatggcacgtgtatacatatgtaacaaacctgcacattgtgcacatgtaccctaaaacttaaagtataataaatagataaataaataaataaaagaaactggctgaaatcagttggaaccaatctggtcaactgaagtttgtgcagaacaagcttgctgatgtcacagcttggatttccaccctgtatttcaaactaactcctcccagatttgcacatgaga

SEQ ID NO: 882088 - DNA, 584 bp, Homo sapiens
agatagccttaatttcctcaactaaaatattagcaaatcaaatacatcaatatatatgtaaagaacaattacaaggaggagttacccaagaaatgtaagatggtataacattctaaaatcaatataattcttcatattttcaaaaaacgataaaaaccatatgattctttcattagaagcagaaaaatattgacaaaactcatcatttatccatgtcaaaactctcagcaaactaaaactagaagaaagctgggcacagggatgcatacctgtagtcctagcttacttggaggctgaggtgagaggatcacttaagcccaggagtttgagtccaacytaggcaacataccaagaccttcatctaagatgaattaaagaatgaataataaattttaaaaattgcccttctgggctggtctaaaacaaactggaaggaaacttcaatttgttaaagagtatctataaaatcttacaagtagcattgtacttaatgaaaaatattgattacattccccctaatattggaaataagtcaataatgaccactttcatctcttttactcacaagtcttttggaggccctt

SEQ ID NO: 882089 - DNA, 547 bp, Homo sapiens
ctgcctgccttcctcctacttgcctgatcacgttctgccagcctgctcacctctgactagtctacagaatgattgtgccttctttcacttttagcaattatgggacatagaaaataaataaaataaatgttcagggaggcagcaggattgctgcaatccatcctttctctccaactcccagccttttccttccccatcacctccatctggacccttttgcagcttcttttcagcctcctgctccagctcctgccccacagtcccttcctgatcagcagccagagagagcagttatctgctcrtgcctcccttgcttagaccctttatgagctccccattgctcccaggatggaagtgaaactgctccccacagctgacaagaacccacaggtccttgctatgaaccttctccatgaaccttgccatgaaccttctccacctgatgggcctcctccatgtttctcacgtcgcccctgaggctgtggccctggctccatctgatgcctctcgctcttcccctgagctgagcctgcacttcacagtcatg

SEQ ID NO: 882090 - DNA, 680 bp, Homo sapiens
taatccaagcactttgggaggccaaggtgggaggatcatttgggaccaggagttcgagaccagcctgggcaacataacaagactccatcttgacagaaaatttacaaattagccaggtgtggtggcatgcacctgtagtcccagctactcaagaagcggaggcagaaggattacttgtcccaaggagttcgaggatgcagtgagctatgatcacatcactgcactccagcctgggtaacagagtgacaccctgtctctttaaaaaaagatctttaggaagagaaatttgagagaaatcaattattaacaaaaatagaagtgaaagtaaacacataaaacaattatgtgccaagcaccattctgrtatgtattagctcagttcatcttcacaagtataaggaatgcatattgttactgtccctatttttatagatggggaaactaaggcatagagaaggtaaagcaaacatacaatagacaagatcaacaatgccaaaagctggttcttggaaaagactaaataaagagaaggtccacacatgactgaaatgagaaaagaaaaacataaacagcaagagaaggcacaaagagacagcattaataataggaaacagatcatatcatagaagctacagagattaaataaataaatagaaacatatccagaacaactttataac

SEQ ID NO: 882091 - DNA, 661 bp, Homo sapiens
agctggtacaagcgtatctcccacactgaactgcaactcctgagggcagaggtctttctgagccaccagcctagcataagggaggtgctagcaatggctggtagttgaacaacttaatgcacatcttcccccaacttttcccagggctaactagtagaaatgggctgagaaactaccaaaactaccagtcaacctggatcagtcaatccaaccaccagtaagtacaagacggaagaggcagggtatcaaatggtgtgtggggctggcccaataggtggcccacagggttgttctgacaattctttccaaagagccacacagccaagaaatcttacccagagttggcagtgtcaccaagagctgtccaagaacatggacacggagagttgaccattagggaaaggccagatsctcagccatctcgcctcatgctgcctgcagcaaacagcaacctggaactcacaacccagatcttccccagactcctcctgttgatggcagcaacagtccatctagagcagccactgctattacactggctgcagcagtgaggcacaactgggactgcacactccatggtgccagcaggaaatggggacaagtgggagcctcaccccttccaagttggtggggcaggagctccccagatgcagccacagca

SEQ ID NO: 882092 - DNA, 669 bp, Homo sapiens
cagggctggcctgcagatgcccccttggcacctacagcctgggtgccatgagcagcagcaggaggcagacaggctcctggacagaaggtggcaggtccctgatgaggccccaccttcaattcagggaaagcctgaatgctgggggccaggctgccagtcccatgtactggagtgagaacttgtgccttttccaggtatgcccatggccacccatggaacaactggcatggacttccccacctctgaggcccataaaagccctgggctcagccagagctgagcagacattgagacaaccagctgcagagaggagctacccactccagggcctcctctctcctgagagctgcagagaatgacaggaygacctgcctgcagagaggagctacccactccagggcatcctctgagctattctgtcaatcaataaagctcctcttcaccttgctcaccctccacttgtccatgcatctcattcatcttggacgcaggacaagaactcaggacctgccaaatgacagggctgaaagagctataacacaaacagggctgaaacatgccccttgctcatcatgttgcaggtgaagagaaggagagaagagctgtgacccttcagggagcgcagacctgggagctccccaagcctgggctgtgactccctctttgggg

SEQ ID NO: 882093 - DNA, 628 bp, Homo sapiens
aaaaaaaaaaaagcaagggttgcaatcctagtctctgataaaacagactttaaaccaacaaagatcaaaagacacaaagaaggtaattacataatggtaaaggagggatcaattcaacaagaagaactaactatcctaaatatgtatgcacccaatacaggagcacccagattcataaagcaggtccttagagacctacaaagagacttagactcccacacaataataatgggagactttaacaccccactgtcaatattagatcaacaagacagaaggttaacaaggatatccaggacttgaacgcagctctgcaccaagcagacctaatagacatctacagaactctccaccccaaatcaacagaatatacattcttctcagcaccacatcacacttattccaaaattgaccacatagttggaagtaaagcactcctcagcaaatgtgaaagaacagaaatcayaacaaactgtctttcagaccacagtgcaatcaaattagaacccaggatttaaaaactcactccaaaccgcacaactacatggaaactggacaacctgctcctgaatgactactgagtaaataatgaaatgaaggcagaaataaagatgttctttgaaaccag

SEQ ID NO: 882094 - DNA, 494 bp, Homo sapiens
atttatgatgccacaggaaaactgcttgtgacttcaacaacaattacaatcagaatgccaatatgttactacagtgatgatcatggaccaataaaaaatgtacaagtgcttgtgacagaaacaggaggtatcatcacatgtcaatttatcttgttaaattgtggagtgtagattactgagtgctaaaaagaatttagttcaaattaagattgactcccagttatcacacrcctcttgagattaatagattgtcaatattattattaatgataccaatcatttctttgtaaataaataaattatttatttattttatttgtaaaacttttataaatgtcatttatttataccaattatttattcttttttacctatcaagaaaggcacagttaaaatatgtgatttattaattccatatactagtagataaacatgttttgattttggtaagatggaatcttgatagcttctttggaggggtgaacaagtgagtt

SEQ ID NO: 882095 - DNA, 646 bp, Homo sapiens
ctacacacctagactatatggtgtaacctattgctgctaggctgcaaatctgtgcagcatgtgactattctgaatactctaggcagtcagaacacaatggtgaatatttgtgttatctaaacatagaaaaagtacagtaaagatatggtattataatcttatgagmccacggtcatatatgtggtccatcatttactgaaatgttgttatgcagtgcacgactgtatataccagagtttctttcattggtccactgatgggcacctcggttgtttccatatcttggctactgtgagtaatactgcaatggacatgggagtccagatatcttttcaaggtggcgattctgttcctttgggtatatacccagaagagaatccctgggtcatagtaatttcatttttaatttttttaggagcctccatactgttttccacaatggctgtactaatctaccttcctatgaatagtgcacagggttcccttttcttcacacccttgccatgaccttgctatcgcctgtctttttgataatagttcttctagcagtgtgaggtgatagctcattgtggttttgatttgcatttccctgatgattaatgatgctgagcaccttttcatatacttgttggccatttttatgtct

SEQ ID NO: 882096 - DNA, 493 bp, Homo sapiens
tgccagagatgttaatgtggaatttatatggtatccaaaggcatacaagtgtattgtttaatatgctgttctagatggtagctctgtttccagacaagagtgaaaaattctatttaattagttctgtgcctatagatttcagtatttaagctagcctggcatttgagatcagatttcttaattagaaaggacattgttgggtctgtgaaaccaccaaatgtggctttgaaaaacctggggcatatatgcatatgagaatttttctagggaatgtgtccatagctttcaagagattctcaaagggcttcgtgacacaaaaagcccaagaactactaatttagaacrttgtttataagggaaatggttttccagatccagaaaaacaacttacaaacaaacttttggaggccagcctgttgggaagttgagggctacaaatgtatcttgaaatgatgaatcatcctagaatataattttataaaactttcagtaa

SEQ ID NO: 882097 - DNA, 506 bp, Homo sapiens
aaccccaccacttagcaaactcttgtcttatggtagctgcttgatgaatacttgaagcattaaaaatggtcatttgtatcacctagcatgtgagcaactagaggttgtatccctaatatctgacagtgtttgtttattttaaaagtgaggtgaaatattcacataggtggcaccaaccttagcaactgctcagtagctgccgtggtagytggaaacggctgtcctgctgattgcctccgtgtgtgacatctccaccgcagcagctctgggttcgtcagtgcaggggtgctgcctaggaccttagctagttatcatccccaggtcatttgtgtggcttagtttatcaagtgagctaacagaagtcctaaaggcagggtccgtgggcaggtgaaagaccacagggacattgtaatcgggcaggaaaccagcctggatgctcaggaatgtgagaatctcagagggtagtaatggagagagaggaacacaaacacgatgagggaggcttt

SEQ ID NO: 882098 - DNA, 634 bp, Homo sapiens
tgcctcaagtcgtttttttttttttttttagacggagttgcgctctcgtcacccaggctcgagtgcaatggcgtgatcttggctcactgcaacctctgcctcccgggttcaagccattctcctgcctcagcctcccaagtagctggcattagaggtgcctgccaccatgtccagctaatttttgtatttttactagagacgggtttcaccatgttggtcaggctgatctccaactcctgacctcaggtaatccacccaccttggcctcccaaagtgctgggattagatgcgtgagcccccaaacscagccagtcatttttttgataatagtaaatttcaggttatgttggaagtgagaaggatcttttatggagcagaaacatagttgtgggacctcgataagcagtgtcactaaacacatgctgtaactcacacggacttaccatctgcatgtcacctgcaggagggcatctgctgcctggcctattgcagtggtgctttggtaatggtgctggagaagctggtgatgaatccgaggaagatgctgtggtcactgtggccccatgactgctcaggacccagtctccctcctctgcacagatcttatgtaatcctgccaaaactcacacaatgc

SEQ ID NO: 882099 - DNA, 682 bp, Homo sapiens
ggaatagatgcttattaaacatgtgctcattaaattaccttgggcagtatagccatttttgtgatatttattcttcctatccgtgagcatggaatgccttccatttgtttgtgtcctcttttatctcactgggcagtggtttgtagttctccttgaagaggtccttcacatcccttgtaaattggattcctaggtattttattttctttgaagcagttgtgaatgggaattcactcatgatttggctctctgtttgtctgttattgatgtataggaatgcttgtgatttttgtacattgattttgtatcctgagactttgctgragttgcttatcagcttaaggagatgttgagctgagacaatggggttttctaaatatacagtcatcttatctgcaaacagggacaatttgacttccttaggctcctgcccctcactggaggctggaggaggaatcactgaggacatccttccctgttgctactcagttcttggtgctttccactctgaatcctacccctgactataggtccataaaactgttggagtctttgtttgaagctccctaaacagacagacaacccctgtcttcagtgactcacttggcccttgactggtgtaccactccatagaggaagatggcacaggagaattggtcttgtctccagttttatctgacta

SEQ ID NO: 882100 - DNA, 511 bp, Homo sapiens
gagcttgttttcctgcaactagatggtcctatctgggggtgatgggagacagtgacagatcatcaggcattagattatcataaggagcacgcaacctagatccctcacatgcacagttcacaatagggtttgcactcccatgagaatctagtgccaacactgatctgacaggaggcggagctcaggtggtaatgcgaacgatggggagtggctgtaaatacacatgaagctttgctggctcccctgccactcatctcctcctgtgcagcccagttcytaacaggccacaaacaggtactggtccatggctcaggcactggggacccctgctttaaccacaggctcagagaagcagaaaaacatttcatatccccccatcaatgcagtgagaattctgagaacctccatacctcctgagaggggcagtgcatcttgccagcaggattttgcagtcatggagcacaactaaaagagagggaacaaggacaactaggaagaatatataaaatga

SEQ ID NO: 882101 - DNA, 581 bp, Homo sapiens
tagaaaaagtcattctacaggcaatgttaaggatggacctgaaaacaagagactgttgccatggcaatgagataggaagctcttgttggccaatattcccttctggacaggcataggtatagagccggccttggccaggatctctgtaagctggggcaggtatgtgaatgaagggaaaggaaaccaaagtctgagttctggrtaaggttgctggaggaagaaaagaacaatctaaaatgccaagtccaggccaggcatggtgactcactcctgtaatctcagcactttgggaggccgaggtgggaggatcacctgaggtgaggagtttgagactagcctggccaacatggtgaaacctcgtctctactaaaaatacaaaaagattagctgggcctggtagcgggtgcctgtaatcacagctactcaggaggctgaggcaggggaattgcttgaactcaggagatagaggcttcagtgaaccgagatcacgccattgcactccagccagggcaacaagagcgaaactccgtctcaaaaaataaaataaaataaaataaaataaaataaaataaaataaaatg

SEQ ID NO: 882102 - DNA, 654 bp, Homo sapiens
gtttaatccttactgtgctctagggcgtttgactccaaatacctgtctgataatggttaagtgggcaaccccacagttacctgctcctttagttgtaataccttccaattttatagctcttagagtaacactttcattgtaataatctcatgtaatccccataacaaccctgtgtgttatgtrttattatcatatttcacaaatgaggtctatgagattaggtgactttcctaaatcttacagctaagtaagtgtcagaactgatactggaacgataacatacaactccaagtcccagcacttgctacagccacagttaccttccaggtaattattaatactttcaagatacattctcaaaggaacactttaagaaaagttttatctatcatcacaaattaaagggactttggtacctaagacaggtcaaccattgtttggtgctgaacgccctagaatttaatgtcgtatgatctaccagattgtaaaggaaactgaaaagatggaggaggagcggtataattaaggaaaaaccaagcagtagatttttactgctcagttttatttttaaaaagctaaatatttaaggttatttaaagtcattttgaagctgataccatggtttcaatacaatgtttaaatgaggccttttag

SEQ ID NO: 882103 - DNA, 622 bp, Homo sapiens
tgaggatggtgaaagagaatgctgcttctccactagagaatcaatagtcttttatccctaaagatgaaactactgttatgctaggtagtttgaactagaaatcatgggatttcagggttgggtaggatgtcaatatcacattatccaaataaatttccatatcttagttcacattaacatattaatatataacctgccccagttcctgccgaccaatccagtttataaacatagtcctttaatctattaatcaataaaaatgtactgaacatctgtgccccatttaatattggataacaagatagaatgtaatatgattctaaagtagtttttagagttagaaatgccggccgggtgtggtggctcatgcctgtaatgccagcactttgggaggccgaggcgggcagatcacctgaggtcaggarttcgagaccagcctgaccaacatggaaaaaccgcgtctctactaaaaatacaaaaaattagccgggagtggtggtgtaatccctgtaattacccctgtgtaatgcctgtaatcccagctactcgggaggctgaggcaggagaatcgcttgaacccaggaagtggaggttgtggtgagccgagaacgcaccattgcac

SEQ ID NO: 882104 - DNA, 669 bp, Homo sapiens
gctaaagtactatgtatattcaatccaataaacctgctagaccctgggcaagatgttttcatatatagtatctttttcaagagttcccagtggatagactatagcacactggtatgccaggaagaagttacaagagtaccaactaaaatatcaatcactcatctcatggaatggccaaggggagcctggtatgaggatagtccacagctcacttatctctgcttaagcagcttcatctagggttcctcagagagctggtcaagttgaacagattcatgagccctcccataaaaccccagtgttggtgagtacagtgagcaacaactgtctgctgtaattttgttgcagtggcctgagcatggccaatgaggtgctttactcttgagtgtatctttccactgcctgcaatagcatgtaccatactccttggataaaaaggtttatggagctactggggagtttgtgttccatgtattcaamtggcttaaaagtcttcattaaaagaaatacgcaaagcctcattgcagtattattcactacagagcagacatggaagcaacctaactgtatgtaccttgatggataattggataaagaaaatgtggtgtgcacatgcaatggaatactattaagcattaacaaataggaaatcctaccatttgtgacagc

SEQ ID NO: 882105 - DNA, 545 bp, Homo sapiens
ctgctagacttggccgggtgctgtggctcacgcctgtaatcccagcactttgggaggccgaggcgggcggatcacgaggtcagagatcaagactatcctggccaacatggtaaaaccctgtctctactaaaaatacaaaaattagctggatgtggtggcactcacctgtagtcccaggtacttgggaggctgaggcaggagaatcacttgaacctgggaggcagaggttgcagtaagccaagatcacaccactgcactccagcctgggtgacacagcgagactcctaaaaaaaaaaaaaaaaaaaaaaaacaagagctgctagactctcagttaaccattaacttcttcaraatcagaaaagacccggaaaggaagggcaagggattccctacagaatgtaaatttctcccacaagagacagctttgcagggccctttcaaaatatgtcaaagaaatatattttggggtaaaacactttgatttccttcaaggccagctatctgtcatgtgatgctctactagagtcaagttggaatttggcatc

SEQ ID NO: 882106 - DNA, 655 bp, Homo sapiens
taggcagttttgaagaactaaatggaatatctagaatgaaaaaccatgcttgctaaaattaactcaatgagtgagtttaaaaagcaatttagacccagctgagagctgaatttgtggtatatgcagaaattacttctgatgcgaggcagagcatgatgacagaatgaggagatcccaaacatctatgagagttccattctgaatgattagaagaatgaggaagcaacagtatttaaaaagataatcactaagaaagttctatacttgatgaaaaatgtgaatcctaagattcaggaacagtgtgagacttcagctggggaaaaaagatgaaactacacttctacatttaggagtaaaactacagaatacaaaagacaaaaaaattttaaagtgaaaaataaaaccactcagattacatcaaaagcagtyatcatgaaagcagcctatcaattacaatgataaaagccaagcaatagtcaaatatcgatttttttcaaagtcacaagataaaataagtagtaacataggattctgtacatagcattatttgttacctattggggcataacaaaattccccaaaactttgcagcttaaaaaacattcagtatttcaccattgccatgagtcaggaatccaggcgtggcttgagtcct

SEQ ID NO: 882107 - DNA, 685 bp, Homo sapiens
caggagggggccaatattcaacattcttaaagaaaataattttcaaacgagaatttcatatccagccaagctaagcttaataagcacataaataaaatgctttccagacaaggcaaatgttgagggatattgtcaccaccaggtctgccttacaagagctcctgaaggaagcactaaatatggaaaaaaaaaaacaaccagtamcggccactgcaaaaacatacaaaaatataaagaccaatgacactgtgaagaaactgcatcaactaatgtacaaaataaccagctagcgtcataattataggatcaaattcacacataacaatattaacatttaatgtaaatgggctaaagtctccaattaaagacaagacagataaattggataaagaatcaagacccatcgatgtgctgcatcaggagacccatctcacatgtaaagacatacttaggctcaaaataaaaagatggaggaatatttaccaagcaaatggaaagcaaaaaacagtaggggttgcaatcctagtctctgataaaacagactttaaaccaacaaagatcaaaaaaggaaaagaaggacattacataatggtaaagggatcaatgcaacaagaagtgctaactatcctaaacatatatgctcccaatacagtggtatccacatactgggatatgagccaatata

SEQ ID NO: 882108 - DNA, 610 bp, Homo sapiens
aaaccacacaactaatggaaattgagtaacctgctcctgaatgactactgggtaaataacaaaattaaggcagaaataaataagctatttgaaaccaatgagaacaaagagagagacaacgaacccagaatctctgggacacagctaaatcagtgttaagagcagaatttatagcactaaatgctcacatcagaaagcaagaaagataaaaaatcaacacactaacatcacaatgaaaaaaactagagaagaaagrgcaaacaaattcaaaagctggcacaagacaagaaataactaagttcagagtggaactgaaggagacagagacatgagaaactcttcaaaaaatcaatgaatccagaagctggttttttgaaaagcttaacaaaatagactgctagctagactaatgaagaagaaaagagagaagaatcaaatagatgcaataagaaatgataaaggggatatcaccactgatcacatagaaatacaaactaccatcagagaatactattagcacctctatgcaaataaactagaaaatctggaagaaatggataaattcctggacacatacaccctcccaagactaaaacaggaagaagttaaa

SEQ ID NO: 882109 - DNA, 662 bp, Homo sapiens
ttattaaatagggaatcctttccccatttcttatttttgtcaggtttgtcaaacatcagatagttgtagacaggtggcattatttttgagggttctgttctgttccattggtctatatctctggtaccagtaccatgctgtggaaagatctaaaattgayaccctaacatcacaattaaaagaacaagagaagcaagagcaaacacattcaaaagctagcagaaggcaagaaataactaagatcagagcagaactgaaagagatagagacataaaaaacccttcaaaaaatcagtgaatccaagagctggtttttggaaaagatcaacaatattgatagaccgctagcaagactaataaagaagaaaagagaaaagaatcaaatagacacaataaaaaatgataaaggggatatcaccaccaatcccacagaaatacaaactaccatcagagaatactataaacacctctatgcaaataaactagaaaatctagaagaaatagataaattcctcaacacatacaccctcctaagactaaaccaggaagaagttgaatctctgaatagaccaataacaggctctgaaattgaggcaataattaattaccaaccaaaaaaaagtccaggaccagatgtattcacagccgaattctaccagaggt

SEQ ID NO: 882110 - DNA, 580 bp, Homo sapiens
aaaacattgctgaaggtgtttatcagctgcaggagctttttgtctataactatagggttttctagatataaaatcatgtcatctgcaaacaggaattgtttgactttctctcttcttgtttgaatgctcttcatttctttcttttgcctgattgctctttgccagggcttccaatactctgttaaataggagtggtgggtgagcatacttgtgccagttttcaaggggaatgcttccagcttttgcccattcagtatgatgttggctgtgggtttgtcatagatgacttttattattttgagstatattccttcattacctagtatgttgagagcttttaacatgaaaggatgttgaactgagatgatcatgtggtttctatctttagttctgtttatgatgaatcacatttattgatttgcatatgtcggacctaccttgcatcccagggataaagcctacttgattgtggtggaatagctttttgatgtgttgctggatttgatttgcacgtatttttttgagatttttgcatcaatgaccatcaaggctattgtcccaaagttttcttttttttttg

SEQ ID NO: 882111 - DNA, 580 bp, Homo sapiens
aaaacattgctgaaggtgtttatcagctgcaggagctttttgtctataactatagggttttctagatataaaatcatgtcatctgcaaacaggaattgtttgactttctctcttcttgtttgaatgctcttcatttctttcttttgcctgattgctctttgccagggcttccaatactctgttaaataggagtggtgggtgagcatacttgtgccagttttcaaggggaatgcttccagcttttgcccattcagtatgatgttggctgtgggtttgtcatagatgacttttattattttgagctatattccttcattacctagtatgttgagagcttttaacatgaaaggatgttgaactgagatgatcatgtggtttctatctttagytctgtttatgatgaatcacatttattgatttgcatatgtcggacctaccttgcatcccagggataaagcctacttgattgtggtggaatagctttttgatgtgttgctggatttgatttgcacgtatttttttgagatttttgcatcaatgaccatcaaggctattgtcccaaagttttcttttttttttg

SEQ ID NO: 882112 - DNA, 657 bp, Homo sapiens
agtaatttgtttacctcatacatttaaaatagttgatcagaagcaacaccacatcctaggctattttcaaaggactgaacgatatacatgcagatactcgtaccttattcccatctagtttctcagcattgatacagcactgatgacacttgggcaatgaaagttttgggttttgttttgtatcaaaaagtaaaactgaaacacagaccttaaaagctggctcatcaatttggttcccaaagattccatgtttaatctaagccagagacttctgcttctctgaccatttcctgagccctgattattgcattgcctttggatctgtgactacacccacttggagtctccagttgcctgttttcagcatgactcctcctaactctgctcatttagaaaycccattttcattgcaccctcccacttcacagtcttggcctatgaagaacagtaatgtgcattttaaaggattctgtggcctgccttcgcaatttacttcccatgggaagaaaagattcttctgggtcctgaagcagaacagaatgagagataggtgggtcagagacacacagatacatgtgtccaaatcaatactagctcttacaatcttttgagccaaaaagaccccagcataatgaaggggaaggaattcaatgtcat

SEQ ID NO: 882113 - DNA, 649 bp, Homo sapiens
cttgcctgacaatagtgcatatttatctgcatattctttaatggtaactttgaaattggcttttataactattctaataatctgtgcaatggttaaatctagtgtggaaattttaattatcaaagtaaagtgacagtgactggcaagatggctgaataggaacagctccagtctgcagcttccagcaagatcaacacagaaggtgggtaatttctgcatttccaactgaggcccctgactcatatcactgggactggttagacagtgggtgtagccaccggagggtgagctgaagcagggtggggcactgcctcacccaggaagtgcaaggggttggggaagttcctcccctagacaagggaagccatgagggaytgtgccctgaggaacggtgcactccagcccagatactatgcttttcccatggtctcagcaacccacagaccaggagattccctcgggtgcctacaccgccaggccctgggtttcaagcacaaaaccgggcagccatttgggcagacaccgagctagctgcaggagttgtttttcataccccagtggcacttggaatgccagagagacagaaccattcactcccctggaaaaagggctgaagccagggagccaagtggtctagctcagcagatcc

SEQ ID NO: 882114 - DNA, 678 bp, Homo sapiens
ttaaacgtggtagacattagtgaatatttgttgagtttaattggactagaagaatgactcagctaaaaagtatatggcactccattgaccaggcagttcaaataccactacattgaaaacatctgtaaaacaaaatattttttaatctctaataatgtctcaccttttaaaacaataattaattcaagaaaattctaattttagacatatgccagaatagctcatttcctctccaataatctgatgagtctcttgtgtatgttatggtgaccagcagatataataaccttcagttgatatcgatagatagacttcgtctttcattaagtaatgatctgattgccagtactttgaattacctttttgccactcaatggatattctacagatgttggagggagaggaaactgttaagtattcaatttacttgcttttctccttagtaactatcactcatatctcccttgttgtcagaaatcttcaattttatatagtacagattccttaccaaaartctcatactgcgagtcaaaacacttttgaggcttgcctgaaaccaaggaattgggaatgttatgtaatacagtataattaaaattacataagtacatttactgtatttgttcaaattttgaacagatattcatctttcaaattttatactaagatattaattgc

SEQ ID NO: 882115 - DNA, 678 bp, Homo sapiens
ttaaacgtggtagacattagtgaatatttgttgagtttaattggactagaagaatgactcagctaaaaagtatatggcactccattgaccaggcagttcaaataccactacattgaaaacatctgtaaaacaaaatattttttaatctctaataatgtctcaccttttaaaacaataattaattcaagaaaattctaattttagacatatgccagaatagctcatttcctctccaataatctgatgagtctcttgtgtatgttatggtgaccagcagatataataaccttcagttgatatcgatagatagacttcgtctttcattaagtaatgatctgattgccagtactttgaattacctttttgccactcaatggatattctacagatgttggagggagaggaaactgttaagtattcaatttacttgcttttctccttagtaactatcactcatatctcccttgttgtcagaaatcttcaattttatatagtacagattccttaccaaaaatctcatactgygagtcaaaacacttttgaggcttgcctgaaaccaaggaattgggaatgttatgtaatacagtataattaaaattacataagtacatttactgtatttgttcaaattttgaacagatattcatctttcaaattttatactaagatattaattgc

SEQ ID NO: 882116 - DNA, 594 bp, Homo sapiens
cctagcacagcacctaagacatagttggtgctcaaaaactcgttgaatgtgtgaataaacacccttgatttatacgagaccaaccaatgaaaatgaaaatccactcactgccttctgtctttgggcaagtgacccaacctctctatgcctcagtaaaatagggatcattgtgataggatcccttagtgttatgagaacacctggacacagggcaggggacatcacacactggggcttgtcggggggtgcagggctkggggagggatagtgttaggagaaatacctaatgtaaatgacgagttgatgggtgcagtaaaccaacatggcacatgtatacctatgtaacaaacctgcatgttgtgcacgtgtgccctagaacttaaagtataataaaatatatatataaagaatattaagagtaataaacaataggtaacattctaaatacctgcaaccctatacgtgagtcatcatccccattttacagataatgaaactgaggctcaaagtgctttagttattagcccaaggttccccagctactcagtggtagattcagaattttaactgccaagctctgggatggtccccaca

SEQ ID NO: 882117 - DNA, 594 bp, Homo sapiens
cctagcacagcacctaagacatagttggtgctcaaaaactcgttgaatgtgtgaataaacacccttgatttatacgagaccaaccaatgaaaatgaaaatccactcactgccttctgtctttgggcaagtgacccaacctctctatgcctcagtaaaatagggatcattgtgataggatcccttagtgttatgagaacacctggacacagggcaggggacatcacacactggggcttgtcggggggtgcagggcttggggagggatagtgttaggagaaatacctaatgtaaatgacgagttgatgggtgcagtaaaccaacatggcacatgtatacctatgtaacaaacctgcatgttgtgcacgtgtgccctagaacttaaagtataataaaatatatatataaagaatattaagagtaataaacaayaggtaacattctaaatacctgcaaccctatacgtgagtcatcatccccattttacagataatgaaactgaggctcaaagtgctttagttattagcccaaggttccccagctactcagtggtagattcagaattttaactgccaagctctgggatggtccccaca

SEQ ID NO: 882118 - DNA, 713 bp, Homo sapiens
tagtgaatgagcaagcctccatgagctggtgaccttgagctgtcacacagatgagaggaagctgtgatgtggtgggtggagggctctggtgccgtgcctggcagtgcaggcagtcactgtcttccaggcccactcttccttattcctggacatttgagggagtctaagggaggtccagaggaaacacaaacacctcattttaacttacagtataatcccccttcctagaaatgctttcaacacagtggcccacaaaaagtaaaatgacttggagtcaatttcttctactccttgcctttgattcccctgtgagtggcagggaaatacttaggaggagtaaagaggtgttgttaagagcctggatgattcagagttaggccatcagatgctctgcttaattaggagtgggctgtcctgatyaggtgtttctgctttgagcaggagtggttccatgagttagaggctgcgtcttggtttgcgtcctgactctgaggcaggtttggaggaaaaggaggtgactctaccacctcatacccccaaatctcgacagcttacctactaacattctcttctgactctaggttgccttttaggaacatctgttttgccttcatggtttgccttcgaatacaatatgttgaataggagagaacatggttttgtgaatgtctggccaagaattgggagagatttccttgcttttaccagtcctc

SEQ ID NO: 882119 - DNA, 634 bp, Homo sapiens
ctgatgaaaaagtgtttcagcaccaccaccactgcccagcgcccccactcagggcagattcatacagattaactcagagttggacctttcataccactagccctggttctttgacgtgataaccacccttgtctcatctgccttggaaatggtccccatctctccattgccttccacatgaggaaaaggaagcgagaaaattaaatggaaggtttcycaaaagctgggaggtcctccaacactctcaaccttcccctctatccttgacctcaccccaagcattgtcactctggcagtttgtttgcttgttttaccatagctgttgtttttttcctgaccttccttggacattatacaagtagagtcttggaaccacaaggaaccacagctccaactggcaaagggtggcttggagggctggctgacactgcccctcccaagctagaaccagggctggccttggagacatgagattcaggatcacggccggggagctttttagatggctggaagatagtcactttttctttcctctactttccaaacttcctattcaccatttattatatgattttaaagtgcattcactaatggacactatgctcaggaaacagaatcaagtttctgctttttt

SEQ ID NO: 882120 - DNA, 676 bp, Homo sapiens
ctgggtgcagtgttccaaacccatccctactctcctgacaattatttggaatccaggtcatctcctaagcacaggccaggagtggctgcgggaaggtattgctttgcttcatgaggacaacctcccgggtagaggttttggcatagggaagggaaggggtgggggctctttaaatcttgtttcccttagtacccacctgagtctgcacaatcctcactgtggcaaatgccccatattaaacctaattctacttaaccactatcrcctttagtattattgggctctttttgttgttacagtaggtcccttttgatcatcacgaatttcgggatttctgagcaaatccaattcactctccccaccacttgctgatactgaaggttttgttactaccctgtccccagcctttacccttccaaagctctctgtcagccaaagctcaccacctttcttggccttctccgatgtcccacacctccctccaccacagggttctatgcaccagcagccagaaccacatagagcataacataagaaccaggctgtgtgaggcgctcaatgagggtgtgcgactccaccccagacccgtcagggatccttcggggggcacttctgaaagcatcagctgtgactactcgcactttcaaaccacctctcatgggaggagagcacctcc

SEQ ID NO: 882121 - DNA, 623 bp, Homo sapiens
gtaaccatcaaccgaggagaagttacatatgtttgaaatagattttcattcctctgtgctatggaatagtttgcagcaactaaaaagagaatgagagaggtgtatgtatagtgacttaaaaaagggtataagttaaatataggacctcaaactataaaaatcctagaagaaaatctaggaaataccattctggacatgagccatgggaaagaatttatgactaagtccttaaaagcaatttcaacaacaacaaaaattgacaagtgggacctaattaagctaaagagcttctgcacagtaaaagaaactatcatcagagtaaacacaacttacagaatggaagaaattgttcacaaactatgcatcyggcaaaggcctgatattcagaatctaaaaggaacttaaacaattcaacaagcaaaaatcaaataaccccattgtgaaatgggcaaaaggcaagaacagacatttctgaaaaaaaaaaaaaaagatatacaagcagccaacaaacatatgaaaaaaatgttcttcatcactaatcaacagagaaatgcaaatcaaaactgcaatgggagaccatctcacataatcagaatggccattattaaaaagtcaaaaacacc

SEQ ID NO: 882122 - DNA, 661 bp, Homo sapiens
ctctttggacagctttactctgactccgttgacctctgactgtggttaagtttgaccaatggggagctgcagcaggaaaatggaatatggcacctggctgcttctcagccagagcactggagatggtgatatttctttctggaggctatagctcctattaatgattcttgttgacaccctagctccctccttaggctcccatagctagtccctctacttgctccttcagggcagtgcttgcagctcccactgttgctagccctgggtgctgtatcaccccttgttggttttctgtattcctttccacacctctataaatagtccttctttgaaattctcttttcctacatgtttggatatgccatttctttactgccaggactataattgatttaggggttgagtaagtaactcagatctggtcacatggagtagaaatgcatggacaaggatcatttgtagcatgctcgattatcatcaratcctgagctcttaatataaggattgagagcttcaactctgtaaaataacagtatcactgatgataataatagaaccaaacttctatggtactgctaccatgtaccagacactatgctaacaatttgccatgtattaactcattttagccttacaacatcttataagacaagtactattt

SEQ ID NO: 882123 - DNA, 527 bp, Homo sapiens
actccagccctcatgatcatgcccacacggaagaaccacattaaatgtcttcctatctctctctctctctctctctctctctctctgtcatgcagacacacacacaccccatgcaggactctagagaagtttctagagagtcaagataaggatagcaacattaccacagcaatgtctgaaagaaaaacgatcttagaattaacacagggcactgctttcagagctkcatttacctcccattgaggtctcatctggctcctcatgtaaataaggaataatcacaactacctcttccatgaagtcacccaagtgtattttaggaacgtaaaggcacaaaatctaacttattatcagccactgctgaggaggaaaagctcagaaaggatcaaagacacactggcatccttggggacccaaagatagtggtcagagtagaatgcctgaaactgagatgaagacggggttgccattactgataaggtctgggtatgagtgaggaagcaattcactgaggttggaagataagg

SEQ ID NO: 882124 - DNA, 527 bp, Homo sapiens
actccagccctcatgatcatgcccacacggaagaaccacattaaatgtcttcctatctctctctctctctctctctctctctctctgtcatgcagacacacacacaccccatgcaggactctagagaagtttctagagagtcaagataaggatagcaacattaccacagcaatgtctgaaagaaaaacgatcttagaattaacacagggcactgctttcagagcttcatttacctcccattgaggtctcatctggctcctcatgtaaataaggaataatcacaactacctcttccatgaagtcacccaagtrtattttaggaacgtaaaggcacaaaatctaacttattatcagccactgctgaggaggaaaagctcagaaaggatcaaagacacactggcatccttggggacccaaagatagtggtcagagtagaatgcctgaaactgagatgaagacggggttgccattactgataaggtctgggtatgagtgaggaagcaattcactgaggttggaagataagg

SEQ ID NO: 882125 - DNA, 457 bp, Homo sapiens
gtcagtttagagaggaacacaaccaacctgatagagctgaaaaacacaacatgagaaattaataatgcaatcacagtatcaacaggggaatagatcaagcagagaaaggaatctcagagtttgaagactatcattctgaaatgagacaggcagacaagaaaagataaaaamcaatgaaaaggaatccctccaagaaatatgggattatgtaaaaagaccaaacttacaacagattggggtacctgaaacggacagggagaatggaaccaagttggaaaacatactttggtatatcatccaggagaacctccccaaactaccaagacagggcaacattcaaattcaggaaatccagagaactccagaaagatactctatgagaagatcaacctcaagatacataatcatcagattcccaaaggtcgaaaagaaagaaaaaatgttaagggcagccaga

SEQ ID NO: 882126 - DNA, 566 bp, Homo sapiens
tagtttttaggaatgagacttctaagactctaagacatgtaaatatatttttccacgttgtatgtaattatgaaaaagttgacgtttatagtttatgtaatagaggagaagtttctttcatttgtttatgtaactctgttgagccacatatgcatgcaatcatttactcacacaaaaattatttgttgagaatatatactaaatattggtaacaaaaatacaaaacacagttatttccttcaagwtacagtctaatatgtgaggcaaaaattccaaataataaaatactctaagtgatattatagaataaaatgaaattctatgggagcacataagaaggatacctatggcagattggaaagacagagacttccagagagtagtagtgatgcctgagctctgtctttaaggatgggtaggagttgatgaagcaaataattgtgggaaaggcattccagctggagaaaagccattactggggaacttcaagtaaataaaacagtgcatctagagttcaatatttaataggggcagggggtagagatactgaaagatgaacatgaaga

SEQ ID NO: 882127 - DNA, 617 bp, Homo sapiens
agaaaaaagggaccattatttagaccccagaggcatgacataagtgtccaccatgaagtattggtttggctttcctgtaataatgagagaagaaataaaaagagccaagaggaaaacccattttgttgccaagctaataactcacatcatccaacatataaacgattaatgcgatatttaaaagagaagttgtagccttgcatgaggtgatctattggctaaatagtttctgtgacattttgaaaaagcaaaaaatagtaattgtcatacaagacgtttttaatgggagcccagaaggcagcaggcaaacccagagagaaaagcaacattagtaagctcaacacttgttactaagcaagayagaccaggacattttatttccttctgctgtgtcctcagatccaagctcacttccttagactcacttcagattttaggtgtggccacgtaagaggttactgtgtgtccaacataacatagctgagccgcttcagaaaactcacccttctgagaagatcctgactttccagttggtctttttaacttagagttacactcatggttctatttatctgggcaaaattcaagaggccactttcccttcccttcaagaggaa

SEQ ID NO: 882128 - DNA, 550 bp, Homo sapiens
ataaagaaaaaataataatattattaggtgacacaaataatgctaaccacctttctaagtgtcatggtaagtacagtgattattttctttttttctgactcttttttattgtattttttattttttttcccataggttattggggtatggtggtatgtggttccatgaataacttctttactggttatttgtgagatttgggtgcaccyatcacccgaagagtgtacactgcaccttatttgttatcttttatccctcgccccccaccctattaaataatagacaaaaaataatgggtttagaataaatgagttcaaatgaattgtcaaacgtatgtgggaaaagtggaatcagtttgtgagaaaaaggaaaaaacctcaacagaaatgctgataaagcatcatcccttcatggctagagctgccaggacactagaacaccaaaatcagctagggaaattttgtagaaatcccagatgtactaaatgttctgtgaatacacagagatataattataactgttacctgcatgtagagtaaagatgagaagg

SEQ ID NO: 882129 - DNA, 530 bp, Homo sapiens
tcttattcctctatataaatctgtcagtgctttaagcagtgaaagaaagatttttcattgaattttacagacttgatactaatgaaaaggatagcttgtaaaatataaatctctttttctataaaaaggacatgttgttgattctcttagaccttgaaccctggccagtgatttgaaaccaagcagtacctatctgcaaatctctagtaccaaattaatttggggtggggggtaacaggtttattgagaaataatgaacacrccatgcaattcactcatttaaagtatagaattcattaactttagtattttcagagagttatgccgtcatcattacaattaattttagaacattttcatcaccctaaaaacaaaccccacatcatttagccatcttcactagttttcccttcctccctcagccctagggaaccacccaccttctttgtatagatttgcctataagcctctgaaataaaaagcaagtggtctgctgggactggcttatttcacttagcataatttttcat

SEQ ID NO: 882130 - DNA, 562 bp, Homo sapiens
ccaaatatctcatgttttcactcatgtgggagctacatattgggtgcacattgtcataaaggtgggaataatagacactgggaaataagaatggggagggacagagtgggccagggttgaaaaactacttcttgggtcctatgctcacaacctgtgtgatgggtttaattgtactgcaaacctcggtatccctcaatatgcctttggaagaaacttacagaggtaccacgttaatttagaatacaaactagaaaaaaaaaagaaaagtttactataagtagagaacagaaatttctttttaagataaaatttattsaagtaaaaaatggattaaacttttataaagggcaaagttttctaagaatttcaaagcaatgcattcattgcaaaagatggctttaattacttaatctttttttgtgtgtgtgtgtgtgagacagggtctcactctctcaccaggctggagtgcagtggtgcagtcttggctcactgcaacctccacctcctggcttcaagcaattctcctgccttagtatcccaagtagctgggactactggtgca

SEQ ID NO: 882131 - DNA, 557 bp, Homo sapiens
tctttttaagataaaatttattgaagtaaaaaatggattaaacttttataaagggcaaagttttctaagaatttcaaagcaatgcattcattgcaaaagatggctttaattacttaatctttttttgtgtgtgtgtgtgtgagacagggtctcactctctcaccaggctggagtgcagtggtgcagtcttggmtcactgcaacctccacctcctggcttcaagcaattctcctgccttagtatcccaagtagctgggactactggtgcacatcaccacgcccagctaatttttgtatttttagtagagatggggtttccccatgttggccaggatggtcacgatctcctgaccttgtgatctgcttgctttggcctccccaagtgctggggttacaggtatgagccaccatgcctggccattgtttaacctttgtactaataaaacactacctttctaaaatcatgtatatgcaatagatcaatattaactgcatttttgtcagattactctaaacagcattacacatatacatcctctgttatctaaacttaaaat

SEQ ID NO: 882132 - DNA, 658 bp, Homo sapiens
tacattgcccactcaaagcaattgaggatggaacagtcttggggctggagctcattatttggaatgataaccacatctgcacagagaggacctgataagatgttgtccttccatgtatatctgggaatcctgtgtagggtctctctgtaaggacaggggcagtgttggctccttggcctctagttagcttcacaagtagtctagtaaaggctttgcmaacttgtcaccatctgtggacattctggccagctcttgttttcaccctactgacttcttcagacactaggcttttgctttagaccattcatggttttcttcctcttcaaatcagtaatcaataaatcgccttcaagtcaataaatttccactcctttaggaaaccctgatcttctggtcacaccaaggtttaattaactggtttgattgtttttctgttttcttggattttttttccttcttcctgggggtttctagtaattctagtttgatgtctcactttctccattttttatttcttagttttcttctgtgattattttcactgcagctgcagggcctaatcctgggttggcagagaactagcacttactctgccctaattggaatccaggagagatagcaggttccctagtgtgaaaatgtgtttgctcctctctgc

SEQ ID NO: 882133 - DNA, 605 bp, Homo sapiens
ttaagcttatttctaatttttataatgctgttgtaaatataattttttttttttttgagatggagtcttgctctgtctcccaggctggagtgcagtggcactatctcaggtcactgcaacctgcaccttccttattcaagcgattctccaacctcagcctctcaagtacctgggatcacaggtgcgcgccaccatgcccagctaactttttggtatttttagtagagacagtgtttctccatgttgaccaggctagtcttgaacttgtgacctcaggtgatctgcccgcctcggcctcccaaactgctgggattgcaggcatgaaccacygcacccagccaaatgtcattctttttaaaaatttcttttcttttgttttctctttcttttcttttcttttctttctctctctttctttcctttctttcttttttttgagacggtgtctcactctgtttcctaagctggagcacagtggcacaatctcagctgactgcaacctccaccttccaagttcaagcaattctcctgcctcagcctcccaagtagctgggactacaggtgtctgccactatgcccagctaatttttgtatttttaatagcg

SEQ ID NO: 882134 - DNA, 632 bp, Homo sapiens
ttttttgaattctcctttgaatagcttgtaactattcaaacctcttattggttctataattaattctttttctaattagctttttaaaaatcagaattgatattagaccaatcagttattaatgaggagatgaaattgagttgtttgtacactttatctaagatagtgttatattggctaactcaaatcagtagttcagcaaatgcagagtcagagcttcttcagcgtggaactctcttgtggttcttgaagatgctatttcttttctttttttttttttttttgagacagcatcttcctctgtcaccaggctcgagtgcagtggcacaatctcaactcacagcaacttctgcctcccgggttcaagcatttyttttgcctcagcctctgaagtagctgggactacaggcacatgtcaccatgcccggctaagctttgtattttctgtagatacggggtttcagcatgttggacaggctggtcttgaacttctgaccttgtgatccactggccttggactcctaaagtgctgggattacaggtgtgagccaccgtgcctggcctcttttttcagtctttaataaactgctgccatcatttcagaccgcttgctattttaggcacttagaaat

SEQ ID NO: 882135 - DNA, 630 bp, Homo sapiens
aatggttttccttatggcactggctagtagcccaactgaatcctgaatcaggttgtggtggcttgtcatctgcacccacacacactcagctgcagtgaggactgaatcaggttgtggtggcctgtcatctgaccccccacacacagccacagtggggactgaatcaggttgttgtgagctatcatctgagcccacaaactcagccgcagtgaggggactgctgtgaaaacagtcgacatttccctttagaagctttggtgggaggcaagagggaagtgctgccctgcaggccccgtctaacagttggtcattcccatggggcgcctgttacagttctgtgattagtgcccagtcctggtscctgaaaacggcgcccagtcctggtccctgagaatggtgtttgtgtccttttactcctccctctgggcttttgtcattctccatgttctttttccttcagtgtctgggttgccgttgaccagctttgccctgctttttcttatggtcaatagggtattcaatggcttctttttcattttttttccttttcttttcttttcttttcttttttttttactttggccttttgagacaagaaattatttctttatattttctctaaattctgtt

SEQ ID NO: 882136 - DNA, 522 bp, Homo sapiens
tctagatagctttctgcagcttttccatcagtacttgctgctttatcttgcgcttttatgttatggagatgacttttttccttaaacctcaagaaacaagctcttctagcttcagactttccttctgcagctgcctcaccactctaagtcttcatagaattgaagagaggccgggtgcggtggctgtcacacctgtaatcctagcactttgggaggccgaggmgggcagatcacctgaggtcgggagttcgacaccagtctgaccaacgtggagaaaccccgtctctactaaaaatacaaaaaaaaatagccaggtgtggtggtgcttgcctgtaatcccagctacttgggatgctgaggcagggagaatggcttgaacttgggaggcagaggttgcgatgagccaagatcacgccattgcactccagcttgggcaagaagaatgaaactctgtctcaaaaaaaaagaaaaaaaagtaaaaagagagttaggcttaggcttaatggaatgttttttgttttt

SEQ ID NO: 882137 - DNA, 522 bp, Homo sapiens
tctagatagctttctgcagcttttccatcagtacttgctgctttatcttgcgcttttatgttatggagatgacttttttccttaaacctcaagaaacaagctcttctagcttcagactttccttctgcagctgcctcaccactctaagtcttcatagaattgaagagaggccgggtgcggtggctgtcacacctgtaatcctagcactttgggaggccgaggcgggcagatcacctgaggtcgggagttcgacaccagtctgaccaacgtggagaaaccccgtctctactaaaaatacaaaaaaaaatagccaggtgtggtggtgcttgcctgtaatcccasctacttgggatgctgaggcagggagaatggcttgaacttgggaggcagaggttgcgatgagccaagatcacgccattgcactccagcttgggcaagaagaatgaaactctgtctcaaaaaaaaagaaaaaaaagtaaaaagagagttaggcttaggcttaatggaatgttttttgttttt

SEQ ID NO: 882138 - DNA, 629 bp, Homo sapiens
taagactacctgcttaacaaacaaaacacctaattcctcagtaacatttacaaccaattcaagtccactttcaaataacactatcccactatcccacaaataagactacctgcttaacaaagaacacacctaattcctcaatatacatttacaaccaattcaagtccactttcagataacactatcccacttcacgggtgactacctgcttaacaaagaaaacacctgattcctccctcccatccttccattccattccttgtattattgttccttatttcacttgtgtataagcatgcataatctatctgtgtgtatttattattatctacaaacttattggtcagatcaattatgaataaatacatgtttttattgtaccacaatgcctccctaccatccttccattccattccttgtattagtgttactcatttcaattgtatataagcatacataatatatctgtatttgttattgtctatgawcttcttggtcagatcaattaagaataaatacataggtttttattgtaccacaattctttctttaatgctctttttaaaaaaatgttgatccaggtttcagttatatatcttttgtttccctaaagaatttaatttaacatt

SEQ ID NO: 882139 - DNA, 620 bp, Homo sapiens
gcaagagggaaatccacccccatgatccaatcgcctcccaccaggccccccatcaaacactggggattacaatttgactcaaggtttgggtggggacacaaacccaaaccatttcaacttcatattttaggatgttagaaggggagccttcacagagtgttttagtttcctattgctatggtaacaaattaccacaaagttactggcttaggaaaatacaatttaattatcttctggttctggaggtcagatatccaaaataagtcttgcagagtgtattaattttctagggcggccatgaagcaagtacaaactggtgtggcttaaacatcagaaatttgtcgtctcacagttctggaggctaaaatctgagatcaaggtgtcagcaggattggtgtgaataataatctgtttcatrcctttccactagtttctcatggtttgctggcaatctttggcataccttagtttgtagtgcctcaccacaatctctgctttcaccttcatgtgatgttcttcctgtgttcatgtctgtgtccaattttcacttctttatcaggacactggtcatattaaattaggtcctgccctaatgacctcattttaacttggttatctct

SEQ ID NO: 882140 - DNA, 614 bp, Homo sapiens
tcaaggatctagaaccagaaataccatttgatccagcaatcccattactgggtatatacccaaaggattataaatcattctactataaagacacatgcacatgtatgtttattgcagcactattcacaatagcaaagacatagaaccaacccaaatgctcatcaatgatagactggataaagaaaatgtggcacatatacaccatggaatactatgcagccataaaaaagcatgagttcatgtcctttggagggacgtggatgaagctggaaaccatcattctcagcaaactaacagaggaacagaaaaccaaacaccacatgttcccaatcataagtrggagttgaacaatgagaacacatggactcagggaggggaacatcacacactggggcctgtcagggggtggggggctaggggaggaatagcattaggacaaatacctaatacctaatgcatgcgaggcttaaaacctagatgacaggttgataggtgcagcaaaccaccacggcacatgtatacctatgtaacaaacccgcacattctgcacatgtatcccagaacttaaagtataataaataatgaaaaaaagaaaatattagtagctgagcata

SEQ ID NO: 882141 - DNA, 605 bp, Homo sapiens
tcttattacactcatagagttctgcaaacatctccacaatctaattttagaatttttttcatctccctctaacctaggacaaattgaaaatgaaaggagcactaataataattatgcaagaacaataggtatgaatttggtatatccagagtctgtccaaggcaaactgaagtgaagcatcactgaggtagaagatacaggtattggagagaaagctgtataacttaattcaaaataggaggctgcatgaaggttttaaaacagataatcagaaaccttcttargtaggggaagggtgtataaattggtatagccatttttgaaaactatttggcaatatctatcaaagctgaacatatgcatgtactatatgacctagcaattccactccaaaatataccaatggaaatgactactaaccgtatgatgatttcatttatataaacttcaaaaacatgcaaaagtaatctataacattacattccagatcaggatggtggttaaccttggataagaattagtgactagaaggagaggcataaagggaattttgaggtgctggctaatgttctacttcttgatctggatgctggtacatggttatg

SEQ ID NO: 882142 - DNA, 589 bp, Homo sapiens
aatacaggctagtagtaccccaggggaagagagctccattcctttaacaagtcacttgtcttttcatgacattaggtagtctttcagtgttcaaaagacacccacattcaacacacacacaattaccactctttgctctaagcagcttttgtaatgaccatatctcctccccagcacttcaaaattggagggtgtgcctactaacaaacatcctggatggtctatcagagtaagtgaattccttaaaaaagaacagacacccaagatgcgagcataaatcactccaataattccatagtatctggccacaggcatctcagctatatcttcacttaactaggtcattttagggggcttacaatgtctaggacaccacttattttttagagcyttattttgttggggatcaattcagaaaaaaaagtgaagcttcatgggacatgtatgtattgtcaccatttagagaaaatgacagaagtgaaggaaaaaagaagcatcctacttataaggtcaatttggctcatgcgtgtctgtgatctcaggatcttacagttcacacactgccacacagatgttccaaccagtccat

SEQ ID NO: 882143 - DNA, 652 bp, Homo sapiens
atccatataaagtgcttagcgtagtatctggcatattgtaaatgtccagtgataactgtaaaaagctatgttatgtgtggaaccaagtctagagatccctaactgtattccacagcccttcaaaaactaggccatctcccatgcctctcaagtttttattatttgtttattattgtttcttaaacaatgtgaccaataaatgattcagttcaatcctgaaaacactgaagctctgagcaatctatccccaaggaactatgctcctgttaacacagctaggcaagtctcctccaattcaccattttaataattttcattaaaccccaggctggcaaaacctaattatcagggtgaaggaatcaccaactcatgaccccagatgaaactgcctgttaaccatgttggtagaaatatgaacattatgggtctgctaccatttctaccaaagagtgaatgaaccaagttcatcagaagttgggttttttttggccctgattaayaagaactaaatcttaaaacactgccttgttttgatatatgctgagcctgtctctccagttaaactatgcatggcttgaggacagagaagagctctcataaatcttttgtcattttttgggacaaaattcactttctaaacaatataaaatag

SEQ ID NO: 882144 - DNA, 640 bp, Homo sapiens
atgacctcatcttgattacatttgcaaggaccctatttccgaatgagagcacatgtagatgttccaggggttagaatctcaacatatctttttggtgagcacaattcaactcccaacaggctccagcaagaatgtcaccagcctctacaggcagtgatcaaagagactggaagcactaattttagagccagtggaatactggaattgtggctttccctttactactgtgtgtatgtgatgttgaaccaactacttttcccttttcctctaagctgaaagtgtyctcaggtataaaataggaacagtgtcagtatgtgctgagattattctttctcctcttcttccagacatactccttcctgaagttaggcatagtcatttgactttctgcagctaatccaagcagaaattatgtgtagcactccagtgtagaagtattgaagacttggcacccaattccccttgctctcttcccctcccatggctagtcctgaagacatttgttgagatgacagtatcatcctccattggctttggttcctgagtaataatggtaagcagagacccctgactacctgcattgaaaagacagtatgaacaataaataaatctttgttccattaaccattgagattttagt

SEQ ID NO: 882145 - DNA, 636 bp, Homo sapiens
agcaagaacctactctgagattttcatcagagaaatgagaataaaaatggtactcacattataagattattgtacatattaaatgcattaatattaaaaatttagaacaatggctaatttattgttgacattcaataattttaaggattattatcatcatcatcatcatcatcaccatatttagtatacattcactgcaagtaacaggattcttaagcagaggtagtggtcattagtactgttcaaaaagtatttctgactgcgcctgcttaggggcacttggcagaattgcactttttttactctcttgtgggtagaattgtgtgattcattctgacagggaagttgtgartggaagtgatatgcttcacttctgggataagcatttgattgttgatatgagatcatccagacctcattcttctttcaggaacagaaaccagcaattttgcaggtgctcctgctccatcaacccaggtctctaagtgactgcaataaacagaagttctactgatccaccgtagacctgtagcatgagtgagaaataagcttttgtggtgttatacccctgagacttcggattgtttgtgacattactggtgcataatctaacttatcctgactaatacagccacc

SEQ ID NO: 882146 - DNA, 669 bp, Homo sapiens
  misc_feature 352: n = A,T,C or G
caaaaactggaagcattccctttgaaaaccggcacaatacaaggatgccctctctcaccactcctattcaacatagtattggaaattctggccagggcaaaaaggcaagggaaataaataaagggtattcaattaggaagagaggaagttaaattgtttctgtttgcagatgacatgattgtatatttagaaaaccccatcatctcagcccaaaatctccttaagctgataagcaacttcaggaaagtctcaggatacaaaatcaatgtgcaaaaatcacaagcattcgtatacaccaataacgggcaaacaaagagccaaatcatgagtggattcccattcacaatcaatncaaagagaataaaatatctaggaatacaacttacaagggatgtgaagtacctcttcaaggagaaataaaaactactgctcaaggaaataagagaggacacaaacaaatgggaaaaacattccatgctcatggataggaggaatcaatatygtgaaaatggccatactgcctaaagtactttatagattcaatgctatgccaatcaagctaccattgactttcttcacagaattggaaaaaactactttaaagttcatatggaaccaaaaaagagcctgcatagccaagacaatcctaagcaaaaagaaaaagctgga

SEQ ID NO: 882147 - DNA, 571 bp, Homo sapiens
tttaaaaagagtttgcatctcctctgtggttcttccctatttgctggctgcaagcaggtgatgattaaatcctaggatataaaagtctagacgcctgaactgctgcacttagaagagtctccactgaccagtaacctctacctggatctattacataagcaagacataaacttctttgttatttgattctacttacattttgtatacctgtcagtatagacagtatgtttagctctcctgatatttagaaagcacagtagttttgctggatgtcttaccattacaattgatttataatttatgcacacccatgatgctgaatttttaggtagtatktttcttcctataatatttttcaataatagctattttgtattttcctttgaatacaacatatgcttttttcttctcttatcacaattattaatggacaaagcccatttttccaataatatctctataattgagatgtgttttacaatccaggatatgttacaactagaattggaggtgtgtgttgtgtgtgtgtgtgtgtgtgttgttgttgttgttgttgttgtttgtactcggt

SEQ ID NO: 882148 - DNA, 613 bp, Homo sapiens
tacgactgttgctgttgaccttgatcacctggccaagagtaaaattaattttagtaatacattttgtttgctgcaataatagctaaaatgttatcatctcaacatgaaatcactataaaattattaacgagatattttactttctttttttaatactaagacttcaaaatcaggtgtgttctatacttgtaacacatcacaatttggattagacacatggccagggtccaatagctacaagtggtagtggctaccatgctaaacagggcagttccaagaggctcctacctcccagggttccagcagaaaatggagcgcaagctctttccctttgagttccccaaacatatgtaaggattaaactcagttaattttgaattttcccctctgccttcttcattccctcttcccaaggrctgatccaagttctcccccacctggttttagctaatctcagagatcctaccataatgtaacactctggtttcttgtccagcttcttcttctgttggtggtcccccttctatccctctgctcatggaataattttgcataactggaagacacgtatcacagtagctcaacagtaattatccaagtcttttaccctcac

SEQ ID NO: 882149 - DNA, 620 bp, Homo sapiens
tataaagaaaacagaaaataaatagaataaataagtaaattaattagtatattagtgatgagtgctaaggaggggggcaaaatccagagtggaaagagggatgtaaagtgttagggatggaatagaaattgggtcagagaaggccttactgagaaagtccctgagtcaggagcaggctttgaatcttaggaacagaaaggagaccaatagactatttctaaattcttascaagtgcagatttgttttttctttctcaatgtgtcctcctgatcccctatttgtccctgttgtgatctctttaggcaaggtccaagccgaaactgaacagatgaggaggagtaagccaggtgcagggagttgggagggtgaagagaagagggataaggagaaagttctagtatgtggtaaaggcctactgttcctgaagagtcatcttatgccagactagaggacttaaactgtccttggaatccacatttgtggccttggtgattatttccctactctacctcttggggtcccatgtcactattttcaggcttagctttccaaacctggacaatcttttaagacccagtaaaaatgccatctttcttaggcgtgggcaagaagcccatct

SEQ ID NO: 882150 - DNA, 659 bp, Homo sapiens
ggaatgtataaatataagttgatcttattcattgataaaataaaggtcattgtaactattgatctttttcgattgtctgaaaatggctgtattttgtcgtttttgaatacaacttagtgggtagaaaaatagttttgtttacttccatgcctttgcctttgccatttgttattgcaggtgagatttttccacagttaataattgtcctttctagctctcattaccctygagatttctctttaaatgtgatgttataaacttttacttccatggtctgggcgtagagttattttcattaactttcttggcatctgttttatttataatatttatgtatctcttcacttataaaacattttctaacatttcttttatcctctcattctaaatctgctcttttatatgattttgcagatttttatttatttattttatttatttattcttttgagacagaattttgctcctgttgcctaggctggagtgcagtggtgtgatctcagctcaccacaacctccgcctcccgggttcaagtgattctcctgcctcagccttctgagtagctgggactacaggtgcctgccatcacgcccggctaattttatattttcctctgggattagtgctgggattacaggcgtgagccaccacccccggcc

SEQ ID NO: 882151 - DNA, 659 bp, Homo sapiens
ggaatgtataaatataagttgatcttattcattgataaaataaaggtcattgtaactattgatctttttcgattgtctgaaaatggctgtattttgtcgtttttgaatacaacttagtgggtagaaaaatagttttgtttacttccatgcctttgcctttgccatttgttattgcaggtgagatttttccacagttaataattgtcctttctagctctcattaccctcragatttctctttaaatgtgatgttataaacttttacttccatggtctgggcgtagagttattttcattaactttcttggcatctgttttatttataatatttatgtatctcttcacttataaaacattttctaacatttcttttatcctctcattctaaatctgctcttttatatgattttgcagatttttatttatttattttatttatttattcttttgagacagaattttgctcctgttgcctaggctggagtgcagtggtgtgatctcagctcaccacaacctccgcctcccgggttcaagtgattctcctgcctcagccttctgagtagctgggactacaggtgcctgccatcacgcccggctaattttatattttcctctgggattagtgctgggattacaggcgtgagccaccacccccggcc

SEQ ID NO: 882152 - DNA, 631 bp, Homo sapiens
tcataaatagctcttattattttgagataagttccatcaatacatagtttgttgagtgtttttagcatgaaggagtgttgaattttatcaaaggcctttttctgcatctattgagataattgtgtgctttttgtcattggttctgtttatgtgatggatgatgtttattgatttgtgtatgttgaaccagccttgcatcctagggatgaagccaactcaatcacagtagataagctttttgctgtgctgctggattcggtttggcagtattttattgagggttttcacatcgatgttcatcaggtatattggcctgaaattttctttttttgttgtgtctctgccaggtttcagtatcatgatgatgctagcctcataaaatgagttagggaggagtccctctttttctatgtttggaatagttttagaaggaaaggtaccagctcctctttgtacctctggtagaatttggctgtgaatccatctggtcmtgggctttttggttggtagggtattaattactgcctcaatttcagaacttgttattgctctattcggggatttgatttcttcctagtttagtcttgggagagtgtatatgtcctggaatttatccatttcttctagattt

SEQ ID NO: 882153 - DNA, 602 bp, Homo sapiens
tgcccaaattcaaaaccagtaacctgtatcatgttctagaagttaattatgatgggttggtttagttaaattctctaaacttccctccagagcaaaaagtgtgctcaaaatctactgatggaaggattctgacagcagcataacttaaggatattttaagtaatattgtgtgtgtgagtgtgtgtgtgtgtgtgtgtgtatgaaagagaaagagagagagggagagtgtgtgtgtgtgtgtgcgtgtgtgtgtgtgtgtgtgtgtgtgtgtgtctcctgtccactgtatttgcatggacaacaaaagtaagaaggaaggtagagggagcatgcctgcattcccrtagagattattagctggcttggtgatgataaaatgttttcccaagaggggcaggactaggacaagaaaggatctgggttggtaggaagatgagttatcagatgatgtactctttactaaatttgaaagtaggggtggtctgtgaagctcatctgtcttggagtaactcttagatgtttactcatagttagatacagtcaggatattagaagttatttccagaagactccaccaatcctcttcatccaaggtatgcatt

SEQ ID NO: 882154 - DNA, 562 bp, Homo sapiens
gaaatgtgaaaataaataaaggttaaaatgcagttcaaaccccatgaaacacttcaagctttgagtgagttgtgactgtggtctgtgccatgtagcttgtggctgtaccttctgatttttaattttatagccactgactttattgatctaaaaatcttcacagagacaatgactgttgtgtgaaagaaaaaggaaccaaatggtgtgaaacactagaagtgagggtaggggtgagggacggggccagaaatccatcaggaaagttggcaagtatcaccaggcagaggaaaaggaagggaggtgcatgaaagagttcgaattgcaaagaagttgaaacggttaggggagaaaactcccaaaacacycctagagtccactggacacaagcacaacaacagcaatcatttcctttgtagaggacagaggaggagtcccctacttggctgcaaactctggagacgcaatgctggggctgggcattgagggcttcccagaaagcatcacaagaaggcgtcacaccactcttgaatgcatccaaagcagtcctggggctgcttggctt

SEQ ID NO: 882155 - DNA, 513 bp, Homo sapiens
agcaattcttctgtctcagcctcctgagtagctggggctacaggcttgggccaccattccccgctaatttttttgtaagtttagtagagacggattttcaccaggttcgccaggctggttttgaactcctgacctcaaataatccacctgcctcatcctcccaaagtgttgaaattacaggtgcgaggcaccacagctgacctgtaaagacctcttaaaaattagttaaaaaacaaacaaaacagaaaargagaaagaagaaacatccactcattaaaaaaaaaaaagaaaaagaaaagaaaagaaaaaaaggcaaaagacattattttacaggtctagtgccctgtgcccctcactgtaatgggggtggatatgggcttcacaggacatgaaattcatcaaacagttgctggttgaaggtgggaaaatcttgcgggaccgacctcaagagcagatcctgtggtgcactgtttcatcctgtagccctggaaagaaaacctggctgtgccgtgc

SEQ ID NO: 882156 - DNA, 625 bp, Homo sapiens
atacatgtgattccaaatataatgcacagcactggaatatttaatgccagaatacagtatctgattttcttttgatttcaacctcttctgctgtagaatggaaaaataaggccatatatataaaatatatatcttttatgtatacagatatatgaaatatatatcttttatacataaaggtgtatatgtataagtttatatattatatataatatataaatataaattatatatacatagtatatatatttttttgagacacagtctcgctctgtcacccaggctggagtgcagaggcatgatcaaggctcaatgtaatctctgcttccttggctcargtgattcttacacctcagcctcctgagtggctgggattacaggcaagcatcaacacatctggctaatttttgcatttttagtggagaagggtttttgccatgctggccatggctggtttcaaacccctggccttaagtgttccacccatcttggtctaccaatctgctaagattacaggcaagagcaactgcatccaactgattttgattcattctatctcatatatcgccaatgactctttctggaagttgatgctagcctaatcccattatgcatacttcagggc

SEQ ID NO: 882157 - DNA, 598 bp, Homo sapiens
agtttcagttttctgcatatggccagccagttttcccagcaccatttattaaataaggaatcctttccccattgcttgtttttgtcagtttttttcaaagatcggatggttgtagatgtttggtgttatttctgargcctctgttctgttccattggtctatgtatctgctttggtaccagtatcatgctgctttccttgctgtagccttgtattatagattgaagtcaggtagcgcgattcctccaactttgttctttttgcttaggattgtcttgactatgcgggctcttttttggttccatatgaacttcaaggtagttttttccaattctgtgaagaaagtcaatggtagcttggtggggatgacattgaatccataaattaccttgggcagcatggccattttcacaatattgattcttcctttccatgagcacggaatgttcttccatttgtttgtgtcctcttttatttcgttgagcagtggtttgtagttctccttaaagaggtccttcacatcccttgtaagttggattcctaggtattttattctctttgaagcaattgtgaatgggagttcactcaggatttgactc

SEQ ID NO: 882158 - DNA, 598 bp, Homo sapiens
agtttcagttttctgcatatggccagccagttttcccagcaccatttattaaataaggaatcctttccccattgcttgtttttgtcagtttttttcaaagatcggatggttgtagatgtttggtgttatttctgaggcctctgttctgttccattggtctatgtatctgytttggtaccagtatcatgctgctttccttgctgtagccttgtattatagattgaagtcaggtagcgcgattcctccaactttgttctttttgcttaggattgtcttgactatgcgggctcttttttggttccatatgaacttcaaggtagttttttccaattctgtgaagaaagtcaatggtagcttggtggggatgacattgaatccataaattaccttgggcagcatggccattttcacaatattgattcttcctttccatgagcacggaatgttcttccatttgtttgtgtcctcttttatttcgttgagcagtggtttgtagttctccttaaagaggtccttcacatcccttgtaagttggattcctaggtattttattctctttgaagcaattgtgaatgggagttcactcaggatttgactc

SEQ ID NO: 882159 - DNA, 598 bp, Homo sapiens
agtttcagttttctgcatatggccagccagttttcccagcaccatttattaaataaggaatcctttccccattgcttgtttttgtcagtttttttcaaagatcggatggttgtagatgtttggtgttatttctgaggcctctgttctgttccattggtctatgtatctgctttggtaccagtaycatgctgctttccttgctgtagccttgtattatagattgaagtcaggtagcgcgattcctccaactttgttctttttgcttaggattgtcttgactatgcgggctcttttttggttccatatgaacttcaaggtagttttttccaattctgtgaagaaagtcaatggtagcttggtggggatgacattgaatccataaattaccttgggcagcatggccattttcacaatattgattcttcctttccatgagcacggaatgttcttccatttgtttgtgtcctcttttatttcgttgagcagtggtttgtagttctccttaaagaggtccttcacatcccttgtaagttggattcctaggtattttattctctttgaagcaattgtgaatgggagttcactcaggatttgactc

SEQ ID NO: 882160 - DNA, 598 bp, Homo sapiens
agtttcagttttctgcatatggccagccagttttcccagcaccatttattaaataaggaatcctttccccattgcttgtttttgtcagtttttttcaaagatcggatggttgtagatgtttggtgttatttctgaggcctctgttctgttccattggtctatgtatctgctttggtaccagtatcatgctgctttccttgctgtagccttgtattatagattgaagtcaggtagcgcgattcctccaactttgttctttttgcttargattgtcttgactatgcgggctcttttttggttccatatgaacttcaaggtagttttttccaattctgtgaagaaagtcaatggtagcttggtggggatgacattgaatccataaattaccttgggcagcatggccattttcacaatattgattcttcctttccatgagcacggaatgttcttccatttgtttgtgtcctcttttatttcgttgagcagtggtttgtagttctccttaaagaggtccttcacatcccttgtaagttggattcctaggtattttattctctttgaagcaattgtgaatgggagttcactcaggatttgactc

SEQ ID NO: 882161 - DNA, 634 bp, Homo sapiens
ttttagacccagaagctgtcagaggctagcaaagcttatactctttgagaagcagctgttgacctgctactgggctttacaggaaacagaacacctttgtcttaatcatgatgtttttatgaggccccaaattcctaatatgacttgggtcatgagctccctcaaacctcattggatagggtacactcaagaaagtaaatggaaatggcacatacaagaccaggctaagccggaaccaaaacaggtatcatttttaaatgaggatgtgcaaaacttgccagctcagcaaaccactgagcaagtcctgcagatarggaaggaaacctcccctgcccaatggggcaaatcctttaaagaaccaagcccagacgatcagagacatgcttggtttgctgatgattccaccaaatatattgatgggacccgatgctgggaggccgtgtcttataatcctgttaaaaacataagcatttctgaggaagggaggggtgttagcagccagctggctgaactagaatctgttctctgaactattcaggaggaggccagagggatttgttacttgtatacctactcttgcttagcagaaaatggtcttactacctagttgcccgaatggcaatgaaacaaatgg

SEQ ID NO: 882162 - DNA, 634 bp, Homo sapiens
ttttagacccagaagctgtcagaggctagcaaagcttatactctttgagaagcagctgttgacctgctactgggctttacaggaaacagaacacctttgtcttaatcatgatgtttttatgaggccccaaattcctaatatgacttgggtcatgagctccctcaaacctcattggatagggtacactcaagaaagtaaatggaaatggcacatacaagaccaggctaagccggaaccaaaacaggtatcatttttaaatgaggatgtgcaaaacttgccagctcagcaaaccactgagcaagtcctgcagatagggaaggaaacctcccctgcccaatggggcaaatcctttaaagaaccaagcccagacgatcagagacatgcttggtttgctgatgattccaccaaatatattgatgggacccgatgctgggaggccgtgtcttayaatcctgttaaaaacataagcatttctgaggaagggaggggtgttagcagccagctggctgaactagaatctgttctctgaactattcaggaggaggccagagggatttgttacttgtatacctactcttgcttagcagaaaatggtcttactacctagttgcccgaatggcaatgaaacaaatgg

SEQ ID NO: 882163 - DNA, 593 bp, Homo sapiens
gaaaactgagttatcttagtggactcacagcctcacaagtgttttggatcttggtcagggagtcacaaacccacttaaggacaacatccacttattagagccaattttccaacttttgactgcctctgggtgtgagtttcagaacctcatttatgttccatgttsgtgtgggagaatgacaattttgacagatggctgggctcaggcaggagcctttcatcctgcaggtgttgagacaaaggatatgatacaacacctaaaatatgctgggtgcaggcaaaagaggagactcatattagctggttgctaggtccagttatatgtcaccacctccctttttggcagggctaaggaaaaagaggagagtcagagctaaagaaatgtcataatgtccctgcgggtaggacctatacatgagagttgcaacacctagtcattgaacccagccatatattataatacacaatgtatacaaggcccaggcaagaaaggagagaatatcacataggtactgtgtccagcaatatgtcaccataccccccagaggggaggctccaggcaacaggataacattacctaagtgaagtgcccag

SEQ ID NO: 882164 - DNA, 655 bp, Homo sapiens
aaatcctcaataaaatactggcaaaccaaatccagcagcacattaaaaagttcatccgcaacaatggagttggctttgtccccaggatgcaaggttgattcaacatatgcaaatcaataaatgtgactcatcacataaagagaactaaatacaaaaaccacatgattatctcaataaatgcagaaaaagcatccaataaaattcagcattctttcaggtttaaaattctcaataaactaggaagtgaagaaacatacctgaaaataataagagccatatacaacaaacccacagccaatatcatactgaatgtgcaaaagctrgaaacgttccacctgaaaactggcacaagaaaagaatgccctctttcaccactaccgttcaatatagtatcagaagccttggccaggaaaatcaggccagaggaagaaataaagagtattctaatagaaagagaggaagtcaaattatctttgtttgcagatgacctgatcctacatctagaaaacctcattgtctcaggcccaaagcttcttaaggtgataagcaacagtagcaaaatctcaggatataaaatcaatgtgcaaaagtagctagcattcccatgcacaaacaacaggcaagcagggagacaaatcatgaatgaactttcatt

SEQ ID NO: 882165 - DNA, 655 bp, Homo sapiens
aaatcctcaataaaatactggcaaaccaaatccagcagcacattaaaaagttcatccgcaacaatggagttggctttgtccccaggatgcaaggttgattcaacatatgcaaatcaataaatgtgactcatcacataaagagaactaaatacaaaaaccacatgattatctcaataaatgcagaaaaagcatccaataaaattcagcattctttcaggtttaaaattctcaataaactaggaagtgaagaaacatacctgaaaataataagagccatatacaacaaacccacagccaatatcatactgaatgtgcaaaagctagaaacgttccacctgaaaactggcacaagaaaagaatgccctctytcaccactaccgttcaatatagtatcagaagccttggccaggaaaatcaggccagaggaagaaataaagagtattctaatagaaagagaggaagtcaaattatctttgtttgcagatgacctgatcctacatctagaaaacctcattgtctcaggcccaaagcttcttaaggtgataagcaacagtagcaaaatctcaggatataaaatcaatgtgcaaaagtagctagcattcccatgcacaaacaacaggcaagcagggagacaaatcatgaatgaactttcatt

SEQ ID NO: 882166 - DNA, 655 bp, Homo sapiens
aaatcctcaataaaatactggcaaaccaaatccagcagcacattaaaaagttcatccgcaacaatggagttggctttgtccccaggatgcaaggttgattcaacatatgcaaatcaataaatgtgactcatcacataaagagaactaaatacaaaaaccacatgattatctcaataaatgcagaaaaagcatccaataaaattcagcattctttcaggtttaaaattctcaataaactaggaagtgaagaaacatacctgaaaataataagagccatatacaacaaacccacagccaatatcatactgaatgtgcaaaagctagaaacgttccacctgaaaactggcacaagaaaagaatgccctctttcaccactaccrttcaatatagtatcagaagccttggccaggaaaatcaggccagaggaagaaataaagagtattctaatagaaagagaggaagtcaaattatctttgtttgcagatgacctgatcctacatctagaaaacctcattgtctcaggcccaaagcttcttaaggtgataagcaacagtagcaaaatctcaggatataaaatcaatgtgcaaaagtagctagcattcccatgcacaaacaacaggcaagcagggagacaaatcatgaatgaactttcatt

SEQ ID NO: 882167 - DNA, 623 bp, Homo sapiens
acaacactaagttgtgagtgactctgttattttaaaacgcagctcacctctcagtgcctcagaagcaggtactataacaccgggtttctaacaaagagatgggattccagctcaagtctgtttccctgtgcttacttaaaggtagtaatattctcagaaaggtttaggaggtagcttctggattagtacggaattgcttaaaggaaaaatgtatggaaaatcactgggcatgaacaactattttttcttgctacacacagatcacatgtgcaaatttggggacagttagtacaaaacatgtgatggaaatttgggcttttacatcagtgagcttatttcacacagactccagttgaccatattggttccgaccaattttagccactttttagaagtctcataagtggaataaatttcattctttcaacaagttgtatcttttcttatctgtcattctgcaaactgaagaatttctgytagtcattggatgaactctttggggacctggttctagtttctgtcaaagggaaaacaacaaatgtgataggttatcacttctgacttagttcagacttctataccaaaaaacatagactaggcaacttataaataaaagacattag

SEQ ID NO: 882168 - DNA, 656 bp, Homo sapiens
gaggcttgcctttcagcctctgaataataattgatactaaaattgagaagttttccagacaccagcttcctgaaaggagcatccagtcagaagacaagatgaggtcagtagcgaaggtgactcaggctgagtggggaagtccaccagygtatctgaagactgagctaggggagggtttccctaatgttcactccttctgccctccatatattcctctacttttcccaaacttccctctgacatcctccaaactttctatcttcccagggctttcttgccagggagtctaatgaagtaaaagctttaaaattgctttgattttaaaaataattttattgattcttaaaatgtaccgacacaaaattagaataccaattcttaaaatgcttaaaaagtaaattaagtgtaagtttacatttaattatcttatttgattcctaattaaaatacaaaaaaattttttttgaaacaaggtcttgctctgtcacccagactggagtgcagtggtgagatcttgggttattgcaacctccaccccctaggttcaagcgattctcatgcgtcagcctcccaagtagctgggactacaagcacacaccaccaattggctaatttttgtgtttttagtagatatgaggttttgccatggtgcccac

SEQ ID NO: 882169 - DNA, 656 bp, Homo sapiens
gaggcttgcctttcagcctctgaataataattgatactaaaattgagaagttttccagacaccagcttcctgaaaggagcatccagtcagaagacaagatgaggtcagtagcgaaggtgactcaggctgagtggggaagtccaccagtgtatctgaagactgagctaggggagggtttccctaatgttcactccttctgccctccatatattcctctacttttcccaaacttccctctgacatcctccaaactttctatcttcccagggctttcttgccagggagtctaawgaagtaaaagctttaaaattgctttgattttaaaaataattttattgattcttaaaatgtaccgacacaaaattagaataccaattcttaaaatgcttaaaaagtaaattaagtgtaagtttacatttaattatcttatttgattcctaattaaaatacaaaaaaattttttttgaaacaaggtcttgctctgtcacccagactggagtgcagtggtgagatcttgggttattgcaacctccaccccctaggttcaagcgattctcatgcgtcagcctcccaagtagctgggactacaagcacacaccaccaattggctaatttttgtgtttttagtagatatgaggttttgccatggtgcccac

SEQ ID NO: 882170 - DNA, 656 bp, Homo sapiens
gaggcttgcctttcagcctctgaataataattgatactaaaattgagaagttttccagacaccagcttcctgaaaggagcatccagtcagaagacaagatgaggtcagtagcgaaggtgactcaggctgagtggggaagtccaccagtgtatctgaagactgagctaggggagggtttccctaatgttcactccttctgccctccatatattcctctacttttcccaaacttccctctgacatcctccaaactttctatcttcccagggctttcttgccagggagtctaatgaagtaaaagctttaaaattgctttgattttaaaaataattttattgattcttaaaatgtaccgacacaaaattagaataccaattcttaaaatgcttaaaaagtaaattaagtgtaagtttacatttaattatcttatttgattcctaaytaaaatacaaaaaaattttttttgaaacaaggtcttgctctgtcacccagactggagtgcagtggtgagatcttgggttattgcaacctccaccccctaggttcaagcgattctcatgcgtcagcctcccaagtagctgggactacaagcacacaccaccaattggctaatttttgtgtttttagtagatatgaggttttgccatggtgcccac

SEQ ID NO: 882171 - DNA, 577 bp, Homo sapiens
aaacctattatcattcttcgtcagttcatttagtcctgttttattcatacttgttttactctatcttgtaagcacatatgcttctctgctagaattagagaaataacttagtccactgatagtgtttcaaagttatgtaagtcattctatcagaagcctgtttataggagtacttggtacagttatttctgtgggtctctgagacattcttattttgttgaagacaaagccctgtggcctggaactgatttgcaagcacttttagaaaaatagccgagtacaaccaaaagtatatactaatgaaaaagtaagccatgctttcaggtatgtagttagttgatacactaaaatattcttttatataatgcaaacagcactaacactttaaaaaatagaattatatyatgcacagtgagggcactggaaatttttttaaaaactttaatttctggattatttacgttaataacaattatgtaaaaaatttaacctaggggaagctaagcatatgtcttattatttaatatgacaatatgcaaaataggcacgtttccatatatgatactaggacataaag

SEQ ID NO: 882172 - DNA, 570 bp, Homo sapiens
accatttgaaaatgaaaaaagggtgggagaaaaggatttatatttgtggaaaatcaaaagggtggttacatgtacttaccccggaaattgaaatagtgaaattccttttaatcatttgggcaattaagttttggcaattttctctttcaatttaataagtcagaaaagatgtttggcagtgtttggtataagatgattcccagttattcaagaccaattatttagtgccctctattgctgtcctaytgatcagctattttaatttaaacactaattattaaaggtttaaatataattttatttataattatagctaccataatattattccacttaaaatttattttaaagtgggtgtcatgtgtggttacccttttccatgtgtgtccaagaatattctggactgtcacacacacacacatatgtgcacacacatacagtgactagatggaacttctatattttggatagaaaaacatcatcagatatgtagaaatatcaatcaactgatgaaaatttgcagaaagatattccgtggatatttcacattctgtttgacaggccagaaga

SEQ ID NO: 882173 - DNA, 659 bp, Homo sapiens
agaaaatcacagtattagggtgtgagtgacccgattttccaggtgccatctgtcacccctttccttggctaggaaagggaattccctgaccccttgcacttcccgggtgaggcgatgcctcacctgcttcggctcatgcttggtgcactgcacccactgtccgacaatccccagtgagatgaaccagtacctctgttggaaatgcagaaatcattcatctcttgcattgcttatgctgggagctgtagactggagctgttcctcagacttctttttttttctaagataaaaatactttaatgtgtatgctgttttcttcagttagtaatgtgaaaagactgtatttatatggtgaaattctcaggaccctcaattgtttatagataggctaaattatttgtgtcattacttgcaaaccttcttgaatgcggtggaggttatgttaagaaataaagtttatataatgtctaatttcatattgtaattgcaktcttccacaaaccttttgaaatcccttgtatttcaaacccatctggaagagcaggatcagattctaatgtgtacaacacaggatcctctcatcgaaatgatcaagtggcctgtgtttaggatttccagtggcagccccacacacaatacctctaatgaggcatcctgaa

SEQ ID NO: 882174 - DNA, 626 bp, Homo sapiens
cttgaccatatttggataaaacatcagtattgatcttaagtactattagcgagacctgcctatattaccagtagccaaggcagcagaagcagaaacagctggaaaaactacaaattggggccatcaggggcagatgtatcttggcactcagggctacagaacatgtggaaagaggcagcaacagcacctcctgtgatttttatgcaaagattgaggagggactcagagctagcatgtcagtttgttacccttgtgattttcgtccatgctcttgattattttttttttttgaggttatatgtccaggagactcaagagttatggaagaaaataatggagcaagaaaagatggagcagaagaaagggagaatggcccattattgggaaaattctgtctatagaaagaacactgtgattggttaaaacaaaagcagcaacaataaaattaccaaacgcctctgtgttctggacagtgtgctggacagaaggracatagagacagtgggacaaagtcatataactctattcatatctttatcttagctcttatattataatcatctacttacctgtctttctaaaaagactgagctcttctaaggcaaggatactgtcttttgtatctt

SEQ ID NO: 882175 - DNA, 639 bp, Homo sapiens
tagattagtctactttattgccttggtaaatatagaatgttgaatattaattttaatcattgctaatgattggggtcattaaaaagttccagaatcgtcatctttacaaatagtctctgagtatactgctgtgcatgttgagggcttaggcctttaaatttgtgaggcaaatctatggcctacagtgtgccctatgaacattgcttttaggaataaattgatgttaagaatgtactagtttacaatcccaccaacagtgtaaaagtgttcctatttctccccatcctctccagcacctgttgtttcctgactttttaatgattgccattctaactggtgtgagatggtatctcattgtggttytgatctgcatgtctctgatggccagtgatggtgagcattttttcatgtgttttttggctgcataaatgtcttcttttgagaagtgtctgttcattgtggaaggcagtgtggcgattcctcaggggcctagaactagaaataccatttgacccagccatcccattactgggtatatacccaaaggactataaatcatgctgctataaagacacgtgcacacatatgtttattgcggctctattcacaatagcaaagacttggaaccaacccaaattc

SEQ ID NO: 882176 - DNA, 639 bp, Homo sapiens
tagattagtctactttattgccttggtaaatatagaatgttgaatattaattttaatcattgctaatgattggggtcattaaaaagttccagaatcgtcatctttacaaatagtctctgagtatactgctgtgcatgttgagggcttaggcctttaaatttgtgaggcaaatctatggcctacagtgtgccctatgaacattgcttttaggaataaattgatgttaagaatgtactagtttacaatcccaccaacagtgtaaaagtgttcctatttctccccatcctctccagcacctgttgtttcctgactttttaatgattgccattctaactggtgtgagatggtatctcattgtggttctgatytgcatgtctctgatggccagtgatggtgagcattttttcatgtgttttttggctgcataaatgtcttcttttgagaagtgtctgttcattgtggaaggcagtgtggcgattcctcaggggcctagaactagaaataccatttgacccagccatcccattactgggtatatacccaaaggactataaatcatgctgctataaagacacgtgcacacatatgtttattgcggctctattcacaatagcaaagacttggaaccaacccaaattc

SEQ ID NO: 882177 - DNA, 593 bp, Homo sapiens
tccaagaaatgagaatgctgagtctcattccaccactaactacctctgatagttaattttgtctctctgagcagttgactttgtctctggctcccatatttcctgtttgtaaaaatcgtgaattatagtatctgcatgtcaaggggagaagccatgaattgtctctcaaatgtaagaaatatatttctcatagagtttggttctagtagagggatttagttctaccacctaaaatgatctccactctccaccctccaccctacctacctacatgtacacatgctcacagactcactgaagacatcctccacatcttaaagcwttccattctttctctctgggactagcctgagggaaaactgggaagtaactaaaatttgtccttgatgctcttggaattatttgtattccatataattattagtatttcatataatactaaccacataagttagttatgttacagataaggacatggagaatcaaaatattttaattcgtttgtctaatgtcacctgaccaatacaatgtagaattggaatttgaacaaggtctgtttgatttcaaagtccatggtctttccatttcatcac

SEQ ID NO: 882178 - DNA, 602 bp, Homo sapiens
tatactccaaaattacagtaagtaaaaacatatagacaaatggaacagaatagagagtccagacacagggccatacacctataaccatctgatctttgacaaagctgacaaaatcaagcaatggggaaaaaactccggattcaataaatggtgctgggataactggctagacatatgcagaaaattaraactggaaccctttcttacacattatacaaaataaactcaaggtggattacagaattaactgtaaaatccaaagctataaaaaccctagaaggcagcttaggtgataccattctggacataggaatgggcaaatacttcatgatgaagatgccaaaagcaattgaaacaaaagcaaaaattgacaaatgggacctaattaaactaaagagcttctgcacaccagaagaaactatcaatagagtagacagacaacctacagaatgggggaaaatattcacaaactatgcatctgacaaaggtgtaatatccagcatctaataggaacttaaatttgcaagaaaaagcaaacaaacccattaaaaagtgggcaaagggcatgaacagacacttttcaaaagaagacatacatgtag

SEQ ID NO: 882179 - DNA, 602 bp, Homo sapiens
tatactccaaaattacagtaagtaaaaacatatagacaaatggaacagaatagagagtccagacacagggccatacacctataaccatctgatctttgacaaagctgacaaaatcaagcaatggggaaaaaactccggattcaataaatggtgctgggataactggctagacatatgcagaaaattaaaactggaaccctttcttacacattatacaaaataaactcaaggtggrttacagaattaactgtaaaatccaaagctataaaaaccctagaaggcagcttaggtgataccattctggacataggaatgggcaaatacttcatgatgaagatgccaaaagcaattgaaacaaaagcaaaaattgacaaatgggacctaattaaactaaagagcttctgcacaccagaagaaactatcaatagagtagacagacaacctacagaatgggggaaaatattcacaaactatgcatctgacaaaggtgtaatatccagcatctaataggaacttaaatttgcaagaaaaagcaaacaaacccattaaaaagtgggcaaagggcatgaacagacacttttcaaaagaagacatacatgtag

SEQ ID NO: 882180 - DNA, 595 bp, Homo sapiens
  misc_feature 325: n = A,T,C or G
atttcaccaaagaactttatgtgaatcttctgtctcttttttgatagttcttaaaagttaataggggccgggcacagtggctcacgcctgtaatcccagcactttgggaggcccaggcgggaggatcaccaggtcaggagatcaagaccatcctggctaacacggtgaaaccccgtatcttactaaaaatacaaaawattagccgggcctggggggcgggtgcctgtagttccagctactcgggaggctgaggcaggagaatggcttgaacccgggaggcggagcttgcagtgagcagggatcacgccactgcactccagcctgngtgacagagccagactccttctcaaaaaaaaaaaaaaaaagttaataggaaaaagataaatctaagcaaattctcactggttgctttacaggccttatccttactttatctgagtacatccagcctatgattctcccaggaactgtcctgggagcagacagatgaagcagggccatctgtcaacttggaaaagatcccacaccagagacagacaggtagcattttgctctaggcactgattgagccatttacaggggatctgcacatggt

SEQ ID NO: 882181 - DNA, 595 bp, Homo sapiens
  misc_feature 325: n = A,T,C or G
atttcaccaaagaactttatgtgaatcttctgtctcttttttgatagttcttaaaagttaataggggccgggcacagtggctcacgcctgtaatcccagcactttgggaggcccaggcgggaggatcaccaggtcaggagatcaagaccatcctggctaacacggtgaaaccccgtatcttactaaaaatacaaaaaattagccgggcctggggggcgggtgcctgtagttccagctactcgggaggctgaggcaggagaatggcktgaacccgggaggcggagcttgcagtgagcagggatcacgccactgcactccagcctgngtgacagagccagactccttctcaaaaaaaaaaaaaaaaagttaataggaaaaagataaatctaagcaaattctcactggttgctttacaggccttatccttactttatctgagtacatccagcctatgattctcccaggaactgtcctgggagcagacagatgaagcagggccatctgtcaacttggaaaagatcccacaccagagacagacaggtagcattttgctctaggcactgattgagccatttacaggggatctgcacatggt

SEQ ID NO: 882182 - DNA, 622 bp, Homo sapiens
  misc_feature 587, 606, 612, 615, 616, 617: n = A,T,C or G
aatagagataaccaagttaaaatgaggtcattagggcaggacctaatttaatatgaccagtgtcctgataaagaagtgaaaattggacacagacatgaacacaggaagaacatcacatgaaggtgaaagcagagattgtggtgaggcactacaaactaaggtatgccaaagattgccagcaaaccatgagaaactagtggaaaggyatgaaacagattattattcacaccaatcctgctgacaccttgatctcagattttagcctccagaactgtgagacgacaaatttctgatgtttaagccacccagtttgtacttgcttcatggccgccctagaaaattaatacactctgcaagacttattttggatatctgacctccagaaccagaagataattaatttgtattttcctaagccagtaactttgtggtaatttgttaccatagcaataggaaactaaaacactctgtgaaggctccccttctaacatcctaaaatatgaagttgaaatggtttgggggtttgtgtccccacccaaaccttgagtcaaattgtaatccccagtgtttgatggggggcctggtgngaggcgattggatcatggnggtggnttnnnctctt

SEQ ID NO: 882183 - DNA, 657 bp, Homo sapiens; identical to SEQ ID NO: 875883

SEQ ID NO: 882184 - DNA, 614 bp, Homo sapiens
ctatggtctcaacttatctaatccctttggtacaatttggcaagatcttcttgggattgttataagaattttattgatcattctcctttcagatttcaataagacccagaaatgggtgtagttatggtgttgtgcatgtgtaacgtaactcacagttttttagggaggtatgcctaaattgcattataatgctttgaaaccagaaagaaaaatgaagccaggttttgtgcctcacacctgtaatcccagcacttcaagaggcttaggcaggaggatcacttgaggccaggagtttgagaytgtaatgagccatgattgcatcatggcactccagcctgggcgacagggtgagaacttgtttccagaaaagaaaagaaagaaaacaaaagaaaagaagttaacatgtttcctcttccatttttctccaccatttttccccacgatttttccttttctgccaatctccacttcactgtgaacaaagagggcctctatcatcaggaaatctactcagctctgctggggtgctgacggaagagaaagagcagaagtaacctcaaagcaggttctaaataaacagtctcctacttaatgtaggataagtctttattttg

SEQ ID NO: 882185 - DNA, 677 bp, Homo sapiens
gcatcattcttattgatccagcatgggctggattttatttaaggagaactgcaaaatgttattaccttcaggaggagaaactgaaaacagagcttttcccgtgtgtatttcggaaatgttctaccttaccaaggggggaatggattgtggatttaggagaacggagagagattatcatcctgttgtgtgaaagggacatgtacaggctgtttacagcataattgtttatcagcaggaaagaatgctcatgattataagaggccacgggcctcagaggttagaacattggaaagatagtctgacctgttccagtccaactttgtgtaaagcctctagttgctcagaatccatttgtcagtctgtaaaatgggctaaaagaatctgttagcaatgtgtaagctttgtttagcatttgtttcacatcctgggagtcttggataaaggatgttatagaattaaaaacacacacacacaaagatcttatttaatactgtgcatgttgkggggtagtgtccagtatttattattgctcttcattcagcattctggaagggacaagttatgtgctgagtgaagcaagacgaagtaacctcataattctcattaaccattactatatctctcaggtcaacgttgcatatattgactttaacgttcacctgttggggacaggtcta

SEQ ID NO: 882186 - DNA, 642 bp, Homo sapiens
gagccaagcaggcggcccaagggctgtgttgccttggggtggacagaggcattaggtgggggatgagatggggagactggtctgcaagctatgattatgctgcttgggttaaaatgcgtgagaatccaccttcatgctgcttgctgtagacgcatgactgaagaggccagaacgagtcagtctccatctccccttcctgaagatgcctggccattcattctsttcaggagaggagagagtatctccttgtacaaagcttccaacccacagtgaatcctgcaaggacccttccattttcttacactttgccatttattttttccttgcctagtaattcagttctacattgtcctagccaaatagagtcacataactatatggctagtcatgcatgacatgactatatggctagacatgactacgtggcttaaagacagttacattttttggtgtgtgtgtgtgttcttttctttgtattatttcaggagtcataacactcataggtaccaaggcatgcagaagtcatctcttgtcatccttaaaggatgcaccatagacaaaactgatctcaacgaagatattctagagttaagtctgtgtgagtcagctagggcttctgtaaaaactgccacaaactcagtg

SEQ ID NO: 882187 - DNA, 642 bp, Homo sapiens
gagccaagcaggcggcccaagggctgtgttgccttggggtggacagaggcattaggtgggggatgagatggggagactggtctgcaagctatgattatgctgcttgggttaaaatgcgtgagaatccaccttcatgctgcttgctgtagacgcatgactgaagaggccagaacgagtcagtctccatctccccttcctgaagatgcctggccattcattctcttcaggagaggagagagtatctccttgtacaaagcttccaacccacagtgaatcctgcaaggacccttccattttcttacactttgccatttattttttccttgcctagtaattcagttctacattgtcctagccaaatagagtcacataactatatggctagtcatgcatgacatgactatatggctagacatgactaygtggcttaaagacagttacattttttggtgtgtgtgtgtgttcttttctttgtattatttcaggagtcataacactcataggtaccaaggcatgcagaagtcatctcttgtcatccttaaaggatgcaccatagacaaaactgatctcaacgaagatattctagagttaagtctgtgtgagtcagctagggcttctgtaaaaactgccacaaactcagtg

SEQ ID NO: 882188 - DNA, 564 bp, Homo sapiens
ctggctgcagggcaacaggctgtcccactgttttctaaactgttgggccctcatgatgccacaagttaaacaatcatcttctcaaactgtggatctgtggaattcagaaaatgttgccagagttttagcaatgagatgagcaatagcttttggcctcagtttgtctttcctgaaaaagtctaagttattttaactagatgcgtgtagcaaggaatgaatgtgaataacctaccactgtgtttgggagaaagaagacaatagaagctctgcacgtaacattctctgcctagaccacagctcayagtgtcaacttaactacattattaccacaactagtgtgtattaattcggcctaccttcaggttgttgatttgggaggcaaaggaaggtagaaagtgtatataaaagattgccttgaataattctacaaattttcagaaggaaaaatctaaatgaacaatggaagttttaatattaaaaccccagttttgcaaccatgaggctgaatatgccaaatagcctaaattagcagtagggagaagactcaagaaaactacagcaacc

SEQ ID NO: 882189 - DNA, 543 bp, Homo sapiens
tttttagatcttatttataggagagtagccaatcactccctcaaaacaaattttcttttaatctagacacaattctaaaaagtcatgatagctaatatctttctattcaaggtgtgttgcaaagaccagcagcaaaggcatcacctggttgctgatagaaacacaaatttttagttcccattccagagctaccaaagcagaatctgaattttaagaagatccccagattaattgtagtacactaaagtacgagaagcatyggcctaaaatgctagtacaaggtaatttgcctgagctttggcacactgggaatgtcttgctttgtttggctaggagttgatggaagcaggaagactgactacaacgacagtagtaaaaaaggcaacccacatacagcatgccagtgagaaaagacagagaaaaatttatgaacagctggctcaaaatgaaaaaacaaaaagcacctacactacttcgtgtaggcaagaagctccatacaccacagcaatccctaagggtctctgtgtatcgcagcgacgtaga

SEQ ID NO: 882190 - DNA, 543 bp, Homo sapiens
tttttagatcttatttataggagagtagccaatcactccctcaaaacaaattttcttttaatctagacacaattctaaaaagtcatgatagctaatatctttctattcaaggtgtgttgcaaagaccagcagcaaaggcatcacctggttgctgatagaaacacaaatttttagttcccattccagagctaccaaagcagaatctgaattttaagaagatccccagattaattgtagtacactaaagtacgagaagcatcggcctaaaatgctagtacaaggtaatttgcctgagctttggcacaytgggaatgtcttgctttgtttggctaggagttgatggaagcaggaagactgactacaacgacagtagtaaaaaaggcaacccacatacagcatgccagtgagaaaagacagagaaaaatttatgaacagctggctcaaaatgaaaaaacaaaaagcacctacactacttcgtgtaggcaagaagctccatacaccacagcaatccctaagggtctctgtgtatcgcagcgacgtaga

SEQ ID NO: 882191 - DNA, 575 bp, Homo sapiens
gccccatacccaaacatgaaactaggaggagtagaaggagcaagacgccaactggatggagagccaggaaactgggatatactcctaagtccctcctgaacagtgcagtgcagtaatttggtactgtacatctgacccacacctgaccatgccaatttagggtttccttctctttacctaaaagggaactggagcacataattcaaagagcctccaaatatgatttgacaaatgcttgattacatcgtgtagctagagagaagagatgctccttgtattttcaatatactgataatgtgattttttgaggtgcttttacaagcgctgtcctatcaaacatataatcttctctgtttatagaatatttaaacatggatgtgtgaatttaggtgagaaacttgtamtttctctgtgaagggtgtgtttgtctctaaagattagggagtccagtgctaggaataaagtttaatttccatattgcggtgagaataatgtgaaaatgtctacaagagccattcattttgaaagctggttgtatctatgtaataaatattcatgataatatcttccatata

SEQ ID NO: 882192 - DNA, 578 bp, Homo sapiens
ccttctgttaactaagtgattatttccagccacatccatatttcttgctgttctatactccaagcatcgtgtggaatggaagttctcatctatccccaagttaaagtttatcaggtgacattggtcatagtactacccagtagcagagaaatgttttttataactggctgcttgtccaaaggtaaatgtggctccttctacatctttgatcttgaaccttcacttcgaaggtcattgtgtcaataagactgagttgatcaatacatgtttaaattgtttctggagaaactaccaatatggctaataaatgatcacttccatgtatttattcccaagatgtaataagaaataatctgacagaactctaatgatwgttgtgtgagagaaacaaagatgaatatctcattggcacttacattgtgaagacagtagttagtaagagagagaccttggaagttggaaggattttaatcagtggcttaatgagaagagagcagggagttcattgatttaattttgtagccagcatagcctgcagtgttctaagtcaaagagataaaaagacagaaagagattca

SEQ ID NO: 882193 - DNA, 578 bp, Homo sapiens
ccttctgttaactaagtgattatttccagccacatccatatttcttgctgttctatactccaagcatcgtgtggaatggaagttctcatctatccccaagttaaagtttatcaggtgacattggtcatagtactacccagtagcagagaaatgttttttataactggctgcttgtccaaaggtaaatgtggctccttctacatctttgatcttgaaccttcacttcgaaggtcattgtgtcaataagactgagttgatcaatacatgtttaaattgtttctggagaaactaccaatatggctaataaatgatcacttccatgtatttattcccaagatgtaataagaaataatctgacagaactctaatgatagttgtgtragagaaacaaagatgaatatctcattggcacttacattgtgaagacagtagttagtaagagagagaccttggaagttggaaggattttaatcagtggcttaatgagaagagagcagggagttcattgatttaattttgtagccagcatagcctgcagtgttctaagtcaaagagataaaaagacagaaagagattca

SEQ ID NO: 882194 - DNA, 620 bp, Homo sapiens
ggtgaagacaaatttttggtaaaatctaacaggagttaaattcataaatttttcaacctaagaagtacttgctttttccggaggacttccatatctctctcatttgagggcaaataataatcaatactgtttgtgtggggaagaggaatggctggtggaaaattctttggctttgattttgttcaagataagcaaaagtcagaaaaattttaaattaataccgtgttcacttcatgcaaacaaacaaacaaaacatccttaagcaaatataaagaaaaatccccatgcatttctgtttccctcacaaatattgaaactacaaaaaaagtttgaattttttaatttgaccacattctcttcactactcctaagaatatgtcatctttccattccttcttttatcttttcatctatgaatagtaaaataagcttcacatacttggttctgagaaaggtccgtgcttacaggaagcastatagaaaagttaatatacaggttcaattctttgaaggatgctataggttagaatagacaaaaacttgttcattattcaacatagacctccttcattttaaacaaaatttcttggttatatatcagttttactaatgtttatttt

SEQ ID NO: 882195 - DNA, 623 bp, Homo sapiens
tggtcagtggtcccacttccacttccaccccttgattcctggaccgatgaatcctggctttgggagaaagagcaccatatattggacgctgattcagagtatacacagccttctggagaactttgcctcagccctgcaaagtattgtcacctagttggcattgtaattgtgacttcaaaaggccattccactgttctataaatccaggtgcttcaggatgatgggaaacatggtaagaccagtgaattccttgagcatgagcccactgccacaattttttaggcataaagtgagtgccttggtcagaggcattgctgtgtggaataccatgatggtggataaggcattccatgtgtccagggatggtagccttggcagaagcattgcatgcaggataggcaaacccatatctggagtaagcatctattcyagtgaggacaaacctctgccctttccatgatggaagaggtccaatataatcaacccaccaccaggtagctggctgatcaccccaagtaatggtgccatatggaaatctcagtgttggtctctgctgctggcaaattaggcactcagcagtcactgtagctaggtcagccttggtgagtggaagtccatgttgc

SEQ ID NO: 882196 - DNA, 498 bp, Homo sapiens
ccctgaaatgcctatcatttctctttcaccagaagtctccttggggaaggatggaagaaatattaacagcataaattgtcagtagtgtagtggggtccttccttaaggggaccgggactccccttcattcaaggggtactgggtctgtaaactggatcaagtctggaaattgattgaggggccatgwttctctgtttttataatccaaattggtcttttgtccatttgacctagaagttttctgcttatgtaaattaaggaggaatgcaataggcttcctattaattttaattctaggaacactgtgattaattagctaatgcccaaactctacacaagtcagagtatttttaatgctgctttgcctctgctgtttattacagtagctatgctcaccttgattttgatggttcagtgccaccacttggcttctgctgcctgggatccaattattcccactgtatttaaattttgtagttgagtgactgtggttcccac

SEQ ID NO: 882197 - DNA, 657 bp, Homo sapiens
tcatctcagcactattcacaatagtaaatacatgtaatcaacctaaatgcccataaacggtagactggataaataaaatgaggtatatagatacatatatataccatggaattctatgtagccataaaaaagaaggagatcaagtcctttgcagcaacatggatggaactagaggccattatcctaagcaaactaacacagaagagaaaaccaaataccacaggttctcacttataaatgggagataaacattaagtacatatggactcaaagaagggaaagatagacactagggcctagttgagcagggagggtggraggaaggtggggatcaaaaaactacaaatggggtactatgcttattacctgggtgattaaataatctgtattaccaaccctccataacacacaatttacctatataacaaacatgtacatatacccctaaacctaaaatgaaagattttaaaaaataaaatataataaaaagtaaccccagagagaaattgttagcacaagtggtaatatacgaaggtcagataggaaaatgatatagaattatattccaagataatggataacccaaatactcctaagggagaactgagtgaaaagatatgaatcgaaataataagaaccacctatggcaaaaccata

SEQ ID NO: 882198 - DNA, 606 bp, Homo sapiens
actcacagaattgaacatttcttttcattgagcagtttggaaacaccttttggtagtatctgcaaatggatattttgagcgctttgaggtcaatagttgaaaagaaaatacattcacataaaaattagacagaagtattccgagaaacttgtttgygatgtgtgcattcatctcacagagttcaacctttcatttgattaagcagtttggaaaaactctttttgtagtatctgcaagtggatatttggagggctttgagtcctatggtggaaaatgaaatatcttcacagaaaaactaggcagaagcattctgagaaacttctttgtgatgtgtgcattgaactcaaagagttgaaactttcttttgattgaacagttcagaaacagtctttttgtaatatctgcaaatggatatttggagccctttgtggcctatacttgaaaaggaaatatcttcaactacaaactctacagaagcattctcagaaacttcgttgtgttgtgagcattcaactcacagagttgaacgtttcttttgattgaacagtttggaaacagtctcattgtagtatctgcaaatggatatttggagcgctttttggccta

SEQ ID NO: 882199 - DNA, 546 bp, Homo sapiens
ggatatttggtgtgctttgaggcctatagtggaaaaggaaatatcttcacaaaaaaaactacacagaagcattctcagaaacttctttgttttgtgtgcattcatgtcacagaattgaaactttcttttgaatgagaagttttgaaacactctttttgtagaatctgcaagtggatatttggatcgctttgaggcctacggtggaaaggaaatatcatcacataaaaactacacagaggcattctgagaaactacttcattttgtgtgcattagtctcacagagttgaacatatcttttgatagaacagttttgaaactctcttttgtagaatctgcaagtggttatttggagccctttgtggcygatggtggaaaaggaaatatcttcccataaaaattacacagaagcattccgagaaaatattttgtgatgtgtgaattcgtctctcagagttgaacatttcgtttgatacagcagttttgaagcactctttttgtagaatctgcaactggttatttggagcgctttggggcctattgtggaa

SEQ ID NO: 882200 - DNA, 563 bp, Homo sapiens
ttggagccctttgtggctgatggtggaaaaggaaatatcttcccataaaaattacacagaagcattccgagaaaatattttgtgatgtgtgaattcgtctctcagagttgaacatttcgtttgatacagcagttttgaagcactctttttgtagaatctgcaactggttatttggagcgctttggggcctattgtggaratggaaatatcttcccataaaaactacacaaaagcatactcagaaactacttggtgatgtggtgatgtgtgcattcatctcacagagttgaacctttcttctgattgagcagtttggaaacactctttttgtaggttctgcaagtggatatttatagcgctttgaggccaattgtggaaaatgaaacatcttcacatataaagtacacagaagaattctgagaaacttctttgtgatgtgtacattcatctcacagagttgaacctatcttttgaaagagcagttttgaaactctctatttgtggaatctgcatatggatatttggagtcgtttgcagcttattgtggaaaaggaaatatcttc

SEQ ID NO: 882201 - DNA, 563 bp, Homo sapiens
ttggagccctttgtggctgatggtggaaaaggaaatatcttcccataaaaattacacagaagcattccgagaaaatattttgtgatgtgtgaattcgtctctcagagttgaacatttcgtttgatacagcagttttgaagcactctttttgtagaatctgcaactggttatttggagcgctttggggcctattgtggaaatggaaatatcttcccataaaaactacacaaaagcatactcagaaactacttggtgatgtggtgatgtgtgcattcatctcacagagttgaacctttcttctgattgagcagtttggaaacactctttttgtaggttytgcaagtggatatttatagcgctttgaggccaattgtggaaaatgaaacatcttcacatataaagtacacagaagaattctgagaaacttctttgtgatgtgtacattcatctcacagagttgaacctatcttttgaaagagcagttttgaaactctctatttgtggaatctgcatatggatatttggagtcgtttgcagcttattgtggaaaaggaaatatcttc

SEQ ID NO: 882202 - DNA, 593 bp, Homo sapiens
ccttttgtggcctacggtggaaatggaaatatcttcacataaaaactacatagaagcattttgagaaacttctttctgatatgtgcattcatcccacagatttgaacatttcttttgattgagcagctttgaaacactgttttcgtacaatctggaagaggatatttggagccctttaaggcctatggtgaaaatgaratatcctcacataaaaacaacatagaaacattctgagaaaattctttgtgatgtgggcattcaacgtgcagagttgaagctatcttttgttagagccactttgaaactctctttttgtagaatctgcaagtggttatttggaaccctctgtggatgacggtgtaaaaggaagtatcttctcataaaaactacccagaagcattctgagaaacttctttttgatgtttgccttcaactcgcagagtttaacgtaacttttgattgagcagttttgaaactctctttttgtagagtctgcaagtgattatttggagccctttgtggccgatggtggaaaaggaaatatcttcccataaaaaactacaaagaagcattctgagaaacttctttgtgat

SEQ ID NO: 882203 - DNA, 593 bp, Homo sapiens
ccttttgtggcctacggtggaaatggaaatatcttcacataaaaactacatagaagcattttgagaaacttctttctgatatgtgcattcatcccacagatttgaacatttcttttgattgagcagctttgaaacactgttttcgtacaatctggaagaggatatttggagccctttaaggcctatggtgaaaatgaaatatcctcacataaaaacaacatagaaacattctgagaaaattctttgtgatgtgggcattcaacgtgcagagttgaagctatcttttgttagagccactttgaaactctctttttgtagaatctgcaagtggttatttggarccctctgtggatgacggtgtaaaaggaagtatcttctcataaaaactacccagaagcattctgagaaacttctttttgatgtttgccttcaactcgcagagtttaacgtaacttttgattgagcagttttgaaactctctttttgtagagtctgcaagtgattatttggagccctttgtggccgatggtggaaaaggaaatatcttcccataaaaaactacaaagaagcattctgagaaacttctttgtgat

SEQ ID NO: 882204 - DNA, 662 bp, Homo sapiens
agagactgcttccaaattcttcagacaaaagaaactttgcaagatgaatgcacacttcacaaagaagtttatcagaatggttctgtgtagtttttatgtgaagatatttccttttgcaccatagtcctcaaagttctccaaatatccctttgcagattctacaaaaagactgtttccaaactgatatatcaaaagaatgtttcaactctgtgagatgaaagcacacatcacaaatgactttctcagaaagcttctgtgtagtttttatgtgaagatatttcctttttcaacataggcctcaaagggctcaaaaatatccctctgtagatctacaaaaagactgtttcaaaacagctcaatcagaagaaatgttcaactctatgagatgaatgcacaagtcacaaagaattttctcacactgcttctgtctagtttttatgtgaaggtatttcctttttcgccataggcctcaaatttgtccaaatatccmttttcagattccacaaaaagacggtttccaaactgctcaatcaaaagataatttcaactctctgagatgaatgcatacatcacaaataggtttctcagaaagcttctgtctagtttttatgtgaagatatttcctttttcaccacaggcctcaaacctctaccaaatatccc

SEQ ID NO: 882205 - DNA, 662 bp, Homo sapiens
agagactgcttccaaattcttcagacaaaagaaactttgcaagatgaatgcacacttcacaaagaagtttatcagaatggttctgtgtagtttttatgtgaagatatttccttttgcaccatagtcctcaaagttctccaaatatccctttgcagattctacaaaaagactgtttccaaactgatatatcaaaagaatgtttcaactctgtgagatgaaagcacacatcacaaatgactttctcagaaagcttctgtgtagtttttatgtgaagatatttcctttttcaacataggcctcaaagggctcaaaaatatccctctgtagatctacaaaaagactgtttcaaaacagctcaatcagaagaaatgttcaactctatgagatgaatgcacaagtcacaaagaattttctcacactgcttctgtctagtttttatgtgaaggtatttcctttttcgccataggcctcaaatttgtccaaatatccattttcagattcyacaaaaagacggtttccaaactgctcaatcaaaagataatttcaactctctgagatgaatgcatacatcacaaataggtttctcagaaagcttctgtctagtttttatgtgaagatatttcctttttcaccacaggcctcaaacctctaccaaatatccc

SEQ ID NO: 882206 - DNA, 657 bp, Homo sapiens
ctgttatttcctcgagcagtggtttgtagttctccttgaagaggtccttcactctccttgttagctatgtccctaggtattttattccctttgtggcaattgtgaatgagagttcattcatgatttggctctctgcttgtctattgttggtatataggtatgtttgtgatttttgcacattgattttgtatcctgagactttgctgaagttgcttatcaacttaagaagcttctgggctgagatgatgggggttttctagatatagaatcatgtcatctgcaaacaagataatttggcttcctctcttcctatttgaatactctttatttctttctcttgcttgattgccttggccagaacttccaatagtacattgaataggagtggtgagagagggcwtccttgtcttgtgctggttttcaagggggaatgcttccagcttttgcccattcagtatgatattggctgtaggtttgtcataaatagctcttattattttgaggtgtactaggtgtacttcaatacctagtttattgagagttttaaacatgaagtgatgttgaattttattgaaggccttttctgcatctattgagataatcatgtggttttgtctttagttctgtttatgtgatgaattatgtttattgatttgc

SEQ ID NO: 882207 - DNA, 596 bp, Homo sapiens
gttaaaaatgtaagtgaaaaactttaaagtttttatttttttagggatagggcctcagcctatcacccaggctggagtgcagtggagccaccataattcactgtaaccttgaactcctgagctcaagtgatcctcctgcctcagcctcccaggtagctaggactacaggtgtgtgccaacacacctggctatttattttctttttttatagacatgaggtcttggtatgttgcctargctggtctctaactcttggccccaaatgatcctcctgccttggtctcccaaattgctgggattacagcatgagcctttgcaccgagcctaaaaaaacatttaaatttgagatttgggattttttttcccaatgtctagagcaaaaagtaaaattacttcatattcaactcatatatatgtaagaaatgtaaaaggatgcacaagtgagaactgataaacagtctgattaaaatactgaatagaacaaatattttttttttacatgggaatatagagaggtcatattttcagaccctcaattaggtaatttgaatgaaaaaaatataaatatcactaataactttcttacaatttgttat

SEQ ID NO: 882208 - DNA, 595 bp, Homo sapiens
cttagaacccagactactaaaactccgattggacagaggacctgccttgcgctcttttctgataagcaactgcagaccttaagcctgttcagtcagcttatagagactgtgcacaaactgtctttgtgtcctgtagttcacctttcgatgtaaagagccaaattccaccccactgtaatgctaaaaccccacccctaggtgaacgacggatgtttatgttacatatatgtttgcacatttgcaggaccccgtcataaatatgtatagctttcccccaagcatgctgaatatgtatgactttattgtctgatacaggccctgtgaggcataaaacccaatctgcyctttccctcttcaaagaggaaacaccttcagcccatggtggagactttcttttcccagattgcaaactattatcaccaacaaagctctcctttctaccatttagccatcctggtggtcttttggacaacatgagtgatggaagccttatacaaaagagcacaaactgaatgattctaattagaggtagttttataacaggcaaaattaatctatggtggtagaaaatcagaatagtgtttgtgtactacga

SEQ ID NO: 882209 - DNA, 666 bp, Homo sapiens
cactgagaaaaattttccatgtatatttcccattacatatttgtcgctagttcctactgaagagtgttaatgttctccctcggaaatggtaaatgacggtttaaattacctgagacgaagaagaattgtaattgtatcagggtcttttcagtgaataaattatgatgtatatagaaatttctcctaaagyctttcagtggttctaatattaccataaatgactacaatagggtgtgtacctttagcaattcatttgaatcctaaattgaataaatgacaaagtctatttttttgttcaagagaatatgacagaaacttgcactattttacaaatgtccaaactagagactataaatataccattctgctttgctttcttgcaacttcaatacaattgatatttttatttatttcattttatagtgattggcatgagtctttaaaagttttccagccaaaattaatggctatttcttcaaattaattgcaccacttctattaacacatcattctctacaaagtatataaaaagtcttttaatgccaagaatgcaaacatagcataatatgctgtgtgttaatgacaccagttatatataaaatacatggtaagaaaaaaacttgtcagactaattttaaaaatagagcttttttcttataaattatg

SEQ ID NO: 882210 - DNA, 683 bp, Homo sapiens
tacaataaatgagagcttgggagagtgtatgcaaacctgttagtagaaaggtagagcattgcttatgcccttggtcttgtcagttgtatctacaacacgtaagtagtaaaggggttgctaagcaacttctaacttttaacattaagtgtgctcagggactgcatactgcaaaggcacagtattgcccattggtagaagaggatgccctaagtaagatgaagtggaaggtatctctttattgtcctttcagtttgttgtttgtggaacaggaagcaaaagagagattcatgttttggtttgttctggaaacttatagaactcaagagtagtagaatgactaaaattattttkgtcattcctacatcttgtttttcttcataactattatttagattctgctctctcatcaggaagattcctttttttcttcttttcctgaaatcaatccctgagcctccatggtggctgtggagggacctttcacatagcaacaccttgattcttgtacactgggaatctccttgcccttggaaaggcactgtgactccttagtattttatttcaaaagaagctaccttatacctcaggggagaacgatttgagacatttaaacaccagcaacaacagaacctgacacacaaataaaatattcttcctaagcccaaaggatacaaaaatgtgtt

SEQ ID NO: 882211 - DNA, 610 bp, Homo sapiens
gaattatatctggtgatggtattacaaataaagccactattagaaatcttttgagagtaactggagtgactttttcttttgtgacctggctattcaaccctggaaaactgacttgattgtaaatttgctcaccgaatatctgtatttgtatatttatcacatataatttgcatataaatatacaatttcaataattacagcatataatacgtctgttgcaatacatatatacacatgcgcacattgttatttacaatgtatagtctcatatctgcacatagctatactagatacaactcattaataatttatgcattatattttatcttawcaataaagtataatatagcagctttcactttcttagaaaatttatttactaaatattagaaattatattgtattttaaagtgaaacaaaggaaaatacttcggcaaacatttcaatagtttaaaatttaaaagacaatcttagtagaataatcccaagtaggtattcttccattaaaaatttttgacactgcatttgcatttctatttgtaacttatctaatatttatagcatcctgtgttaatttataattctatttatacaaaacttgtggaagaca

SEQ ID NO: 882212 - DNA, 649 bp, Homo sapiens
acatttgagtgtgtgtagtagtttaaaacatttgtaatttgtaaactgaccaaaattgtagacacaaatgttttcatatacaaaggtgtcaaaaaactgttaaatgttatttttacttattttaaaatgttaagtttaaaagaattatagtttaatcttttcagaagactgacattgtcacaaggctttaagtttctctgggggttggaaagtgtatgtgttaataaaatatgcaaggtcattaggctggcatgatttaaagaaccttggtaagttattccctcccttcatcctcccccttcattccacacataactttctgctctactcrtgacatttttcccacccatccatttattttctacaacaaaaagaatgatagtaactgcctctgataaatatctggaaaaaaaaaaaaaaaaacctgcacactcacaagccatgcaatgtaggaaagaggtgcctgagacaatccttctgttgttctattgtgctacatgctttctctggtgatgcaaccttcatttcaacccagttgcccctcacatgtaaatctaactggctttgtagatatgaatcgtgcgccctgtagcaactagacagaaatgaaaggaatgtatgcttaagtctgcagtatagtattttacta

SEQ ID NO: 882213 - DNA, 445 bp, Homo sapiens
tccagcctgggctacagagtgagactccatctcaaaaacaaaaacaaaaacaaaacactcaccatagctgtgccattcatctatcagaaacctgaagccagcatatgaaggaagcaagtgtggcacaaatcctgggctgtcaccgtaaacagctccagtaggaagttcccattctccgctattgccattccacccacaggctggatagtgccgaagttacacttctgaggagtcagcatcctgacgcagcctaaactttacactcactccctgctctccagaatgcacacgtctgcctgtgcaaaaamgacaagcagagtcaggtgacctcagctaacaggaatgtgggcagggctgcggctgaatgccagagctacttttattaaattccttgttaagtaaattcaaaaggggtttgtttgtagctggcagtaaatacctaaga

SEQ ID NO: 882214 - DNA, 505 bp, Homo sapiens
aataattggtagcaatccttctgacacacttccacaagacagagaaaaaaggaaccctccctaattcattctgtgaagccagccttaccctaatgccaaaaccaggaaatgacacaaccaaaaaagaaaagtacagatcaatatccctgatgaacatagatgctaaaatccttaacaaaatactagctaactgaatccaacaacatatcaaaaagataatccataataatcaagtgggtttcataccarggatgcagggaccatttaacatatacacatcaataaatgtgatacaccacataaacagaattaaaaacaaaaatcacacaatcatctcaatagatgcagaaaaaaatgattcaacaaaatctagcacccctttgtgtctaaaactctcagcaacatcagcatacaaggaacatacctcaaagtaataaaagccatctatgacaaacccacagccaatataatactgaaaagggaaaagttgaaacattcgctctga

SEQ ID NO: 882215 - DNA, 589 bp, Homo sapiens
caggtcatatagtcacattcaaaagtactcttgctgctgtcacacatcatcacttttttaaaatgtcaaacctgtattacactgcataaaaaagactaagaaaattttactcatggttacatgtgaaataacaaattaaaaatgatctgaattccaaatccagaccataatttaaataaatagtgacctctattattctcatgyttgggctttaaaaaatgattggacccttttttttttttagcaaatatattattttaaatttaaacatttcgattatttagcaattacacactttaggggtgtgttccattgttctcgaaaggtgctagtggtcaaattcattctggattgagtgagcttagtcattgcctttctaggttcttaccttcattttctataaaactaggccattcccttgttcattctcagtctagaatgagctaattgctcttactgttatcagactttcctgaaatctactgggtacctatctagacctccgttcagtgcctgctactagactttttttttaacactgtgtctgcctgcctacttgttgggacgctcacctgtcacctgcttaata

SEQ ID NO: 882216 - DNA, 578 bp, Homo sapiens
aaagcaaacaaagacagttcccaaggagcaacaggatattcctatcatacctggacaaggattcccttgcgaccctcgagtaaggctgggggttaagtaaacaagttgtctggataagagtaaaggcagagcttttgttaccaagaaggcaggttaacagctaaactgagctattaagaacataaacataacattaagtaatttatgtaagtgcttatatatttgctttttatgccaaggaaaatggctaagtttatgagatactccccaaaaaaaragaaagaaaaattgatgtaattagctagacatttccaaatagatgggtgtcagatatcagtctgataaaatatttatattctgaatgaattttgtttgtccctgaatggtgccatttttcacagactgtactcattccatgtaaacttaaaaataagtgttaaaaatacacttaatcaactaaatctatcacagcagaagtaaactgtggtacacaggcaggcaattagaagagagcattataagatccccttgcgccaagggggaagtggtccccacacccctcactcatcacatgctca

SEQ ID NO: 882217 - DNA, 569 bp, Homo sapiens
ccaggcgcagtggctcacacctgtaatcccagcactttgggaggccaaggtgggtggatcacgaggtcaggagattgagaccatcctgaccaacatggtgaaaccctgtctctactaaaaatacaaaaaattagctgggtgtggtggtgcatgcctgtactcccagctactcgggaggctgaggcaggagaatcacttgaacccaggaagcagaggttgcagtgagacaagatcacaccactgtactccagcctggtgacagagtgagactctgtctcaaaaaaaaaaaamaaaaaacaaaaaaacaattatcagccaagaattttgaatccagtgaatttccttcataaaggaaagatacagtctttttcagacaaacaaatgccgagagaatttgctactaccaagccatcactataagaactgctaaaaagagctctaaatcttgaaacaaatcctggaaatacatcaaaacagaacctctttaaagcataaatctcacaggacctataaaacaaaaatacaatttaaaaagccaaggtatacaggcaacaaatagcatgatgaat

SEQ ID NO: 882218 - DNA, 594 bp, Homo sapiens
atactggcatctgggagtgttgtctgccttaactgaaaattttctttgatttatgtttttttttaaaatagattgcttcactttattccatactatctgttagtttaaatggaaatttgtttttggtttgttttcccaggtcttcaatgttcctggcagcttaaagtaccaactgggacacttgtcactagtttgagaagtgcagccataggtgagttctctccaccccaactttcttagtcatcctgccctgaacaaatcagctcaagccagtcccccgccagtgccactttccacttgtctccattgaaaccttcaccctccttcaaggcccaccaccagcccttcgcagatgcccacctccccagcctytacagccctttgtttccatcagtccctctccctggctcagtctctgctttcataaggagccggctctctgttcacccagatttaacttgctcagaggcagaaacttaggcttctttgtatgctcccaatgcttagttccatactgggaacaaagtaggtgtccggtatttttttactggtttccctttaaaaaaaaaaaaaaaaaaaaaaaagaggggactg

SEQ ID NO: 882219 - DNA, 445 bp, Homo sapiens
ctccatccctttattttgagcctatgtgtgtccctgcgtgtgacatgggtctcctgaatacagcacactgatgggtcttgactctttttccaatttgccagtctgtgtcttttgattggagaatttagtccatttacatttaaggttaatattgttatgtgtgaatttgatyctgtcattatgatgttagctggttattttgcttgttagttgatgcagtttcttcctagccttgatggtctttacaatttggcatgtttttgcagtggctggtactgattgttcctttccatgtttagcgcttccttcaggtgctcctgtagggcaggcctggtggtgacaaaatctctcagcatttgctcttctgtacaggattctatttctccttcacttacgaagcttagtttggctggatatgaaattctgggtcaaaaacttgtttctt

SEQ ID NO: 882220 - DNA, 593 bp, Homo sapiens
actcaggctgggagctgtagactgaagctgttcctattcggccatcttggaaccgccgccatgttaaaccttttaataccctttttttttcctaaattgggtatttaggtattaatgtttgatagtaatatgaaaacaatttataaagtaatgttttgaatgctgttaattayatttgagactgtaaaaaaaatgtaaaaatttatttatttattcattttacttattacattcttcttacattgaattgctatatatttccttgtggttttcacatttgtagtagttagtttcaggggtctagctttcaagatattttttaagccttcaaagtcaatgtttcaaaataaattcaagaacattcacaacagtagacttccttatactcaatttttcattgagaactttcagaagttctccatagctttctggttcatggcacattcatgagaagtttgtaaaatgaaatgaagtaaagaaattagaatgagtcattgtaataagtaaatattgcatttactttctcgatcaaatcctcctatattttattgtatacatagcactgtcactgataacattgatatttaatccaa

SEQ ID NO: 882221 - DNA, 618 bp, Homo sapiens
tccctttctttttgttgtaatttatctggttgaagaactcactcgagctgtttgacctgtagtttcacagtctggagtctgctgatggcatgctcataatatagctcatgttcctctgtccctgagtttcctgcaaatagcccattgcatctagagtcctgatcrcactcaggttcaatcgtttcagcaagacctcaagtggtggggttttcttccataaggatcacaaacataaatatcttaataatgaaaagaagatgtagataaaaattccataggaagataggaattttacattataggtttatttctagtcaagtgcagaatgttactcctttctctgaccgcaagtatatcaagttaaatatcagtatcaaaaaaaactatactcatacatttaagaaaagtttctcttttataaaattatcaaatattataagcaataatgaaatagaaatattaattttaaagtcagaaacaagaaaaacaagtccataatcaagatgtctatacaacatcaaatttatgtgtatttatatttttagttttaaaatgttatcttcttggcctttaatgtccatattctactgagcttattctaactaatgcaattctttg

SEQ ID NO: 882222 - DNA, 618 bp, Homo sapiens
tccctttctttttgttgtaatttatctggttgaagaactcactcgagctgtttgacctgtagtttcacagtctggagtctgctgatggcatgctcataatatagctcatgttcctctgtccctgagtttcctgcaaatagcccattgcatctagagtcctgatcacactcaggttcaatcrtttcagcaagacctcaagtggtggggttttcttccataaggatcacaaacataaatatcttaataatgaaaagaagatgtagataaaaattccataggaagataggaattttacattataggtttatttctagtcaagtgcagaatgttactcctttctctgaccgcaagtatatcaagttaaatatcagtatcaaaaaaaactatactcatacatttaagaaaagtttctcttttataaaattatcaaatattataagcaataatgaaatagaaatattaattttaaagtcagaaacaagaaaaacaagtccataatcaagatgtctatacaacatcaaatttatgtgtatttatatttttagttttaaaatgttatcttcttggcctttaatgtccatattctactgagcttattctaactaatgcaattctttg

SEQ ID NO: 882223 - DNA, 578 bp, Homo sapiens
aaaatgagttcactgtaggtgtgtggatttacctctggggtctctattctgttccactgatctatgtgtctgtttttattccagtaccatgctgttttgattactatagctctgtagtataatttgaagtcaggtaacgtaattcctccagttttgttctttttgcttrtgatagctttggctattctgggtcttttgtggttctatataagttttaggattttttttctatttatgcaaagaatgctatcggtattttgatagggattgcattgaatctgtagaccgctttgggtagtatgaacattttaacaatatccttccaatccatgaacatagaatatctttccattttgtggtgttctcttcaatctctttcattagtgttttatagttttaattgtaaacatctgtcacttctttggttaattcctaggtatttaattttatttgtggcattgtaaatgcaattaatttttatttctttttcattttgttcactgttggcatatagaaatgctactgatttttgtatgttgagtttgttatcttcaaatttactgaattcgtttatcagt

SEQ ID NO: 882224 - DNA, 649 bp, Homo sapiens
ttggataaacagtcaggaaccatcgtgtgttgtgttcaggagacccatctcatgtgcaaagacacacataggctcaaaataaagggatggaggattatttaccgagcaaatggaaagcgaaaaaaaaaaaaaaaggccaaagttgcaatactagtctctgataaaacaaactttaaaccaacaaagatccgaaaagacaaagaagggcattacataatggtaaacrcatcaatgcaacaagaagaactaactatcctaaatatatatgcacccagtacaggagcactcagattcataaagcaagttcttggagacctacaaagagacttagactcccacacaataatagtgggagatattagacagatcaaggagacagaaaattaacaaggatattcaggacttgaactcagctccgcaccaacccaacctaatagacatctacagaactctccaccccaaatcaacagaatatacattcttctccgcaccacataacacttattctaaaattaaccacattattggaaataaaacactcctcagcaaatgcaatagaacagaaatcataacaaacagtctctcagaccacagggcaatcaaattagaactcaggattaagaaactcactcaaaaccacacaactaaa

SEQ ID NO: 882225 - DNA, 652 bp, Homo sapiens
cctctacacaaataaactagaaaatctagaagaaatggataaattcctggacatatacaccatcccaagactaaaccaggaagaagccaaatccctgaatagaccaatgacaagttctgaaattgaggctgtaattaatagcctaccaaccaaaaaataaagcccaggaccagatggattcatagctgaattctaccagagctacaaagaggcactggaaccattccttccaaaactattccaaacaactgaaaaggagggactcctccctaactcatttgatgaggctaacatcattctgataccaaaacctggcagagacacaacaaaaaaagaaaacttcaggccaatatttctgatgaacatcaacacraaaatcctcaataaaatactagcaatccaaatccagcagcacatcaaaaaatttactcatgataattaagtaggcttcatccctgggatgcaaggctggttcaacctatgcaaataaataaatgtaatccatcccataaactgaaccaatgacaaaaaccacatgattatctcaatagatgcagaaaaggcctttgataaaattcaacatccctttatgttaaaaactctcaataaactaggtttgatggaacatatctcaaaataataggagctgttt

SEQ ID NO: 882226 - DNA, 552 bp, Homo sapiens
ggaaccattccttccaaaactattccaaacaactgaaaaggagggactcctccctaactcatttgatgaggctaacatcattctgataccaaaacctggcagagacacaacaaaaaaagaaaacttcaggccaatatttctgatgaacatcaacacgaaaatcctcaataaaatactagcaatccaaatccagcagcacatcaaaaawtttactcatgataattaagtaggcttcatccctgggatgcaaggctggttcaacctatgcaaataaataaatgtaatccatcccataaactgaaccaatgacaaaaaccacatgattatctcaatagatgcagaaaaggcctttgataaaattcaacatccctttatgttaaaaactctcaataaactaggtttgatggaacatatctcaaaataataggagctgtttatgacaaatccacagccaatatcatactgaattggcaaaacctggaagcattccctctgaaaactggcacaagacaagaatgccctctctcaccactcctgttcaacatactattg

SEQ ID NO: 882227 - DNA, 692 bp, Homo sapiens
ttccaggtgcaaagtgcaagctgttggtagatctaccattttggggtctggaggacgatggccctcttcccacagctccactaggcagtgccccaataaggactctgtgtggaggatcataccccacatttcccttctgcactgtcctagcagaggttccccaggagcatcccgcccctgcagcaaacttttgcctgggcatccaggcattatcatacatcttctgaaatctaggtggatgttcccaaacctcaattcttgatgtctgtccatctgcaggctcaagaccatatggaagatgccaaggcttggggcttccactctctgaagccatagcccaagctctacattggcccctttcagccacagctggcacagctgggacacagggyaccaagtccctaggctgcatacagcacagggaccctgggcccagcccacaaaaccacttttttctcctgggcctccaggtccgtgatgggaggggctgctgtgaagttctctgatatgccctgagacattttccccatggtcttggagattaacattaggctccttgctacttatgcaaatttctgcagccggcttgaatttctccccagaaaatgggattttcttctctattgcatagtcagactgcaatttttccaaagttttatgctttgcttcctttataaaactgaatgccttta

SEQ ID NO: 882228 - DNA, 564 bp, Homo sapiens
ctagagctgtctcaaactggcactgtccaagaagtctaccagccggggtaaggagactcaggggtatatgtctgaggtcagaggcttagggaaataggtcagtgggaaaatcacctacattagtgactggtatagtaaggagcactctaaaaaatccacaaaagtagccacaaagattccttgatggccagattataccagataatgccagttaagtaaaatcctatcctattgaatcttgtctttgtctcctggttccaaagactgagaaataggagaaggtggaatcctgcctcccaccataccataggatgctccttgtggttcaggtccaacaggcagaaaggaagaaagctttcatttatattggattgcatattttagcccccgacaaacaagttgyttttttttttacccaaaagtgaccagaaagctatcagccagaaagctgagatgtcagggtgtggaagaggcagcctcaacagtttatacttgaaggggagagaagaaacaaagctgttttctgactgtgccatgttgagccccgtctagtcaatgaatgta

SEQ ID NO: 882229 - DNA, 612 bp, Homo sapiens
aacctggacaacatgatgagaccccgtctctagcaaaaacacaaaatattagccaggcttggtgacacatgcctgcagtcccaattactcaggaggctgaggtgagagaatggtttgagcccaggaggtagaggttgcagtgagccaagatcaagccaccactgtactctagcccaggtgagagacagacactgtccaaaaacagatactagagtagatcatgaaaggaagcyttatgagggctagtgaaagaaagcagcagtcactggtggtctacctgggttccttaagagagtaagtcacctcattcccaatgcttctctcccaaaccccttccttgtccagctaaaagaaatgttaagccatagtctttacttggactttagaaatcaacagtctttcatgatcttttggttgacagtgaagaggaagggttagcacaagtaaaaataaacaaattaaaaacagtcgaaatgtaacaaaatggaagggtttccatccatgagacacttgttgtgattcagctctgtggcatggctgtcgggagagtgagggtaggttttaaggatgttatctttacaagatgggtggccttcagctctctaccacgca

SEQ ID NO: 882230 - DNA, 579 bp, Homo sapiens
gccttaatttcctcaactaaaatattagcaaatcaaatacatcaatatatatgtaaagaacaattacaaggaggagttacccaagaaatgtaagatggtataacattctaaaatcaatataattcttcatattttcaaaaaacgataaaaaccatatgattctttcattagaagcagaaaaatattgacaaaactcatcatttatccatgtcaaaactctcagcaaactaaaactagaagaaagctgggcacagggatgcatacctgtagtcctagcttacttggaggctgaggtgagaggatcacttaagcccaggagtttgagtccaacytaggcaacataccaagaccttcatctaagatgaattaaagaatgaataataaattttaaaaattgcccttctgggctggtctaaaacaaactggaaggaaacttcaatttgttaaagagtatctataaaatcttacaagtagcattgtacttaatgaaaaatattgattacattccccctaatattggaaataagtcaataatgaccactttcatctcttttactcacaagtcttttggaggccctt

SEQ ID NO: 882231 - DNA, 514 bp, Homo sapiens
ttgaaccatcagtgaaatgcccacccaaagactctgctgtggcttgaatgtccttgacaaaactcacattgcaatttaattggccaggcgtggtggctcacacctgtaatctcagcactttgggagactgaggaaggcagatcatttgaggtcaggagtttggaccagcctgggcaacatggtgaaacctagtctctactaaaaaaaaaaaaattagccaggtatggtggcacatgcctgtggcatgtggtgtggtggcacatgcctgtagcatggtggtatggtggcacatgcckgtagcatgtggtatggtggcctgtagcatggtggtatatgccaggtatggtggcacatgcctcctgagacccaggaggcttgaacccaggaggcggaggttgcagtgagctgagattgcaccattacactccagcctgggtgacagagcaagactctgtctcaaaaaaaaaaaaaaaaattaattgccattttaacaatattaagaggtagggccttt

SEQ ID NO: 882232 - DNA, 647 bp, Homo sapiens
tgcaatatcagcagtcaaggaaagagtattttaaggagtttggagcattgaactgtatgaaagcatagataatttagtaagatgagggttttatatttacatgatgtcctttctaaattttttttagatagaacaattgctttattttttagtgtcttaaaatatgcttttctccagcaattttctgtattatatgttggaggagcctgctatgtaatttgaataataaagtggctatgaaagtgctttgaaaagttacagcattagagaaacatactgttattacacctcttctgtgagtatgctccataaagcacacatgttgaacgtttcacaatagaaatgtgaaataaacattgaagaatatagggagttaagtaaggctctggagaccagtgaaaatgagggatttcttttctaacattaaagcaattagtaaagattgtgttagtattgtgggttggaataactatagaaaactcaagtccatgtgcctggcttygttatagtagcaggatttgaggcatgctaagagaaataggaccttaaactctgaattgaaaccataattcttcctgtatgaatgctaaaaccgtgttgtttcacagcaggaagagaacctcatctattttcagggaccttgtttg

SEQ ID NO: 882233 - DNA, 660 bp, Homo sapiens
tggagaccagtgaaaatgagggatttcttttctaacattaaagcaattagtaaagattgtgttagtattgtgggttggaataactatagaaaactcaagtccatgtgcctggctttgttatagtagcaggatttgaggcatgctaagagaaataggaccttaaactctgaattgaaaccataattcttcctgtatgaatgctaaaaccgtgttgtttcacagcaggaagagaacctcatctattttcagggaccttgtttgtatttatttatttttaatttacacaaaayggtgtctttgtaagaatagtttgattccaatggcctggattttttttttttgtttaatatgtgtatttggtgatgaatgtcttctcttcctgtcttaaattcgcttttaagttctttgacttttgggttttatgtacttgttttttaaatatagcactttatcattccagaaatgtggaaccttgtcctctatcctaacacactaatgtaatattcactaatgttcatgaacttttacaaaaacttgtttgtataatagtgggagaagaccagaaagatagtgaatgagaaactttgatagttgtctgtgcaatacagatatgcttaaggtctgcagttttgttctttggaggagtagctgtctttgtct

SEQ ID NO: 882234 - DNA, 655 bp, Homo sapiens
tacttaaaaatgcccatcccaggaattcacctaggaatttgttctaaggaaataatcaagagatcaggaaggagattaatgtgcaagtatgtttatcgcaagcatgatttataacagcaacacactggaagcagcccaaaaacctgtcattagggaaatgatcaaataagtgatttaagccacactatgtgtgtgacattaaactgccatcaaaaccatgacttcaacaaatctgtagtgtcaagagaaaacacaatatgttaattgaaaacgacctcataacttcctttaaattatctcaaatctatttaaacacacgatatagtcccttccatagtatagacctgggtttcctccagaatgatgtccatacaggcttggcaggatttggatcaaaagatagaggagggagaaatgattttgaagaattagcctcatctraagttttagctgctgccgccaccaaggggcaatctgtattttgacaatgtcgagcaatgcagaagcacctctccagatgaaatttaaattagtgctttttgtcattggtttacttcccctctccaaaccaggaagtgaaattcaggtgaatttgctcatgaattacttggcaacaggaacaccgtcagcaggaaacatctgccttatgcagcat

SEQ ID NO: 882235 - DNA, 632 bp, Homo sapiens
ggctgcaccgtctgtggtttctctacattaaacagtatttttgtggagtcaggggtgagggagtatggtttactcgtaaatatagttttgcaaactcctctgtttggtttttgtttggttgtttttcataagctatgtttaaagtcaatagagaaaaggtaaatgcataccctggaattattcagcaatagaataacaccaatcaaattctgtccagataaatgaggcatttgaattctttttaagagatgaagtgtcactctggttgcccaggctgcaatgcagtagtgaggtcatagctcactgcagcctcaaactcctgatatactcctcaagtgakccttacacctcagcctcctgagtaacagggactacagacatgcaccaccacacctgacttatttttaaatttttttcgtatggatggtgtttcctagactggtctcaaagtcctgggctcaagtaaccctccttccttggcctctcaaaatgctggaattacaggcatgagccactgtacccagccacatttgaactttttacaaatactgctacagcattacaggtagaataattattctttgaaaaaccttcaggaagatgtgctccccaataaaaagtgagctatgtat

SEQ ID NO: 882236 - DNA, 589 bp, Homo sapiens
agatgcttgcttttggagtctgtgcataagtttctagaatttgcaattgagacccaaaacattttagccctgcttgtactgctgaagagtcagctatgaatggctttgtgagtctgagcagatttttgagtcctgcctccaatgcacactakaaacatgcaccagcgccttccttgttttctaaaatagggcaactattacatctatatgcattctttaggcatcgactatgtgctatggctgtacttgggacaatggaaaatttgtgtgggctggccttatgcagaacagaagtgagatgagagccaataattgaacaatcaagagttgaaactctgtgtagaaccagcatgacgtgggatgatggggaagagtgtggtgctttgggttgctggcacccaggaaaaactttgtgaatacagtggatgttcaagaatgttctaatggaaaatcagtgtagattaaaggaaaaaagtcccttcttcgaattgtatctacacatacacactatgtaaagatacaaacttcgttcctgttcttttccatctacatcgagatcacaaaaagaaatatcataagatggtggggt

SEQ ID NO: 882237 - DNA, 598 bp, Homo sapiens
ttggataaataggaagttagttcttgaggcaggtctcatagataatggaagttattttaggaatatgcaggcttattgacctcattagcccattgtcccttccacagtgggaattatagcaatgcagtagaaattctaccattcctgctccagacaaccaacgcatgtatgtcctagctcatggtttctgcctactcagcttccacatcatggtttctattcattcatgtcttctccttccagagtgtctgccttctaccttctctctgtttatctcagcttccattcccactaccaagcatctaatgccccatatctccagrgggaataagattggtccagctgatcacttcatgtttgtctcgatagagctgttgagtcagggcatatcacagcacagtagacttgcctgctttggtccagtcagctgtacccaagaatacagtttataacaaacaaacagcagcccccactgttttgtttttatgagggctagaagaacaacatccccgaactactcctttaaaaaaattaaaataaatgttagtaactccagatattttctgattgttctactccagtagaaaagtatgttaaa

SEQ ID NO: 882238 - DNA, 611 bp, Homo sapiens
gatttaaaactttttccttcacaaatataggtgaaaacctgaatatgttagaaggttgctaacctatgacacactgaatattttttagtaacatatctgcggaaaagtggctgaatctatgctaataaaaaatattatattcagaattccccctttcttagttagtgatttatatttgaggaagtttagccactaaacatatttctactcttaaattatctcactacagatccaatagaagccatcatacataagagcaaacagagatggcataggaattcagcttagcaaatatttactaaacacctaccaggagccaggcactgtggcaagttttgaagagaatgacatgaataaaacattgtgtctgttctcaaggactccacagtgcaagtctgaaactgcaggtgtctaataaatgtttataaaataaatgaaggaaatttaatcraggagcaagacctatgaggaacagattgtaatgctgtttgattagaccagtgaccaagtatatgtacaaaatacaaatataacacagaagagagtggtagagttttgggaggatgtggagaaggtgacagcaaagtcaccttccagaggaggttacacct

SEQ ID NO: 882239 - DNA, 625 bp, Homo sapiens
ctgatcataatccagagactaagtgggtctcatggccttactgaaatagcagactattccaattaatataaacttaaccctaaaattctgggctattagggcatctgttccattatttaataaatacttttgtgcaagtgctatgcwacttgactaattgtattttttaaatgggaatgtaaataaataaataaataaataaataaatagggagcaaatctcccatgcagaagaattacaaataatttatgtagatactccacccttaagaaggtggatcatgactccctactacttaagtgcaggctgtgcatagtgactttcttccaaaaaatatagtgtgaaaaaagaagagagaaaaggagtaaccacaaagtggagaaacctgagaaatgctaccccagccgtgtgatcaagttcacatccacactgataagtcatatttatggtgtgtgtccttgatatgatgtgaatggcactctgcctctgtggtctttctccccaaaactcaaaggtccattctaaccatgagaaaaaacattaaaaaatctcagctgagagacattctagaaaacacctgaccaataatcctcaaaactgtcagggtcactaaaaaaaacagaaa

SEQ ID NO: 882240 - DNA, 665 bp, Homo sapiens
gtattgttaactacaggcacaatgttgcacaggtctctagaacttattgaaatatttcttaagcgttttagactttttaaattcaaagtacaaattcctgaaaaagcaaccaccataaaaacacaacacaaataaaagagacaaagcagcagttgaagagagcttagttagtaattctgagcaattaatgagctgaattaatgctactttgtacccaaattactccctgctagcatcttggtgctgagggaggcacatcaactttctcaagctgccttggctacttttttctacaatacagtaggaacacttccagagaatagcagagagtagaactatttatctaagctactcaggtaaactcaacccaaccagctttccatgtggctcacgtctttcaccagtgtgctggagttaatataaccaagatgctgctgctasccaaacactcaaaaaaatggcagcagcaataaaaccaaatacagtgatgggctctttccttttcacctgtatagtaggtttagaaaatatatctttgattttaagacatgaacaacttcaggtaatataagagcaaacatttctgtggttgctatcacatgtcaagtattgacctaaggctttaaaattttgattcccccaacaacccagtgtgtgtttgcaga

SEQ ID NO: 882241 - DNA, 613 bp, Homo sapiens
tattctctccagattttagcttgatcattacctttctgtcacaaatattggaaaatccctttttaaaaatatgttactgttggagctcagttggaggaaatgatgaaaggtcaccgatcaatgatcattcttacgatgaatcagctcttctacttctagctaaattttataaaatgcactaattacaaagttgtgaaataaccagtaactggacagctttccccctgcgccacccacccccaacaaaggtagtatcatgttctgaattcttctgcctcgattttttcctattccttctgacactactctttatttatctttacgtttttttattatgaaaaatttccattgggcgcggtggctcacaccagtaattccagcactttgggaggccagggtgggtagatcgtgatgtcaggagttcgagaccaycctggccaacatggtgaaaccccacctctactaaaaacacaaaaactagctgggtgtggtggtgcacgcctgtaaccccagctactcgggaggctgaggcaggagaatggcttgaacccaggaggcagacattgcagtgagccaagatcacgccactgcacgccagcctggcaacagagtg

SEQ ID NO: 882242 - DNA, 573 bp, Homo sapiens
aaaattcactgtgaaagattaggaggaaatgatgaggtctttggttgctgggtaactgctttttaaccatgattcaatgtttaataagattgttttatctggttccagggtcttcccagaatttcactgttgctgattttgtgttcttttaaagaaaaaaaagagtacacttgcaagtttttttccatgatgtttcttaaatttatacttattttaaaatgttcttcatcaaatatttcascctgatcaagtcttgttcttttttctcttggtaagaaggattttatataaaaaaattaaaatagtatatatctattctctcaaagcagttccaaaaactaaatataaaaaaaatagtctttatagtctgtttaagcaggtttcaaagtcagctcctccattcctgaagtttttatttagattatttctttcttatggcattttaaactttttttctttttaaaatttttgttatttgtatagatttagggggtacagtgcaatttttgtacattgatatattgcatagtggtaaagtctgggctgatagtgtacccctcacctgaattgtga

SEQ ID NO: 882243 - DNA, 654 bp, Homo sapiens
tggaaaacgcagacatacttttataaaacacaatcaacccacttttcccagcagtgtatttaggaggtgggtttgagtactgagcgctgttcaatgtacttaggaagtccagtcaaaaataagcgaggataggtccaattgctgggtcyttggcaagattatgttatatggtcaaccgttactgacaaagagagtgtctgtcatggtcctggcggaaaacagaaaatccactaaaactgggtaatttatgaagagtttaatatagtaactatgtgaaagatttggacagagaatgaggaaaccacaggagaaggttgttccctgcagctagtatcagtgggccagttctgattgtcctgcagcagatgcgctaggtgccttgttttatgtcccctgaacctacctttgatttcagcttagggaagctcaacagttctgtgcacactgcaacccctcttcatttgtgttttggaatttttcagaacccacaggagatctatgagggtaaaaactgcatagaagagcaggggagttaatattctagaataaatggggtgggctgggaatttgtaagggcctatgctttccatccttcagagagaaaatccagaagaacattctacaaggttccttaaaaagttctcagcaggcttg

SEQ ID NO: 882244 - DNA, 606 bp, Homo sapiens
ttatcatcatgtgtgggatcttaacacatgccagagggctgaggaatcatacagagagcacgagtctcagtttcctcaaatcatctgtctgtttgatttttcttgagaagtttctacagtggtgaagttgagggatattttgtagaataaacacagctaatatttctaagattaaaatgagctgcaaaagattcctggataatacaaggcttagcaaattgagtcatgacttaagagaaacaatctggacgctgagctcagaaaagaactaggaaagacagaaaaacaattaaatacaacaaaatmtttttggaaaagttagatcaagtaagagagaaacatatcacagttcttaaatttatattttaaactaaaccatcaaattagaaacttagtaagttctgttttgtttatttaaactaataaatattacttacaatgaatcacaaattgtcataggcagcaataaagaaacattctgtgaattttcacgaatagaaaaattgcattagaaataatgggagcaaatcaaatgaatggatcagaataatgatgtttgcagaagttaggggaagataaaataattatacatatatgtatagaaaa

SEQ ID NO: 882245 - DNA, 642 bp, Homo sapiens
acaagcaaatgctgagagattttgtcaccaccaggcctgccttacaagagctcctgaaagaagcactaaacatggaaaggaatgaccagtaccagccatggcaaaaacatgccaaattgtaaagaccattgacactatgaagaaattgcatcaactaacaggcaaaataacaaggtagcatcagaaagacaggatcaaattcacacataaaaatatttacatttaatgtaaacgggttaaatgccccaattaaaagacacagactggcaaattgtatagagtcaagacccatcagtgtgctgtattcaggagacccatctcacgtgcagagacacaaatagattcaaaataaagggatggaggactatttaccaagcaagtggaaagcaacaacaacaaaaaaagcaggagttgcaatcctggtctctgagaaaacagactttaaaacaacaaagatcaaaagagacaaagaaggccattgtgtaatggtaaaggggtcaatgcaacaagaagagctaagtatcctaaatgtatatgcacccaatacagaagcacccagattcataaagcaagwtcttagagacctacaaagaaacgtaagctcccacacaataatagtgggagactttaaacaccccactg

SEQ ID NO: 882246 - DNA, 652 bp, Homo sapiens
ccgaatccagcagcacatcaaaaagcctatccaccatgatcaagtgggcttcatccctgggatgcaaggctggttcaacatatgcaaattaataaacataatccatcatataaacagaaccaaagacaaaaaccacatgattatctcaatagatgcagaaaaggcctacgacaaaattcaacagcccttcatactaacaactctcaataaattaggtattgatgggacatatcttaaaataataagggctatttatgacaaacccacagccaagctaccaatgactttcttcacagaattggaaaaaaccactttaaagttcataaggaaccaaaaaagakcccgcattgccaagtcaatcctaagccaaaagaacaaagctagaggcatcacactacctgacttcaacctatactacaaggctacagtaaccaaaacagcatagtactggtaccaaaacagagatatagaccaatggaacagaacagagccctcagaaataatatcacacatctacagccatctgatctttgacaaccctgacaaaaacaagaaatcgggaaaggattccctatttaataaatggtgctgggaaaactggctagccatatgtagaaagctgaaactggatcctttccttacaccttataca

SEQ ID NO: 882247 - DNA, 680 bp, Homo sapiens
catttctctaatgatcaatgatgttgaggctttttttcatatgtttgtttgctgcatgaatgtcttcttttgagaagtgtccatttatgtcctttgctcattttttaatggggttgttcagtttttttcttgtaaatttgtttaagctccttgtagactctggatattagacctttgtcagatggacagattgcaaaaattttctcccattttgtaggttttctgttcactctgatgataatttcttttgctgtgcagaaactctttagtttaagtagatcctatttgtcaattctggcttttgttgcaattccttttgacatgttcctcatgaaatctttgccagtgcctatgtcctgaatggtattgcctagattttcttygaaggttttcatagtttttggttttgcagtcaagtctttactccattttgagttaatttttgtataagatataaggaaggggtccagtttcaatttcctgcatatggctagccagttctcccggcaccacttattaaatagggaatcctttccccattgcttgtttttgtcaggtttgtcgaagataagatgattgcaggtatgcagtcttatttctgttttctctattctgttacattggcctatgtgtctgtttttgtcagtgtcatgctgttttggctactatagccttgtgat

SEQ ID NO: 882248 - DNA, 618 bp, Homo sapiens
aaaagttttataaaaatctacttctttactatcacctatgttaaactgttccaggattcaaatgtttatgcttttattcaaaacgttatcatgcataaacctaaagtattttgacttaattttacccagtactcattgtacatcagaaaaaactcggagctatatttaaatttataataaagttaaaatttcttctattttgtgtaaaaaggagggaaagataatagaccaatactgataaaattaatatcttactttattatttacatttcgttcatcytgacacaaaatcagacaatatgttttggggaaaaatatttctaaatatttctgcttgtaaaccaaaattatgaaattgatacttgaataataactgaaggaatgactcatggaattgaagtaaatgaaccaaaaaaagaatatttataccattctttcagctattttactgatatcatattgctttttttttaagtttaaattttaaggaacaagtaaaaaataattcttcactggtaaaatggtcctaataaaataaaataagattcaagctctaaaactgcaggacaagaaaggtatgagatacaaaataaggttactagaaccagaagcatcaaa

SEQ ID NO: 882249 - DNA, 645 bp, Homo sapiens
atagctcttattattttgagttacgtcccatcaatacctaatttattgagagtttttagcatgaagggctgttgaattttgtcaaaggccttttcttcatctattgagataattatgtggtttttgtctttggttctgtttatatgatggattacgtttactgatttgcatatgttgaaccagccttgcatcccagggatgaagcccatttgatcataatggataagctttttgacgtgctccctgattcagtttgccagtattttattgaggatttttgcatcaatgttcatcrgggatattggtctaaaattctctttttttgctgtggctctgccaggctttggtatcaggatgatgctggcctcataaaatgagttagggaggatcccctctttttctatggattggaatagtttcagaaagaatggtaccagctcctccttgtacctctggtagaattcggctgtgaatccatctggtcctggactttttttggttggtaggctcttaattattgcctaaatttcagagcctgttagtggtatattcagggattcagcttcttcctggtttagtcttgggagggtgtatgtgtccaggaatttgtccatttcttccagattttctagtttatttgtatag

SEQ ID NO: 882250 - DNA, 670 bp, Homo sapiens
caaagatgcacacacacacacacacacaaagaatagaaagaaaaatagcagaatatcagttgttatgtattcatctggggttacagacttttaaaaatgtcgttttaaaatttattgaattttgaaagtttccataatgaatatgcataatatttgtaacagraaaacagtatagtatttctagagcacactctgccaatacgtaaatcttctgacatgtaaatggttaattctcactgtatagaaaacttggtagttcaaaatgtctaaagtgatgaccttttacttaatttatgaataaataattgttttcttataaccaatgtattcttgcttttggccactgcttgatgtgacttagtctgctaaaatcctatccttatcatctggcaaaaaagtatgaggaataaaactttttaaaattatactttccctcaaaaacaaaaaagcaaacaatgaaggcacgaccttcacactgttcttactaggcattaaaacaatacacaataaaacattacaaaagcaaaacaaagtcagaatgaaacacttcttcccactcaaactatacaacaattattcacttgtttttcttatttataatatatattctaagcacttcaaaaataatagtcatttcttaagtgtaattatcagtattaagaatcaattc

SEQ ID NO: 882251 - DNA, 670 bp, Homo sapiens
caaagatgcacacacacacacacacacaaagaatagaaagaaaaatagcagaatatcagttgttatgtattcatctggggttacagacttttaaaaatgtcgttttaaaatttattgaattttgaaagtttccataatgaatatgcataatatttgtaacagaaaaacagtatagtatttctagagcacactctgccaatacgtaaatcttctgacatgtaaatggttaattctcactgtatagaaaacttggtagttcaaaatgtctaaagygatgaccttttacttaatttatgaataaataattgttttcttataaccaatgtattcttgcttttggccactgcttgatgtgacttagtctgctaaaatcctatccttatcatctggcaaaaaagtatgaggaataaaactttttaaaattatactttccctcaaaaacaaaaaagcaaacaatgaaggcacgaccttcacactgttcttactaggcattaaaacaatacacaataaaacattacaaaagcaaaacaaagtcagaatgaaacacttcttcccactcaaactatacaacaattattcacttgtttttcttatttataatatatattctaagcacttcaaaaataatagtcatttcttaagtgtaattatcagtattaagaatcaattc

SEQ ID NO: 882252 - DNA, 574 bp, Homo sapiens
gaagaaatggtgtagacatattttttcttcctttagtcctaatttattgttattatttctttaaaaaaatttatttattatactttaagttctgggatacctgtgcagaacgtgcaggtttgttacataagtatacacatgtcatggtggtttgctgtacccatcaacccgtcatctacattaggtatttctgcctaatgctctgccttccctagccccgcatcccctgacgggccctggtgggtgttgttcccctccctgtgtccatgtgttctcattgttcaactcctacttatgagtgagaacatgcrgtgtttggttttttgttcctgtgctaatttgctgagaatgatggttttcagtttcaaccatgatcctgcaaaggacatgaactcattcttttttatgcctgcatagtattccatggtgtatatgtgctacattttctttatccagtctatcattaatgggcatttgggttagttccaagtctttgctattgtgaacagtgctgcaataaacatatgtgtgcatgtgtctttacagtagaatgatttataatcctctgggtata

SEQ ID NO: 882253 - DNA, 613 bp, Homo sapiens
ccagatactgtttcagagaaaaccccaatcctgatgaaatccctaccaaccccagagacaatggcagcaatccaaagggtctatgagaaacaaggagcagatagttcccccttgtggcacaggcctgtggactatgtgactttattgtgaggacagggtggacccatgttcaaactactcaaggcatacacaaacacatctgtaccagatggaaggctgagcatagccttctacctccctttccactgaatatttcatgaaatgactgaaaatgctgatttaatgaaaaacagcctacttctgggttgacagtcattttcctgctttctgaggttatggaagttttaacattcagatatggatgacattctaaataaattatatacaaattaatggggaaaacattcaataacatawttctaaatgtaaggaaaagaaataaagatatatctactaatttcttacctctgaaaccaactgaattttacaacaaggaaaataaatgcagatatgtaaattccatcttagatgaaaatagaaagcccttacaaccccaaataacactttctttgaagaaattctgccaattccagtgaaactggaaccaaatgga

SEQ ID NO: 882254 - DNA, 522 bp, Homo sapiens; identical to SEQ ID NO: 879883

SEQ ID NO: 882255 - DNA, 650 bp, Homo sapiens
ggatagttttaatggttatattgcactaccctctgcgtcctgttatttctggtcatagatcctaattaggctttctggactctttcccccttcaatatattatttgaattcagctgtcttatatttacctttaccccctttttttcccctctagcataaataytcccaatttctttggaaacttttggtttgctaagcacctcaatttaaatgaatggaacttattgttacaaactaacatttccccttcttcttacacctcccaataaaaactgtgtcctctgtattcacactgcctcactgtagtctacaccttcagttccaagtaactcagatttgcctgtgggggatgaggcaaggaaaaggctagagatagggataactttaaatatacagagagattactttttttttccctttccctttccctccttctctgtctctctcttcccatgtcatctttgctgcttcgtatgttagcttcattctataacagattttctcagtgtggtggagaatatggccattgagggctccagatttgtatcttctgcaaatctacagaactacagtagaaacaaggacttttctctgtcagtgtccatgtgtcaatttagggaagaactcaggtactgtttgggtcatatata

SEQ ID NO: 882256 - DNA, 583 bp, Homo sapiens
ccctatcacttcctgttacacaaattaaacgcagatttggtcttttcacatagtcccatatgttttggaggctttgttcatttctttttactcttttttctctaatcttgtcttctcacttcatttcattaatttgatcttcagtcagtgatatcctttcttccagatgactagggtacrtctgttccttaggccctcctgccagacagctcttcccagggcccctgcctgcaaacaggaaggagggtgtgcatagcagcagcctccactgtccagcctgggtgctttactaacagatgcacttaagtactttgctgggggcctggatcattttggacctccaaatgtaaccagtaccttatcccaaggggccagaaaaaaataactatgagctggttcctgtgcctcagggttgcagtgcacagctccagagtactgagctaagatctgtgcctgacacttgagcaggaaaggagccctcactctcagaatactgacagggttgagaaacatgggcttatgggccaacaagggagcagggaagccatccctttgtagggctagtccagaagaagtgcggcct

SEQ ID NO: 882257 - DNA, 724 bp, Homo sapiens
actgtttagttagatgtatctccatgtcttctgtccactttctaatagagatatttgtatttttttcttattgttgagatttaagagttcttatataatctaaaataattcctttttcagatatgtgatcagaaactcttattttcctagatttcaccttatatttttgtcttcttaaccaagtcttatacagcamaaattttaaattctgatgaagtccaagttgtgaaatattatttttatgaatgatgcttttggtaccatggtaacatctttttgtgaagatccaggactgaaatattttttcctatgattttttacagaagttttaaaatgttacattttacttttaaatctatgataaattttgagagaaatgttctgtaatttacgtggcttagataaacatttgttttttatttcaatatccaattttcccagcgtgatgtgttgaaaagattattcttcctctattgcactgttttttaacatatcaaaactcaaattggtgtatttgcatagggttaattctgagtactctattctattccattcatttgtggattactgtaccaacttgtcttgaaactgttaagagtgattcataagattaggttatccttttataaaattgtttacttttattacttcctttgatttccctatacattttagaataatcatgtctatatttacaaaaattgtccagggattttgataaatg

SEQ ID NO: 882258 - DNA, 661 bp, Homo sapiens
aacttcgtagtcctctatgtatttgacatggatccaacattagtgtgaaagagctatgtctggtttcaaatctgtatggaagtaaagtgggggttcttgccaaagctaaggaaaataaagaagaaaattcaggctaagtatcataaatctttggcttcaaatttattcttgtcttaaggacaacaattacattaaagaagctgtacttcaccgaactgtctacaaaacaaattgaaacatggtgaaattaaattcatatatgtatatataactgatcattaattatttttatgcgagattattaggagttatgataacaaaatgtaatatattgggcagggcacrgtggctcacacctgtaatcccagcactttgggaggccgaggcggggggatcatttgaggtcaggagtttgagaccagcctgaccaacatggtgaaaacccatctcggctaaatacaaaaaaaattagctgggcgtggtgtcgcatgcctgtaaccctggttacttgggaggctgagacaggagaatcactcgaacctgggaagcagaagttgcagtgagccaagattgcaccactgcactccagcctgggcaacagagtgaaactccatctgaagaaaaaaaaaaagtaatatctcctgtctggtatactgaggaa

SEQ ID NO: 882259 - DNA, 661 bp, Homo sapiens
aacttcgtagtcctctatgtatttgacatggatccaacattagtgtgaaagagctatgtctggtttcaaatctgtatggaagtaaagtgggggttcttgccaaagctaaggaaaataaagaagaaaattcaggctaagtatcataaatctttggcttcaaatttattcttgtcttaaggacaacaattacattaaagaagctgtacttcaccgaactgtctacaaaacaaattgaaacatggtgaaattaaattcatatatgtatatataactgatcattaattatttttatgcgagattattaggagttatgataacaaaatgtaatatattgggcagggcacggtggctcacacctgtaatcccagcactttgggaggccgaggcggggggatcatttgaggtcaggagtttgagaccagcctgaccaacatggtgaaaacccatctcggctaaatacaaaaaaaattagctgggygtggtgtcgcatgcctgtaaccctggttacttgggaggctgagacaggagaatcactcgaacctgggaagcagaagttgcagtgagccaagattgcaccactgcactccagcctgggcaacagagtgaaactccatctgaagaaaaaaaaaaagtaatatctcctgtctggtatactgaggaa

SEQ ID NO: 882260 - DNA, 542 bp, Homo sapiens
caccccaaacctcctttgcagagatcttggtacaaaggggccctctctgatccgtgaccaggcaaatatccaggtattcagaaagctgatcacctagataagcagcctaatccaccccacccttcctatgcagaaattctggtgcagagagctctgcttcatgcccagacagatctccaagcatttaaagcacctgcttgtctaattcagcagcgtgagttgtaccaaccctactgtgcaaaaatcttggtgcagggagtcattctctgctccatgcccagtcagmtatccaggcacctggaccatgcactcttctagattaggagtttaggatgccattcatctccatgcagataatttggggctcaggaggtttccaagattcatgtctaggaaaacctctgggcacatggtggctggccactggattctcccttgacattggtactggttcctgccatcagtatatctgtagatggatctttctggtgtgggccccacccttcatggtccccaccacctggggctgaacagggagatcg

SEQ ID NO: 882261 - DNA, 685 bp, Homo sapiens
tccttaagattctggatactaaacctttgtcagatgcataatttgcaaatatcttctcctattctgtaggttgtctgtttactctgttgattgtttctttagtctcatttgtcaatgtttggttttgtcacaactgtttttggcgcctttgtcatgaaatctttgccagggcctgtgcccaaatggtatttcctaggttaccttgcagggttttcatagttttaggttttacatttaagtctttaatccrtctttaattgatttttctgtatggtgtaaagatggggtccagtttcaatcttctgtatatggctagccagttatcccagtacaatatactgaataagaagtcctttccctgcttgtttttgttgactttgtcaagatcatatggttgtaggtgtgtagcattatttctgggctctctattctgtttcattggtctctgtgtctgtttttgtaccagtaccatgctgttttggtcattgcatcattgtggtatagtttgaagttgggtatgttgtgatgcctccagctttgttctttttgtttaggatcgtgttagctattcagactctttttttggttccatatgaattttaaattagtttttcttttttttccccttttttattttatttatttttattatactttaagttctagggtacatgtgcacaacatg

SEQ ID NO: 882262 - DNA, 674 bp, Homo sapiens
tttgtatttttaattggtttagtttggttttttttcagacaggaatgggagttctcagctgacagtatgctctaacagccaaaattaaatggttgtctaagaaacaaagattcttgaggatgattatattgtgatrtgtttcctacctaaatcatatttatttggctggttggataaagagtgaagttaactctaaccctatgggaacagctctttccatttgcccaatctgagatccacagagatgcctagaaagctgaaatctatcacttcaacctgggtttgtcccctcagcattcagtcagctctgagtaaaataaataatgctgataatcttaacaccaatattaataataattgctagcccgtattgagtgcttcccatgtactgtacttacgcgcttactgtgagcccagccagtcaggcgtagtgttttgacttaagctactttggtagtggcagctggcgtggcctctctgcctccatctggaaccacagcctattgtgacttcccaaaaacctcgatgacttgagaacctgctgtcacctgcccagggatgtaaggattccctcctaggtcaaaaaggttttgtgttccccaggaataaagggggaaaggcacttggatgaatgagacagccaccagaggaacaccatttttagaattttatac

SEQ ID NO: 882263 - DNA, 468 bp, Homo sapiens
atcacatcattttatctgttcagtgtgcatccccgaacagcatttatgtattcctacacagccactatctcatcacatctgacaaaatgaacaatgatttttttggtatcagctcatatgcagcccttagctgagtctcctcactcttttctttctttctttyttttttttttttttttttttgagacagagtcttgcactgtcgcccaggctgcagtgcaatggtctaatctcggctcactgcagcctctgccccctgtgctccaacaattctcctgcctcagcctcctgaggagctgggattacaggcgcatgccaccacacccggctaatttttgtatttttagtagagacggggtttcgccatattggccaggctggtcttgaactcctgacctcaggtgatcctcccacctcggcctcccagagtgctgggattacaggtgtgagccactgcacctagccaag

SEQ ID NO: 882264 - DNA, 468 bp, Homo sapiens
atcacatcattttatctgttcagtgtgcatccccgaacagcatttatgtattcctacacagccactatctcatcacatctgacaaaatgaacaatgatttttttggtatcagctcatatgcagcccttagctgagtctcctcactcttttctttctttctttcttttttttttttttttttttgagacagagtcttgcactgtcgcccaggctgcagtgcaatgktctaatctcggctcactgcagcctctgccccctgtgctccaacaattctcctgcctcagcctcctgaggagctgggattacaggcgcatgccaccacacccggctaatttttgtatttttagtagagacggggtttcgccatattggccaggctggtcttgaactcctgacctcaggtgatcctcccacctcggcctcccagagtgctgggattacaggtgtgagccactgcacctagccaag

SEQ ID NO: 882265 - DNA, 691 bp, Homo sapiens
acaacaacaacaacagtaaaaaagtaagttctatttgccactgaagtcatttctggaattaaaacaataaaatgacatttctactaaaatgtttttctagctagaggtgacaagtgtggccataagtccttcatggaaaagcctggctctgagctgcagtcctggcactttccattgcccctgaagyccccaatcctgtacacagccatcttcatcagtgcaagaatagtgaccactgcctccatggtgtttagaggcaccatggtggctcacagtacacctaagtacttgaatgaagtctaatttgctggattttatctgctctgttattcctgggtcagtcttaagagtgactaaatattgatgattgagtttcttttcttttcttttcttttcttttttttttgaggcagagttttactctcgttgcccaggctagagtccagtggtgtgatctccactcactgcaacctccacctcctgggttcaggtgagtctcctgcctcagcctcctgagtagctgggattacagaaatgcgccaccatacctggctaatttttgtgtttttagcagagatggggtttcaccaagttggtcaggctggtcttgaactcctgaactcaggtgacccacccgccttggcctttcaatgtgctggaatgacaggcatgagccaccatacccggcctg

SEQ ID NO: 882266 - DNA, 674 bp, Homo sapiens
tgcactttatccaagattggtgtcatattggctaaatcaaatcaaaacacaaaattagaacttttttatcatgaaactatgtcattcttgaagaagatgccatttttttttttttttttttttgacagagtcttgcttttgtcacccaggctggagtgcaatggcatgattttggctcaccgcaacctccccctgctgggctcaaccasttctcctgcctcaggctcccaagtagctgggattacagccacgtgttaccacacccagctaatttttgtatttttagtagagacacggtttcaccatgttggccaggctggtctcgaactcttgacctcaggtgaactgcctgcctaggcctcccaaagtgtagggattacaggcatgagccaccatgcccggcctccatttcttttttgtagtctttagtaaacagctgctatcattgcagacttgctattcagacacttaggaatttttcactaggaggcatgtaaagaaagaccatgagcatttgtaatgaatttagcattcattctttgactgcatggctatccccagagctgtaactttactaatgaattttttagaagctgataagctagcaactgagcctaaccagccactcaccttcattattcagtgcccttttattcttgtctatttctccacca

SEQ ID NO: 882267 - DNA, 637 bp, Homo sapiens
ctctctctcacacacacgccctttacatcaaatgtattctacacaaattttaaaaatcctcccactcagctgggtaaggagacggatcatttgctggtgtctgaaggaagatacctttaaaaatataagacatgcctattctttatctttcagttcttgaagccacatcaccctcaaaayacatcctttctctctcttgaacttatttgttcaaaatccccaggagaaaacttttgctttaattggtcagcaatttctctatcttgtaccatatatggctataagaaagtacaaaattggctgtagaaaaccatctccctttttccaagagtgtatgaaatttcacagacagattatacacactttacagggggcaaatcccattctttcaagaggtcattgttcacaaccagcagctttttggcagaatgcaatggctgtacactattgtaaatacatccttctaagatagagttagttaaggaattctgtaggccccttcctctaggagcccagcccaatctttctgctttctattggggcaaggatgggcagccccaaataggagcctccaaatcagtgttaaaccagaatggcttccactgaacaatataaatagacagtaaaagaaagaaga

SEQ ID NO: 882268 - DNA, 606 bp, Homo sapiens
aagtttttgtttctccaacaggaaggaaagagtcattgacattttcgtaataaattcgttcaattaaattgactaatattgtttacaatataatgtctatcccagtataatcatagggctcttactaaaccctacaakaaaacaatataaatttattatttatatgaatcatgaattttaacaagcaacatttcttttttttctacattcaagtaatcattttcctaattcagataaatgacaagccctcctatagattttaaatagaaaaggtcatggaatcatccttgacaagaaattttccaaactgctttcttaagatatttcatacatcttgtctttgagatcctagtctcagttcaaacaaatattttacttttaaaaatgatttcttagaaatttggggaattattaggagagagataccattgatgtagaaaaaactataagcaaatttatataatataaaacatgaatgttccattagactttaacattatgcacaaactggccttggctttaaaaaatatataaataatcggaagcagttgagtgaaaacagtcaaattgagcatgtagagcagctctaacccaaggggatattaa

SEQ ID NO: 882269 - DNA, 606 bp, Homo sapiens
aagtttttgtttctccaacaggaaggaaagagtcattgacattttcgtaataaattcgttcaattaaattgactaatattgtttacaatataatgtctatcccagtataatcatagggctcttactaaaccctacaagaaaacaatataaatttattatttatatgaatcatgaattttaacaagcaacatttcttttttttctacattcaagtaatcattttcctaattcagataaatgacaagccctcctatarattttaaatagaaaaggtcatggaatcatccttgacaagaaattttccaaactgctttcttaagatatttcatacatcttgtctttgagatcctagtctcagttcaaacaaatattttacttttaaaaatgatttcttagaaatttggggaattattaggagagagataccattgatgtagaaaaaactataagcaaatttatataatataaaacatgaatgttccattagactttaacattatgcacaaactggccttggctttaaaaaatatataaataatcggaagcagttgagtgaaaacagtcaaattgagcatgtagagcagctctaacccaaggggatattaa

SEQ ID NO: 882270 - DNA, 606 bp, Homo sapiens
aagtttttgtttctccaacaggaaggaaagagtcattgacattttcgtaataaattcgttcaattaaattgactaatattgtttacaatataatgtctatcccagtataatcatagggctcttactaaaccctacaagaaaacaatataaatttattatttatatgaatcatgaattttaacaagcaacatttcttttttttctacattcaagtaatcattttcctaattcagataaatgacaagccctcctatagattttaaatagaaaaggtcatggaatcatccttgacaagaaattttccaaactgctttcttaagatatttcatacatcttgtctttgagatcctagtctcagttcaaacaaatattttacttttaaaaatgatttcttagaaatttggggaattattaggagagagataccattgatgtagaraaaactataagcaaatttatataatataaaacatgaatgttccattagactttaacattatgcacaaactggccttggctttaaaaaatatataaataatcggaagcagttgagtgaaaacagtcaaattgagcatgtagagcagctctaacccaaggggatattaa

SEQ ID NO: 882271 - DNA, 649 bp, Homo sapiens
gcaatcaggcaagagaaagaaataaaaggtattcaaataggaagagagggagtcaaattgtccctgtttgcagacaacatgattgtatatttagaaaacccccctgtctgagcccaaaaactccttacgctgataaacaatttcagtaaagtctcaggatacaaaaatcaatgtgcaaaaatcacaaacatccctatacaccagtaacagacaaacagagagccaaatcatgagagaattcccattcacaattgctacaaggaaaataaaatacctaggaatacaacttacaaggaacatgaaggacctcttcaaggagaactataaaccactgctcaaggaaataagagaggacacaaacaaatggataaactttccatattcatggataggaagaatcaatattgtagaaatggccatactgcccaaagtaatttatagatttaatgctattcccatcaagctaccattgactttattcacagmactagaaaaaaaaaactttaaatttcatatggaaccaaaaacgagtctgtatagccaagacaatcctaagctaaaggaacaaagctggaggcatcatgctacctgacttccaactatactacaagcctacagtaaccacaccaaaagagatatatagaccaat

SEQ ID NO: 882272 - DNA, 568 bp, Homo sapiens
gttagcatctctcctcactctgttcttgtagctcccggttactgttttcatggaagctatgcgcgttactgtatacaaccacaaaatctcaataatgttcaacaataagcatacattttggtggttggttgatgcaggctaggcaggtctgctgatcttcagtcagttccatgtgtctcttacccttctcctgggaccgccagcaaggcaatggcagtggcacgaaaggccacactcaacagcataagcacgtttgaagcccctgcttgtgtcatgtaccctaatgatggcaaaagcaaggccccaacaaaaagsgtaggaaatactcctctcccacaaaagtagaagggaaatgagtgattattctgaataatctactacatcgtgtttcttgtattttttgagaaaccttgagcttaagtctcttaaatgtttcttgcttgctttacagaaatttttttaaaataaatgttcttcctctgagacctcaaataatgctcattttcccttataatacagaatattttcacaggaccatagtgattttattacttaaccttgtatggga

SEQ ID NO: 882273 - DNA, 551 bp, Homo sapiens
atgtcaggggctggagggaagggaaatgaggagttagtgtttaataggtacagaggttcagtataggatgatgaaaaagctctggagatggatggcggtgatggttgcacaacatggtgaatgtacttaatgccattgaactgtacacttgaaaatggttwatactgggcgtggtggctcatgcctgtaatcccagcactttgggaggccgaggtgggtggatcacttgaggtcaggagtttgagaccagcctggccaacatggtgaaaccccatctctactaaaaatacaaaaattagccgggcatggtagcacatgcctgtaatcccagctactaaggaggctgaggcaggagactcgcttgaacccaggaggtggaggttgcagtgagccaagatcgctccactgcactccagcctgggcatcagagcaagactccatctcaaaaaaaaaaaaagttaatatggatatatattaccacaattaaaagtcacccaagcatccgtggaagcccaattccatgaaggaggaacaacaaacttaagaacaga

SEQ ID NO: 882274 - DNA, 630 bp, Homo sapiens
aatattgcaaaaacgttaagagcacggaccctagagccagactgtctggattcaaatccctgctccaccacttaactagctatgggatattctgtgcctcagtctcttcattagtaaaatgggcctagtcagttgtgtccacctcagggttatttagtgagtttagatataatcaatgctttagatatatacaatgctttaaaaatgcctggtacatgctaagtgacacaaaagtattaactgttatagtgattatatgtgttgtctttatattagttgtactatagaaaatagtgactagtatattatggtaaatctttaacttggtaatatttcatttggtacaataaaacaaattctatttatagttctttgaaatgtataccagacttttcaaatgacacttttatgtgtctttttacatttgccagattctttacattattgttttacttcttgttgagggagatagtgggaaaaatatmtttgttgtttctcataaagaaacagacatacagagtgtttaggaccttttaaagtatagcaataagaaagtcagtggaaagactaaaattagaacccaacatattccatgtgccaatgtgttgagccaagctatctgttctcctt

SEQ ID NO: 882275 - DNA, 536 bp, Homo sapiens
cagtataccacccagaactccccaagatgtgagttttaacatagccatgactttgcctttcattttggccaaacttggtttccaatttctaaagcaggcttctgctcatatttataatgtgaaaattttcttaaatgttaacacttatgaaatcgttatgctacataaaaattcccctgagtgtgagatacacgaagaaatgcaagagatgaaaaataatttgctctatcacacattttcatatttaccattaggcattaaaagcttcaaatcaaaattaaatttcctatgtaaaattaaaaagacaaatagcatcagttccttaaattagcagaagcaggcatytgctaaagttctgaggtagacattcagtgcattttacaagaaatcaacaatatgtccatttcttccagtccttggatcgaaataagtccattcgttctcttcatctataacccaataaataagttttgatggccatctaatgcaaagataatgccctcttaaccataagctaaaagggaaaaaaaaaaaaa

SEQ ID NO: 882276 - DNA, 635 bp, Homo sapiens
gctccttctatcattaattcattccctaaataagtatttcttatgtacttgagaaacaacttttcattttagacccaaaatattatttcaggccaatatccttgatgaacattgcaaaaatccacaacaaaatactggcaaagcaaatccagcagcacatcaaaaagcttatccaccacgatcatgtggacttcatcccggggttgcaagtttggttcaaaacacataaatcaataaatgtgattaatcaggtaaacagaactaaagacaaaaaaaaaatgattatttcaacagatgccagaaaggcttttgataaaatttaacataccttcatgttaaaaattctcaataaactaggtattgaaggaccatacttcaaaataataataatatgacaaacccrcagtcaacatcatactgaatgggcataagctggaagcattccccttgaaaactggaacaagataaaaatgtcctctctaaccactcctattcaatatagtatttgaagttctggccagggcaatcaggcaagagaaagaaataaagggcattcaaataggaagagaggaagtcaaactatcccagctagcaaatgacataatcctatatctagaaaaccctcttatctaagc

SEQ ID NO: 882277 - DNA, 608 bp, Homo sapiens
ggagctagtctggggacagaatgtgtattgattgactcagaggttctctgagtttctctctataaaggcaatttgcataacaatgattacatattgggtttgaggcagttactgctcactggagtccttccagagtaactatttcggtggttgcagagccccctcagaaacctggctttaaaaggaaattaaatgtgaagggttgagttgctgcagttgttagccttgggaagggattaaaggggacgtttttgtcatgtgagatgtcaggaaaattcatgaggagctcactaggttgtctacttggaaaaaaacgaacttcttcctaatggattttgaaaaagattatttaatttgggttcaccattagccattctgggcaagggatggaggcgaatgttacccttcattcttgtagagaacagtgaattgttctgtctttacaaaamcaaacgcaattgaaatatttttttatgtgtaatttattgctctgcagacaatggagtggaaaagttatagtggttaattactccccaaaaccagaatattgagtgtgtgtgtgagtgtgtgtctgtgtgtgtgtgtgtgtccgtgtccatgacacaaaa

SEQ ID NO: 882278 - DNA, 608 bp, Homo sapiens
ggagctagtctggggacagaatgtgtattgattgactcagaggttctctgagtttctctctataaaggcaatttgcataacaatgattacatattgggtttgaggcagttactgctcactggagtccttccagagtaactatttcggtggttgcagagccccctcagaaacctggctttaaaaggaaattaaatgtgaagggttgagttgctgcagttgttagccttgggaagggattaaaggggacgtttttgtcatgtgagatgtcaggaaaattcatgaggagctcactaggttgtctacttggaaaaaaacgaacttcttcctaatggattttgaaaaagattatttaatttgggttcaccattagccattctgggcaagggatggaggcgaatgttacccttcattcttgtagagaacagtgaattgttctgtctttacaaaacmaaacgcaattgaaatatttttttatgtgtaatttattgctctgcagacaatggagtggaaaagttatagtggttaattactccccaaaaccagaatattgagtgtgtgtgtgagtgtgtgtctgtgtgtgtgtgtgtgtccgtgtccatgacacaaaa

SEQ ID NO: 882279 - DNA, 658 bp, Homo sapiens
cagcttaagaagcttttgggctgagacaatgggattctagatataggatcatgtcacctgcaaacaaagataatttgacttcctttctttctatttgaacacaatttatttctttctcttgcctgattgctctggccagaacttccaatactatgctgaataggagtggtgacgggggcattcttgtcttgtggcagttttcaaggggaatgttttcagcttttgcccattcggtatgatcttggctgtgggtttgtcatatatggctctttattgttttgaggtatgagcctttaatacctagtttattgacagtttttaacatgaagggatgttagattttatcaaaggacttttctgcataaatggagataatcgtgtggcttttgtctttagttctgtttgtgtgatgaatcacatttattgacttgtgtacgttgaaccaaccttgcatcctgggaatgaagccaacttgatcgtggtggataagatttttgatgtgctgytggatttggtttgctattattttattgaggatttttgcatcaatgttcatcaaagatattggcctgaagttgtctttttttgttgtatctctgccaggttttggtatcaggatgatgctggcctcatagaatgagttaaggaggagtctctc

SEQ ID NO: 882280 - DNA, 615 bp, Homo sapiens
gggtctgtggctgcaggctcttaactctcatcatccagtcatgaagaatgtggtagcataatttcatcaggaagtattgggacccagtgaagggtgaggaaaaagactgacatattgcatatttgcatatttaaaccttgcatatttaatttacacacttatgaaggaacctagtcttgcttatgaagcaaagacataagccaagtttaacaaatctgacaatatttttacagatcgaatggggacctcattgaacagggtctcttatactcatcctgtgcataatggcctcagcgaaactttttctttattaaacatactgctatgttttcagttgttcatactttgcttttgattgagcagtttattaagatatgtgatgaattcttcacccagtaaaggaattaaagattatttgacacttccttggtgataggcagaaaataagttaacctattaaaatgcaatccaattagtmttgacctatatgatcccccgctactagatgaaaagatattctctgatccttaaaccttatgcacttgaaaagaaatagagtcctaccttttgatcttaatttcttttctcttgagaaataggtttttttgacatgtg

SEQ ID NO: 882281 - DNA, 619 bp, Homo sapiens
accactggctgtctcactcctggatttatgtgactcccttagctatactttcccagccccctgggatgttccccactcatcctattcacccacaaagaaatattgtcaaaatcaattgggtgatgattaggagccattatctgcctgctgtgctgaaaaggatacagggctatctgcagaaacctttcatgacgggctaaaaaaatattccagtatatctaggagtggtgtcacttctaagtgggaaaatcaaagtcaatccatagtcttttcatactattggcttgttacgtttacaaggtgttatatttctaaagcaaacactatacgaaatatgaaaaattcatgcttgacttaaagggaagaaaaaagtaaagggaaccattttgatagtggaacagatatactcagattcaaggactgaataaatagatttgtaacattttcttgctttgccctctggagctctgccttctgtaatcttcccagtgtcagtcctccaggttctctgtcctcgcaactcggatttagaattackgataaaagatgcctaaaatccaatttcttgattgaggaaactgaggcctggaaagtgaattaagtctcccaaagttggcca

SEQ ID NO: 882282 - DNA, 630 bp, Homo sapiens
gcttataaaactagaacaggatgagactctgtgggatatggtttgatttgcctcagctcaggaagcccaccccgatggagaaggagaaggcaggtagaagccaagggaatgacagtcaaggccaggatgcctccacagggaagagtgctccttccaggaggtggcatcagcaccgtccagctctctctagggctccgtactctctgtgtacatggtggcccaggctttacttcctgctttttggagtgggacctcgagaaccaagcagtcctgccactgcagcccaagcggagcatgcagttctttgccacaggccttacagcgctctgacgctgctcccatggaacttttcccaaccaattcagagcactttgagggccacagtgatgctgggagcctgtgttgtgagtcccactgctatccagggaaggycagtgtgaatgagtagcagtgctggggagtaaagcatcacttctcaagccctgtcctcaggctcatgtgcagcactagcgatgcagcactgactgcacacagcatgccactcagtcactgaggaggggaagtgagccccttttagttctcttccagtgcttcccatcgagttgaggagagtccattgggcactagaac

SEQ ID NO: 882283 - DNA, 637 bp, Homo sapiens
caaattgaaaagctctggacagaagtcaatgccttgaaggaaattcaagccctgcagacaggtaaggtgcagaccttctcagtgccttgtcccaaaggagacaggaaaatttctgggtcaatttctgggggacgtctttttaaaagaaacattgacaaatcaataatgtggccaataagagggccccaatgcygggagatgattgttttaggaaatcagcttcatttacaatcccattctcctatatatgggtggtatagaaataaaaataagtagttcaggaataaatttgaaaagtcagtccatacttattctctaaagagtagtgaaacagaatgaagccagtatgaaatgactaaaatgattagcatttattggatgatagctaagtgcctatcaggccaccaggactctctcgggccacacccagcctaagatgctggaaggacatgggttagaaccgcagcttgccaacagggcagcgccagcgttcctccccacagttatgcagccacatgcgctactgcccaggagctattctccaaggggtgaggaagtgagccatgtgggcaggtttgggaacagccctggtttacaaggctcatcccccaaggagctaatatcctttgtagcaatt

SEQ ID NO: 882284 - DNA, 586 bp, Homo sapiens
gtttagacttgggtcccatccccgcaatatctcattatatatatgcaaatattccaaaataaaaaaaaaatctgaaacccttctagtcccaagcatttccaattagaaatactccacctgtacctctttaactgtgggcatattagaacagggcaccttgttcatctccacatcttctatccaacccttctcaaatggtattagtgagagaataaacccctataccccttataagagttagagaaagaggaaagaaacacgaaaagcrgcttaacagttaaaaacaggtttattctccaagataaacagggcttctgtccaattttggtcaggaacattcccttttacagactaaggatatttaagggtttaggaagtggggagcttatcgtaggttcagaatgtttctatgtgagggaaagtttattacagcgttggaatgtcactggtcagaggggaggctgtcttggggttggcatatttctggttggaggagggtttatcttagggctggaatgtttctggttatgctgacattagccattaggctgatgttttggggctagatttaggctttttttttttt

SEQ ID NO: 882285 - DNA, 586 bp, Homo sapiens
gtttagacttgggtcccatccccgcaatatctcattatatatatgcaaatattccaaaataaaaaaaaaatctgaaacccttctagtcccaagcatttccaattagaaatactccacctgtacctctttaactgtgggcatattagaacagggcaccttgttcatctccacatcttctatccaacccttctcaaatggtattagtgagagaataaacccctataccccttataagagttagagaaagaggaaagaaacacgaaaagcggcttaacagttaaaaacaggtttattctccaagataaacaggrcttctgtccaattttggtcaggaacattcccttttacagactaaggatatttaagggtttaggaagtggggagcttatcgtaggttcagaatgtttctatgtgagggaaagtttattacagcgttggaatgtcactggtcagaggggaggctgtcttggggttggcatatttctggttggaggagggtttatcttagggctggaatgtttctggttatgctgacattagccattaggctgatgttttggggctagatttaggctttttttttttt

SEQ ID NO: 882286 - DNA, 586 bp, Homo sapiens
gtttagacttgggtcccatccccgcaatatctcattatatatatgcaaatattccaaaataaaaaaaaaatctgaaacccttctagtcccaagcatttccaattagaaatactccacctgtacctctttaactgtgggcatattagaacagggcaccttgttcatctccacatcttctatccaacccttctcaaatggtattagtgagagaataaacccctataccccttataagagttagagaaagaggaaagaaacacgaaaagcggcttaacagttaaaaacaggtttattctccaagataaacagggcttctgtccaattttggtcaggaacattcccttttacagactaaggatatttaagggtttaggaagtggggagcttatcgtaggttcagaatgtttctatgtgagggaaagtttattacagcgttggratgtcactggtcagaggggaggctgtcttggggttggcatatttctggttggaggagggtttatcttagggctggaatgtttctggttatgctgacattagccattaggctgatgttttggggctagatttaggctttttttttttt

SEQ ID NO: 882287 - DNA, 580 bp, Homo sapiens
ttactcttcacaattgacttgaacattaacatcacaaagagggtcctgttgacaaaagaatagtcaagaacttcatgaatttttgacagtgactcttttctaaccctttaatccaaatatatttaagtgtccatcgtcktcctttatccaactcatttgttaactagttttcttctgtgagttcctttgcctataattgaagcagttctctgaaatcacccaaactgattttatgaaagcccatgcttttggaaagatttgcacttcggctttgcaatctatttacattgactgtacttgcattgtattgctagatgttgactatcagttaggacaatcaaaaatatattgataatgggcagggataaatcagaagttactgtcaataacaaagttatgttttatgggtattttataggtgataaattcattactgagcaatttcatatcatgttttaattctcctggttgtaatatggtgactctggagactcaaatattaaatattggtgtaaagacaacctcttgtcattcaatcttgtctacagtttgaacacaggaagagtctttttacatgtat

SEQ ID NO: 882288 - DNA, 573 bp, Homo sapiens
tggatacacacaatctcaaaagtaacaaactggctgggtgcagtggctcacacctgtaatttcagcctttgggaggccaaggccagaggatttcgtaaagacaagagtttgagaccagcatggacaacatagcaacacccaatggctacaaaaaataaaaaatttgccagatgtggtggcatgtgctaaccaccacaagtcctaactacttgggaagctgaggcagaaggatcacttgagcctaggagttcaagttaatagtgagctacgaccacaccactgcactccagccagggcaagagtgagaccctgtcaaaaaaacaaaacaaaacaaaacaaacmaacaaaaaaataaaaaaacaccaaaaaaccttcacaaatgaaacccttgagagatatgcattttattgtctataatttataactcatttaaataaaatggcctaacttcccctttagaccccaagccagagtcttgcatgggtgccaaggagtggcctaatcagttcagcccagccatagactcaagaaaggaaacattttcctgttccctgccttatattatacaatccc

SEQ ID NO: 882289 - DNA, 647 bp, Homo sapiens
atgtgtattctgatcttttgcccattgtttagttggattatttgcttttttgctattgttgttttgagttccatatgtattctggatattaaccccttgttagatatatagtttgtgaatattttctcccgttctataggctgtctcttcactctgttggttgtttcctttattgtatttgtcggtttatgcttttgttgcttgagcttttgaggtcttaaacaacgttatgaagtgtctctcctgttttcttctaatagtttcatagttttggattttacatttaagtagttcattttgagttgatttttgttaagtggtgagatgagaatgaagaaataaagaataaaatgtttttaaaagactccttcattaagtatcattttaactccacattactgtgtttaatagaaattaagatactagaaaaagattatagatttgttcttatttttgtaacttataaaaatggataaaagggccaggcatggtggctcaccacygtaatcccagcactttgggaggccaaggcaggtggatcacttgagcccagtagtcactgtagttttcatgttttatttttggtcactgtagttttgccttttctagaaattcatataagtagaatgatagactacatagtcctt

SEQ ID NO: 882290 - DNA, 582 bp, Homo sapiens
tcatcactggaaagaaaaggggattttttctttttgatgaggcagagggaggagagagatgaggaaactggaagaaaaaatttggttctttggtcgatctagagtcctggactgaatgtgggtcactaggatggaatttcrcacataggacacaatttcacgcaatggaagaacccagttttgagaaaatctttgtgtagttcagcctagaagctgaaagaatgtctagcccctttgtgaaattccatacaaaagaagaaatgcattaaggtctggaggacaaagaatagcagaagtttgacataaaactggctctcacctgtggaactagggccactccagtctctgagcctctaggatcagaacatttgacattctgtggaattcctccttcagagactcccagaaaacactcccatagttatccccatttaagaggaagagataagtctctgtaacaaagacataaatgtaaacgtgaattgattttgtaggctcaggtaggtgaggtcaagctaccaatctctatcttgggactctcatttactttgtaaaattccagaccatatgtatacaggtgac

SEQ ID NO: 882291 - DNA, 582 bp, Homo sapiens
tcatcactggaaagaaaaggggattttttctttttgatgaggcagagggaggagagagatgaggaaactggaagaaaaaatttggttctttggtcgatctagagtcctggactgaatgtgggtcactaggatggaatttcacacataggacacaatttcacgcaatggaagaacccagttttgagaaaatctttgtgtagttcagcctagaagctgaaagaatgtctagcccctttgtgaaattccatacaaaagaagaaatgcattaaggtctggaggacaaagaatagcagaagtttgacataaaactggctctcacctgtggaactagggccactccagtctctgagcctctaggatcagaacatttgacattctgtggaattcctccttcagagactcccagaaaacactcccatagtkatccccatttaagaggaagagataagtctctgtaacaaagacataaatgtaaacgtgaattgattttgtaggctcaggtaggtgaggtcaagctaccaatctctatcttgggactctcatttactttgtaaaattccagaccatatgtatacaggtgac

SEQ ID NO: 882292 - DNA, 677 bp, Homo sapiens
aatcagggaggattacttgagctcaggagttcgagaccagccctcacaacatagggagacactgcctccactaaaaattaaaaaattagccaggcatggtggcatgcaactgtagttccagctactcaagaggtattatggggtggttgcgaggtaatgaggctggtattattactgtcatttcagctgtagagatgaggaaactaaaaccagagagatgaagtattacatccaaggttttttatagctatgtccaagtgtatgtatatagagaatccaggactcaagtccaggaggagcaaaatcatgctgcctaattagcattcagtgagacctgggaaaactacgtagactcttaagcttcaaaacagtgtgctgattgaagtsttatattgcctattgttcattactagcaacttattccttggggattagctttgcttattccacacatcacccaccaatatcaagtcatttttaccttgatatgaatcagattaaaagaagaggcaactgatgatgggggattgggagtgtgaggggatagtgcgttgaacaaagatggaagggagtggctacataaagcgataaagtgagatttttgcctaggacttttccagcttaaacagagtttctcataaacaacaagggagtggcagagctcagccttagaattc

SEQ ID NO: 882293 - DNA, 690 bp, Homo sapiens
acggttttcttttcttaagaacacaaaaatgttcgtgtacctcttagacataggagaagaaaacacccgtataacctgtattcattcttgtatccacctctaactattgcttatgatcgttcttcccttcaaagccagattttctttaagaatggtctgtggtgtatatgaccaatgccccaatcccatttacccctaaatcctgtttagattctcttcccagaattcccctgaaatgtcctattaaatttctaccaatcatcaaaccctcaaaatagtgcacctatgtgaaactccactcaactactacacttcagactactgaattcaccttccttcctgaaactctgtatttcctgggctcctgggagaccagtctcttcttgagaccctcctacacagaatgaaaaagaaaatgtctctttattcatgaamtcctttaaaaggagttggtgttttacaggattttgtacttgtctctaggaataaatacagtctctgtggataactacagtctctgcatgacataatgcataaatgtggctcatgtacatgctgactgctcacaattttgaaaaaatgatctccctcctgacatccagatctgctttcaaaagctgattgagccacatcaaggtagaggctcactgaaatttcaaaatcaatacatccaaaatatgaaatcagtat

SEQ ID NO: 882294 - DNA, 633 bp, Homo sapiens
atttttggcttggcaacccctgtcttagcctatggggagatagcaataaaacattttttaaattaaaatttgaataaataaaatacacacagagcctatcagatccagataagtgctacagagaaaatgaagcagggtaaaggcgatagagagccagggcctcaccaatatggtgacatttcagcctgacccctgaaataaggaagaggaaaagccatgctacctgcataggaaaagcattctaggagaggtaacagcaagcacaaatgttctgaagaagaaacaacctggcatcttaraaaaacagcaaggatgccgctgtggctaaaggaacgtgagcagtggagagtcataggaaatcaggccagaggagtaaactgaagccagactttgtacaaccttttagtccactgtcacaactttagcttttactctaaaatggaaaaccactggaagatcttgagcaaaggagtgacaacctcatttgacttaattttaagaggatcattctggaggtctgctgagaaaagactacacaaagacaaggacagaaagagagaactcaatcagaagactaatgcaacaatccaggaaagagaggacagcagtttgaatctgagtggtagcagtaga

SEQ ID NO: 882295 - DNA, 680 bp, Homo sapiens
ctctagctctattcctatagagtcaatgctgtggttaaaggctttctgacctctctcagcaagatcagaaactacttgacagaccagaccagtaacttaattgaactcaaacattcctgttgtatgtccatgccctccccttggggcctccatttactgtccctgaaagggatgccactgccgtatctagtcacctttcctccatcaaattataccattcagtgtctccttatatccagagacaccaagttagaaggggccttcctgagggttcatcaytgtctttttacagatgaggtgactgactggtccacaaccctacaaatgtgagtggcccagcaatggtctcctgattccttgtcctgtgctctctcctgggcaccgtgaccttttgaatatgctaaacaactctctcccagctgccttgatcatcacaaagctgccacccttcagagaccaacataaattcctatcaggtccacactctgtcatgatttgtctcagagctgactgcccaggctgccacagccaatccacaccactttggtcatgaggaacagcctcagggaaaatcgttgcctcattcagccttgtcccagctgcaagcaaaacctgccagaccttattctactcctctcttcctgcccccttccttctcctggcccattgtctttcaggca

SEQ ID NO: 882296 - DNA, 604 bp, Homo sapiens
atacgcaagtcccctgcccctgaaacatatctcaaatgtcctcacctcatacccctttcatttatcctacactgcccgacaccccaggttccctgagatttgaaagcactttccttttctatttctaccacaactgtaaaactagaaggcttcaaggagaccaagagagagaacaaaagagccagagttactgtctgcccccaaatcatttgaggagaaattcagacagtagcttggaaagatgaaaaggatccactggcttytggtgagacagaacaaaagaaatcaatttccaaggatagttacagtctcttctgagagcccccacattcttgatatctgctcacccttgatatctgactgagttcctcatcctcttccatcccccagagaatgcctcatcaccctggcctgccttcatcaagaatcttgttaggttggtttagccagaatcccatttacctctgatgtgtcatcttagtaattttccatccaccaacctctacattactctttgtctatacaatcccacttgcccatgttgtattcagagttgagcccaatcccactccccagctgcagtacccctatcatggtggtccta

SEQ ID NO: 882297 - DNA, 604 bp, Homo sapiens
atacgcaagtcccctgcccctgaaacatatctcaaatgtcctcacctcatacccctttcatttatcctacactgcccgacaccccaggttccctgagatttgaaagcactttccttttctatttctaccacaactgtaaaactagaaggcttcaaggagaccaagagagagaacaaaagagccagagttactgtctgcccccaaatcatttgaggagaaattcagacagtagcttggaaagatgaaaaggatccactggcttttggtgagacagaayaaaagaaatcaatttccaaggatagttacagtctcttctgagagcccccacattcttgatatctgctcacccttgatatctgactgagttcctcatcctcttccatcccccagagaatgcctcatcaccctggcctgccttcatcaagaatcttgttaggttggtttagccagaatcccatttacctctgatgtgtcatcttagtaattttccatccaccaacctctacattactctttgtctatacaatcccacttgcccatgttgtattcagagttgagcccaatcccactccccagctgcagtacccctatcatggtggtccta

SEQ ID NO: 882298 - DNA, 675 bp, Homo sapiens
ctgggtgacagagtgagaatctgtctaaaaataaataaatagatagaaagatagatagatagatagatagatatagatagatagataggattttcaatatttaaacctcatgaggccagaactgcctcactgcacaactccgggaggaaaggatgggcgccccctggaattgtggcatgtgtcactattatctgttcttttaaatgcatgtgtccatctggggtagagctgcaagtcaaaggaaaggatgacagaggtaaaaatctttttagaatgaagtgttagtcaaatgtttagccatgatcttttcttcttaatactgtttgctcctgtgatgggggaatgggggaataatcaggaaaaaggaaagttacattcaagttaagcrgcaagaagccccaggtgaaacatattgtaattatcctgttcctgaccttcttcattgagaatgcttctttctagtgttttttgtctagtgttcttccctcagctgtgcccgtactcctaggatatgatcctgatgttactgtatttcaatcctttgcctgaacagaaagtctttctgtgccttaagcttcctttggtagtttcccatgaaagtttaaaaatgaatgttaaaataaatgacaggctggagtatgcactttcaaagggtaaattatatcaataacgctg

SEQ ID NO: 882299 - DNA, 613 bp, Homo sapiens
aaaaaaatcttctcaaggatatgtagtttcttttgacccaacaaataatagagtacattttctgttgccaaatatgagattctgtgatgatgtattcaatgatgtctatgggatttttgctatatatttatagtaatatgtttgcctctatccaaaataataaattctttctctagtagatttcaatgagtagaattaacatttagaaaactactttttttctcctrggaatatttactttgataagtagtctacactatccccaattaaatgcttatgtgtgctaaaatagaaaagaatgatattaattttcatccagaaataaaatactgcttggtggtgggcaattctgttaaaaattgaaagtaaattcgcaattaaagggtcttttaacaaagtatcagaataacgtcctgctcattggggtgatgaaaacaggaaagaatatggctgttgagcaattattaaggttgagcttgaaacttgtagaaatcttttttcttgtctaaaaaaaatttttaaaaaatccaggcttacttctgactttcgaatttcaaagctcctgtagccaacggagggggttggctcctaacagtagggggataagccccta

SEQ ID NO: 882300 - DNA, 613 bp, Homo sapiens
aaaaaaatcttctcaaggatatgtagtttcttttgacccaacaaataatagagtacattttctgttgccaaatatgagattctgtgatgatgtattcaatgatgtctatgggatttttgctatatatttatagtaatatgtttgcctctatccaaaataataaattctttctctagtagatttcaatgagtagaattaacatttagaaaactactttttttctcctgggaatatttactttgataagtagtctacactatccccaattaaatgcttatgtgtgctaaaatagaaargaatgatattaattttcatccagaaataaaatactgcttggtggtgggcaattctgttaaaaattgaaagtaaattcgcaattaaagggtcttttaacaaagtatcagaataacgtcctgctcattggggtgatgaaaacaggaaagaatatggctgttgagcaattattaaggttgagcttgaaacttgtagaaatcttttttcttgtctaaaaaaaatttttaaaaaatccaggcttacttctgactttcgaatttcaaagctcctgtagccaacggagggggttggctcctaacagtagggggataagccccta

SEQ ID NO: 882301 - DNA, 613 bp, Homo sapiens
aaaaaaatcttctcaaggatatgtagtttcttttgacccaacaaataatagagtacattttctgttgccaaatatgagattctgtgatgatgtattcaatgatgtctatgggatttttgctatatatttatagtaatatgtttgcctctatccaaaataataaattctttctctagtagatttcaatgagtagaattaacatttagaaaactactttttttctcctgggaatatttactttgataagtagtctacactatccccaattaaatgcttatgtgtgctaaaatagaaaagaatgatattaattttcatccagaaataaaatactgcttggtggtgggcaattctgttaaaaattgaaagtmaattcgcaattaaagggtcttttaacaaagtatcagaataacgtcctgctcattggggtgatgaaaacaggaaagaatatggctgttgagcaattattaaggttgagcttgaaacttgtagaaatcttttttcttgtctaaaaaaaatttttaaaaaatccaggcttacttctgactttcgaatttcaaagctcctgtagccaacggagggggttggctcctaacagtagggggataagccccta

SEQ ID NO: 882302 - DNA, 600 bp, Homo sapiens
ggtggaacgaaagcaaaaatccagaatttgaaggaggggtaacattaccctggaaggtatggggacgaaaggagtattcacgatcttttgtcttttagaacagtccctggagtcttcctccagaatgcaaacaacctggtgctgctgtttatcttttcaatgatgtctgaaaacaagggaaccaatgtgagcctgcatctcatactgcctgcggtactatgagtcataaagtactctatctttgacccaagtgtatcatatcttcttccaagayctaggaaactctggcaggcaaggaagttagcttgcaaataggataaaatctccaagttttcccagtgtttgatataaacacaaaataactaaagagacttcagtttaattatattctggctttccaaattggaaattgaaaatataggaataaaaacaataatattggcatctagatgttttgtaaacagtgctttcatagatagtttatcagtgaagttcacaaaatatattaacaatgtatataatatccctccatgcatcctcttggcacttaattcatgtagaatctgtggtggacagttaaatatgggttttgattttcca

SEQ ID NO: 882303 - DNA, 639 bp, Homo sapiens
caaagccgagctctgaatgtttatagttcatgagtgcaaataggaatttgaggaacaagatggaaatagtttttaaaactgttttctttcccttttccttagagttagaatcaattaaaacatagttgagcacttccgtgaatatatgtgaatcccttgtgatgctttaaatatccacagtttacacataaaggcattttacttgatgcaaaaagatttaagtgttttctactttcaataagctcattttgtatttttttaacaaaaaaataaamgtagcagtgggagttttcactgtataaaaagaaaaattggtttatgtgttatattatcagaaaaaatcttttatttaaagagatggtacaggatgatatgattaaaggtaatctataaatctgatccttatttttttataaagatttctatttatctacaaaaatatcatataattgccaaatatctgtcagatagaaggcaaagtgtttatctgaaaatatcaagtggttgttctcaaagagtttatattcttattggatgcatctgccaaataataaatgaaacgagggactaaatataaggctaagcaaataattcaactttactttgcactctataacaatactgaaaagatttttttat

SEQ ID NO: 882304 - DNA, 598 bp, Homo sapiens
gcactttattaagcaatatcagattattgtctattcccagaatttttcaaagccatcctagttcgctgcccttgctatttccagtacttggcattccctctacttctctatgcctgaaaatgatggaaatggctttggaattgggcagtgagtggaggctggaagaattttggaaagcatgctagaaaactcctaggtgcctttgaacagactattaaatagggacactgttgaggaaaataaggagaattttagaaaaatcttagaaatcaccttagaaaaagcctaaattgcagtaaacagactgttagtagacatctgtacttgaaggatactactagccagggmtcagagggaagtgagtgacttggtattggaaaccagaagaaatgggatccttataatacagtggcaggaagcttagcaaaattgtatcttgtacgttcacagagagacttgaagagtgaggaagagctaaggagctgctgccatttgaagatgaagtgtacaatacaacagggaatcaagtgaacagaaagtgttgatggggatcccagcagatagccaacaaaagggaacctcacttctacagcagcaa

SEQ ID NO: 882305 - DNA, 689 bp, Homo sapiens
aaagaagtataccatgttatggagaaaattatacccatatgttgaaggatattaatcgaggctggagtaagtagaaattcatagtgtgccaaaggtaagaaaactcgaattcaaagaccctgtgcttgtgattagttgcacagcaatagtaactcatgcagctccccacagactgctgggactcagctcccgcgacagttggctggggttccctgtttcttgccatgtggaccttctcaatatggcagtttgctttattaaagatagcaaaggagaaaatctctagcaagatggaagtcactctcctatgaaacctggtcacagaagtgacatctctccacctttccacactgtatkggttagaagcaagtcacaggtttcacacacatttgtggggagaggattgcacaatgcacgggggtgaggaccattgccagccatctccaaagaagctgtgaaccacatgccttacatgctttgtctcacacacacacataatttttatcagttcaacattaagtaaaaagtattcttaaaatttactttgagaaattgccacactgccttccacaatggttgaactatactggataaagaaaatgtggacatatacaccatggaatactatgcagccatgaaaaagaatgagttcatgtcctttgcaggaacatggatgaagctggaaacca

SEQ ID NO: 882306 - DNA, 581 bp, Homo sapiens
gggatgaacccagatgttcttcatgagtgaatgattaaaataatctgtgctatgtccatacaatggaatactattcagaaattaaaaaggaacaaagtatcgatgcatggaacaacttgaatgaaacatcagggaattgctctagataaaaaagtgatactaaaatattgcatacttcctgacttcacttataaaacattcctgaataacaaaattatgtaaatgggaatgagttcatgattgcctctgtttatgagggagtggraagagaagggacgtgtgggtgtgactatgagattcttgtggtgatggaatgttctgcatcttgactatatcagcgtcaatatctggttgtgatattgtgctatggttttgcaagatgttaccactgaggacaactgggtaaagtagacccaagaattgcctgtattatttcttacaactgcatgtgaatcgatctgcagttattgcaaaataacattttagataaaaaaaaacttgatggcaggaaatgtataaaattgtaaaccacaaggagtgaattgttctatatgcaaattgggaaaagcccatgaaccaag

SEQ ID NO: 882307 - DNA, 672 bp, Homo sapiens
aggaagatctatcaagcaaatggaaaacaaaaaaaggcaggggtttcaatcctactctctgataaaacagactttaaaccaacaaacatcaaaagagacaaagaaggccgttacataatggtaaaggcatcaattcaacaagaagagctaactatcctaaatatatatgcacccaatacaggagcacccagactcataaagcaactccttagagacctacaaagagacttagactcccacacaataataatgggagactttaataccccactgtcaacattagacagatcaacgagacagaaagttaaccaggatatccaggaattgaactcagctctgcaccaagtggacctaatagaaatctacagaactttccaccccaaaccaacagaatatacattcttttcagcrccacaccacacttattccaaaattgaccacatagttggaagtaaagcactcctcagcaaatgtcaaagaaaagaaattataacaaactgtctctcagaccacagtgcaatcaaactagaactcaggattaagaaactcactcaaaactgctcaactacatggaaactgaacaacctgcttctgaatgactactgggtacacaacaaaatgaaggcagaaataaaggtgttctttgaaaccaacgagaacaaagacacaaca

SEQ ID NO: 882308 - DNA, 653 bp, Homo sapiens
  misc_feature 544: n = A,T,C or G
taatccgcattgatgcagccaggccttcccttgtccacgtccagcaaagattaactgagagtccgacatctcgaaaggcctaaggaaacagttactagttcgtctatctgagggctgctacccatgaggtgtcatttacataacaagaccacctttgctagccaagtctcttctcttcctcccataacctgtcttgccactaaaacctgacttacaccatatgctgtttttggccatgcacaaatcccccattctctctgtaacctcaagatggtatagaagtttctgcgacccactaggggattgggtcttcattctgaagtctccccayctacagcatacacattaataaattagcatgcctttctccaattagcctgccttttgtgagttgacttctttttttcagcaaacctatccctttgctcctagagtttggcttagttggtagggtcaaaattccattcttttggaagatacagataagagaatctaggacctgatccatgggcaaaagggtaagaatttcttacagccaggctcncaggatctctctctgtacaatccagtcaagtggatggcaaaaatcactgttgcctctgcaaaattctgattaatgggagaagaagacttatgtgactagtcttggtgca

SEQ ID NO: 882309 - DNA, 598 bp, Homo sapiens
tcctccccttgtttagcatataatcaagaaatgaccaccagcagccgtcgaggctgctctatggaatagccattttcttttcttttttttttttttttgagacagagtctcactctgtcgcccaggctggagtgcagtggcatgatctcggctcactgcaacctctgcctcccaggttcaagctattctgcctcagcctccctaatagctgggactacaggtgtatgccacmatgcctggctaatttttgtatttttattagagacggggtttcaccttattggccaggctggtctcgaactcctgacctcgtgatccacccgcctcggcctcccaaagtgctgagattacaggcatgagccaccacgcccggccggaatagccattcttttattcctttactttcctttactaataaacttcctttcactttactccatggactcgccctgaattctttcttgggcaagattcaaggactccctcttggggtctgaatccagacccctttctggtaacattgggagtggatttttttttttttttttttttgggtgggggcagtctttgggtttgcttcttctatgccctctccagg

SEQ ID NO: 882310 - DNA, 598 bp, Homo sapiens
tcctccccttgtttagcatataatcaagaaatgaccaccagcagccgtcgaggctgctctatggaatagccattttcttttcttttttttttttttttgagacagagtctcactctgtcgcccaggctggagtgcagtggcatgatctcggctcactgcaacctctgcctcccaggttcaagctattctgcctcagcctccctaatagctgggactacaggtgtatgccacaatgcctggctaatttttgtatttttattagagacggggtttcaccwtattggccaggctggtctcgaactcctgacctcgtgatccacccgcctcggcctcccaaagtgctgagattacaggcatgagccaccacgcccggccggaatagccattcttttattcctttactttcctttactaataaacttcctttcactttactccatggactcgccctgaattctttcttgggcaagattcaaggactccctcttggggtctgaatccagacccctttctggtaacattgggagtggatttttttttttttttttttttgggtgggggcagtctttgggtttgcttcttctatgccctctccagg

SEQ ID NO: 882311 - DNA, 628 bp, Homo sapiens
ctatatgtggctagccaattatcccagcaccatttgttgaaaagagtgtctttcccccactttgtgtttttgtttgctttgtcaaggagccgttgcctgtaagtatttgggtttattcctgggtcctctattctgttccgttggtcaatgggcctatttttggtccagtaccatgctgtttcggtgactgtggccttatagtgaagtttgagatcaggtagtgtgatgcctccagatttgttctttttgcttagtcttgctttggctatgtgggcttttttttagttccatatgaattttagaattgctttttctaactctgtgaaraatgatggtggtattttgatggggattgcattgaatttgtagattgcttttggcagtatggtcattttcacaatattgattgtacccatccatgagcatgggatgtgtttccatttgtttgtgtcatctatgatttctttcagcaatattttgtagttttccttgtagatgtcttccaacttgtttgttaggtatattcctaagtatttttttttttttttgcagctattgtaaaagggattgagttcttgatttgattctctgcttggtcactgttggtgtatagtagacctactgattt

SEQ ID NO: 882312 - DNA, 648 bp, Homo sapiens
  misc_feature 541: n = A,T,C or G
ggcgttctatcacaagccaaatgaaatccaaacattttcccacggcttccagagtcctctgtcatctggttccagtctagctctccaacagctttcttcgtttccagacaatctggcctcattatgtccaatgcagcagccactgccacatgtgcctactgagcacttgaaatctgggtagtgagactgaggggccaaatttcctattttattcaatttatgtttaaaaatttaaatttaaaaacggccaggcactgtggctcatgcttgtaatcccagcactttgggaggccaaggtggstgcatctcctgaggtcaggagttcgagaccagcctggccaacatggtgaaacccatctctactaaaaatacaaaaattagctgggtgtggtggcgggcacctgtaatcccagctactcaggaggctgaggtgggagaattgcttgaatccgggaggcagagtttgcagtgaaataagatcgtgccactacactccagcttgggcaacagagcaagaccctgtcaaaaaaaaaaaaaaganaaagaaaaaagaaacatttaaaaaccagtactttttaattatcagaaaactcttaaatatggtcagatgacatagatatatgaatctatgttatcaatgatagattt

SEQ ID NO: 882313 - DNA, 648 bp, Homo sapiens
  misc_feature 541: n = A,T,C or G
ggcgttctatcacaagccaaatgaaatccaaacattttcccacggcttccagagtcctctgtcatctggttccagtctagctctccaacagctttcttcgtttccagacaatctggcctcattatgtccaatgcagcagccactgccacatgtgcctactgagcacttgaaatctgggtagtgagactgaggggccaaatttcctattttattcaatttatgtttaaaaatttaaatttaaaaacggccaggcactgtggctcatgcttgtaatcccagcactttgggaggccaaggtggctgcatctcctgaggtcaggagttcgagaccagcctggccaacatggtgaaacccatctctactaaaaatacaaaaattagctgggtgtggtggcgggcacctgtaatcccagctactcaggaggctgaggtgggagaattgcttgaatccgggaggcagagtttgcagtgaamtaagatcgtgccactacactccagcttgggcaacagagcaagaccctgtcaaaaaaaaaaaaaaganaaagaaaaaagaaacatttaaaaaccagtactttttaattatcagaaaactcttaaatatggtcagatgacatagatatatgaatctatgttatcaatgatagattt

SEQ ID NO: 882314 - DNA, 648 bp, Homo sapiens
  misc_feature 541: n = A,T,C or G
ggcgttctatcacaagccaaatgaaatccaaacattttcccacggcttccagagtcctctgtcatctggttccagtctagctctccaacagctttcttcgtttccagacaatctggcctcattatgtccaatgcagcagccactgccacatgtgcctactgagcacttgaaatctgggtagtgagactgaggggccaaatttcctattttattcaatttatgtttaaaaatttaaatttaaaaacggccaggcactgtggctcatgcttgtaatcccagcactttgggaggccaaggtggctgcatctcctgaggtcaggagttcgagaccagcctggccaacatggtgaaacccatctctactaaaaatacaaaaattagctgggtgtggtggcgggcacctgtaatcccagctactcaggaggctgaggtgggagaattgcttgaatccgggaggcagagtttgcagtgaaatragatcgtgccactacactccagcttgggcaacagagcaagaccctgtcaaaaaaaaaaaaaaganaaagaaaaaagaaacatttaaaaaccagtactttttaattatcagaaaactcttaaatatggtcagatgacatagatatatgaatctatgttatcaatgatagattt

SEQ ID NO: 882315 - DNA, 650 bp, Homo sapiens
cccagagggcacctgccagagcgccagccagagctctcctgtatgaggtgtctgttaacccctgctgggaggtgtctcctagtcaggaagcacgggggtcagggacccaacttgaggaggcagtctgtcccttagcagagcttgagcaccatgctggaagatccgctgctctcttcagagtcagcagamaggaatatttaagtctgctgaagctgcgcccacagctgtccctccccccaggtgctgtgtcccagggagataggagttttatctataaggccctcctgggtgctgcctttctttcagagatgccctgcccggagaggaggaatctagagagcacaaattaaatttaagtaaaagtgacagtgttaactttggacaatgtaggcttcaagacaaaaagcataaaatagaataaaagagagttgttttatattgataaaagtttcataaaagatatatcagccatgaacctttatgagtcaaataatataacatccaaatatattaagcaaaaattggcaggcagataaaaatgaaaacgttgtcataatagattttaatacaatgttcccagctttggacagaacatgacgaatttgacaacatggagatttggattattataattgagataatggtagcat

SEQ ID NO: 882316 - DNA, 653 bp, Homo sapiens
ttcagcctcccttggaagcaactgctacactcttaaagatcttccagattttgcttttattacaatagtgttaaaggagtatgcctaactaagaacgacaaaatatgcgggaacataataatcacaatgataatgagtgctctgtagtcaaacttactggactgagagtaagaagaggagagttccagtctcagctcagtkcatggggcgtttctcatctggagtatgattctttgcttctactcagttcaagctcctcaccagtaaactttaggtttccttccaagtttgaaattctttgttttttatgattctctttcaagaggccttgatgacttggcattaggagagttgttatgagttgtgggttcccagcgaaagatggatttgtgtataagcagatcctgcagtcttttatctgtgggagtattgaccaggaagtctctggccgttcagcacaggtgtacggccacactgggtgcagtggagtggtctgcaggttcacagtctaactgttttccccttgaccttggtttagtcttgttctctaaatatcagtcataccttaaaatgaaagcctgtaaacccttacttaagtctatagagtcagaaagagagagactcttttgctgacattactgcagcaaaactgg

SEQ ID NO: 882317 - DNA, 689 bp, Homo sapiens
gatccaatacagtataatcaccatgatagggcagagaaaggctgctagagagacaggaaaaaaaaaggagaacatattgaatatatcagatacattagcattgggctataaaaaccacacaagttatctacataagaaatcccctgcttgctagctcaagtgcttagttacccagtggccacaaactctgacttcctgtctcaaacatacaaactgcctgcctgtgaatgccagcatttgtttattgaccagtatygtgtgtgtctagacacctttagttaggctcaaaccactaaaataaatgcagctaaattgcacttcactatgcctttatctaatggtaacacaacaacatatatgctttgggatcttagacaaactttgtaagactgagttactggtgatgtgaaaacaaaataaaacattaccttgagatgctgagatgaagtttctatacaagattgacagatagactctctgatacaaaatagtcaatcaataaattcaagctattattattaattaccattcaagctattacttagatgataagcttgctatactaaccaaaattggtggcagtaaaatctaataggtagatgaagttggttttttaataccaatcccccaacattttcttgatccacattaattcagatttcaattcatgctggaagcatttttgtttt

SEQ ID NO: 882318 - DNA, 689 bp, Homo sapiens
gatccaatacagtataatcaccatgatagggcagagaaaggctgctagagagacaggaaaaaaaaaggagaacatattgaatatatcagatacattagcattgggctataaaaaccacacaagttatctacataagaaatcccctgcttgctagctcaagtgcttagttacccagtggccacaaactctgacttcctgtctcaaacatacaaactgcctgcctgtgaatgccagcatttgtttattgaccagtattgtgtgtgtctagacacctttagttaggctcaaaccactaaaataaatgcagctaaattgcacttcactatgccttkatctaatggtaacacaacaacatatatgctttgggatcttagacaaactttgtaagactgagttactggtgatgtgaaaacaaaataaaacattaccttgagatgctgagatgaagtttctatacaagattgacagatagactctctgatacaaaatagtcaatcaataaattcaagctattattattaattaccattcaagctattacttagatgataagcttgctatactaaccaaaattggtggcagtaaaatctaataggtagatgaagttggttttttaataccaatcccccaacattttcttgatccacattaattcagatttcaattcatgctggaagcatttttgtttt

SEQ ID NO: 882319 - DNA, 628 bp, Homo sapiens
tttgaaataaaaatttataaagaagattttcaaagaagatatgtaattatctttaaaaggcagaaaattttttaaaaagtaaaatttgggaacgtaattatttattctttcagtaagtatttattgagcttttattgtatacaagacatggagtgaggcactggaattataaagtccaacaaaaaaagtcatgttaccttctgctgggtaaattagatcaagtaggattggcagacattaatcaagtcattatgaaaaaggagggataatctcaaattgggtacatctcatgtagagtattagatgggtgagcaagagtaaaacaaggtggtttgactatacaaggatttctgcaacggcttcctgaggagctggtgaatgcgaattcattatatggaggtgaatagtaatctagggccrgacttacatcaacacattgtccaaggagaaagaatgcaaataagaggaaaacaaaataaagccagtgccgagagtagagtcatccatgaatggagattgtagagcaaagagagtgtaaaatgaaaatctgtgaaggcagggccaggtcattcagggttttttttttttagcttatattttggttctcattctatcaacaataggactc

SEQ ID NO: 882320 - DNA, 614 bp, Homo sapiens
taaaatgaaattattaaaatcaggaaaagcttttttcaggaaagtactgttaattgactcagcaaagtacactggaaagataagatgattgaaagatgaatgaagagagctaagatcttcaactgtcataacgcagtatctgtaaatgaataatgctagagatggcagaagttacaactaagtttttctcatatgcctttttagcattatttgacttttaaaatatatattgatgaaaagataggctgacatgaaaatggtatatacatcatattctaaatgcaaaaaaattagtagtagcaattaaagctatatgactgctgatgagtcagatgaagagggcatcaggggagtggttgcacataagctgaaacaaaggtaggaattccagggtgctgttacttcaaagtaatgrtatgaacaaaaaaagctctataccaatccaccattatcatcatactgcttaatatcacatctagcatagtaagcggccaaaaactattctgtaaataaatatgcgagtaggatagtttttatactatgatcagtatctaacagacaaacatggctagaaaggaaggtccatggagaagactggtaagagctaaggctaa

SEQ ID NO: 882321 - DNA, 620 bp, Homo sapiens
aacctatatgtgaaatgtaaagcagttaagtttcttatagaaaacatttcaggacttggggaatagtcagagatttcttacataggataaagtaactattaaccttaaaagagattgaaaaattggactacattaaaattaaaaacattcatttgtcaatagattctattcagaaagtgaaatataagccagaggattgatgaaaaggtgtgtaatcataatctgacaaaggatttgcgtgcagaaaatatttttaaactcctaaaatcaattaaaaacaaagaaaataaaatagaaaaatggacaaagtaattaagcacatgcactttttaaaaaagggttatctaagccaggcatggtggctcacrcctgtaatcccagcactttgggaggccaaggtaagcggatcatctgaggtcaggagttcgagatcagcctggccaacatggtgaaaccctgtctctacaaaaaaatacaaaaaaattacccaggtgtggtggtgcacacctgtaatcccagctactcatgaggctaagatgggaggatcccttgaactcgggaggcagcggttgcagtaatccaagattatgtcactgcacttcagcctggacaatagatta

SEQ ID NO: 882322 - DNA, 620 bp, Homo sapiens
aacctatatgtgaaatgtaaagcagttaagtttcttatagaaaacatttcaggacttggggaatagtcagagatttcttacataggataaagtaactattaaccttaaaagagattgaaaaattggactacattaaaattaaaaacattcatttgtcaatagattctattcagaaagtgaaatataagccagaggattgatgaaaaggtgtgtaatcataatctgacaaaggatttgcgtgcagaaaatatttttaaactcctaaaatcaattaaaaacaaagaaaataaaatagaaaaatggacaaagtaattaagcacatgcactttttaaaaaagggttatctaagccaggcatggtggctcacacctgtaatcccagcactttgggaggccaaggtaagcggatcatctgaggtcaggagttcgagatcagcctggccaacatgrtgaaaccctgtctctacaaaaaaatacaaaaaaattacccaggtgtggtggtgcacacctgtaatcccagctactcatgaggctaagatgggaggatcccttgaactcgggaggcagcggttgcagtaatccaagattatgtcactgcacttcagcctggacaatagatta

SEQ ID NO: 882323 - DNA, 656 bp, Homo sapiens
aagctggcagaatgggctttgtgaatggcagcactgtggtcctgggtggaaggagttaatttgacctgtggcttgcatccctcattctgtataatccccaaattgtgctgtagatataccctgggaagctaactgtaaaaagctaggaaagaatgttcaggtgtgggtgatgaggctcagtgaggggctgtgagctgcgtccttggtacaaagagttcagtctaggcaaagattctgagagttggcctcgcaaacgtgcagcacagcagacagctgcatccccaagggtcacctgggccttaagagaagtagaagttagtaagaaaagcagaaaaaaaaattgggggagagggcggctaaagcagataatttttatgtggttgtagagaaaataagaaaatggtagcagcagcagaagaaaatgttagaaaacaagaaaacagctgtctgatggtggcaggtgtgctctgaaggaaaacaytctgcttagtagtttcagggagaaaaataaggaaaaattaggatactgtaaggaaaatgagaatggtttgaaacaaccagcaaacaacaaggaccattataaaagacattcaagaagtcctaaaataggtaattatgagtatagagcaaaagttgagaccataaaaatccagatg

SEQ ID NO: 882324 - DNA, 656 bp, Homo sapiens
ctaaatggtcacaaagagatttgattaataggtttaagttcacttttgtgtagagctttaaaaaataacaaagcttaatcaccttaattaacatatatctttcttatacttttataacaaataaagcatacttgctttttactgcctaaaatataaaaatacatctccatcatcgactaatggttttgttgatttctcttaaattctaccctaatcaaacacttaaaattgcatctggaatttaaattaatctcyaatcctttaatatttccccaaactaagaagcatgaagaaggtcctataatagttcaatggatgtctgtctttctatttataacttttaaatgtgccaacccgcgctgaaaaagatgtgcagaaaaattaaaatgtgtttattataaactcagattctgatctgaaacatgtgtcacttctctatttcttgttagttcattttctaggatttcttttgagatccattatagaattctaagtgttgtgtctactgggatttacaccacttgttcagtctatttataccaagttaattaagtgataatcccagagtatcagaggacatatgtagcaataaatgcctgcttcactctcaggcatactgagatcacatggtgaggagtcacagaatggaagactgt

SEQ ID NO: 882325 - DNA, 659 bp, Homo sapiens
caaaaggtaatgttagaaaatatctaacattgtttttcacagattatgaacaaacctgctgctaaatcatagacaaattgtgctcatcaggaattaaaagtgccatctgaaaaattaaaaaattttcgaactacatgaaaatcaatgaaaccaaccataaaaattattacttgtcgctttacctggaaacttgataaatcaacatttccaatgcgctcaaatacatcttgtaaattttccctgtcaggaaaaaaaattatctcctcaaaattatcaagaattttggagtttacttcatggaaaaattattttaaatcagtaagttttatatttaatataaaaatttatgtttcagattgaktaatgtgaacattacaaaacccaaaaatattagtattagatttaagaaagtaatccttaattagtttaagtgggtggattatcctatattaacaaagataaagaagtaaattttcatttgtaaagggaacacaggaaacaacaattctgtatatgaaagcacagagcccaaaacaattgacaagaaatataacaatgataattcaccatttattgaacagctagtccgtaccaggccttaatggttgccaaattattaccattatgtcatctagttttcaccacagaattggaacaca

SEQ ID NO: 882326 - DNA, 659 bp, Homo sapiens
caaaaggtaatgttagaaaatatctaacattgtttttcacagattatgaacaaacctgctgctaaatcatagacaaattgtgctcatcaggaattaaaagtgccatctgaaaaattaaaaaattttcgaactacatgaaaatcaatgaaaccaaccataaaaattattacttgtcgctttacctggaaacttgataaatcaacatttccaatgcgctcaaatacatcttgtaaattttccctgtcaggaaaaaaaattatctcctcaaaattatcaagaattttggagtttacttcatggaaaaattattttaaatcagtaagttttatatttaatataaaaatttatgtttcagattgattaatgtgaacattacaaaacccaaaaatattagtattagatttaagaaagtaatccttaattagtttaagtgggtggattatcctataktaacaaagataaagaagtaaattttcatttgtaaagggaacacaggaaacaacaattctgtatatgaaagcacagagcccaaaacaattgacaagaaatataacaatgataattcaccatttattgaacagctagtccgtaccaggccttaatggttgccaaattattaccattatgtcatctagttttcaccacagaattggaacaca

SEQ ID NO: 882327 - DNA, 608 bp, Homo sapiens
ttctgagcttgaaatcttccccttgctcctcacctaactcagagtaaatgccaaagccttcatcagccacttctgtcgcacatctcctactacctgtccctcactcattttgcaaaaccttgctgccttgaattccattccctcaaatatcccatattttttcttgaccttattagagagtctttacaaaaacatcactgtctctgcaaaccttcccggacaactctacataaaattgtaacacakcccatcagtataccatgccctgcccttccttgttttacgaataatatttttcaaatataatttagtggtctcatttattttctctgaccacttactgtccttactgagaacagagattcttgttattgctatttgttgttgtttactattgaatttacagcacaaagatccacttagcacttagaagtcatttagtaaacagctgttgaatagataaattataaatctttcagtctgttaaaatactatcaggctgaatactagataaaaggagtggtagcagggaaaaggagggataaaaaaagaagttttgtgccccagtgaagagcccccaagccacgtggtagttgcaagcattgaaa

SEQ ID NO: 882328 - DNA, 604 bp, Homo sapiens
gagctacctcctccaaactccaaggctggagtagtcctgcatagacactagtctagatgctaggaacattcttatttgagccaatttactacattaataatctcagagctccatgacatgtaacacaaccatatgaaagagtagagtagacttagtcataaacaaggtactcatttttctttctcatattacaagctaacatagattggtcaaaatacatttctgaacttaaggctgaaaaactataaagttttctttttatccaaaggtccctggaaattctgctaagagcctgtacacaaggtatagggcctattcttatacgcaagtactyataagcaaggatttgggggatgatattttagaagaatgtttaaaatgagtattaggtggtcaagtacatacttagttttttataatatttgtttctactgttaacaaattttacagaaatattgccaaagtacctatgcactaacaatatcacatggcaaacaaagaaagctttaacttcttcctacttcaaaaattagttctaaagccactctttttctaattgaggatctaccttcaattagtcaaaatgccagtgattgtcttctca

SEQ ID NO: 882329 - DNA, 623 bp, Homo sapiens
taatcatctttgcaaaatggggcttttttttttcctggaatggctagaataaaattttatttcatttattttatttttattttattaaaataattttctgggtatacaataggtatatatacttatgggggtacatgagatgttttgatgcaggcatgcaatgtgaaataagcacatcatggagaatggggaatccatcccctcaagtatttatcctttgtgttacaaacaatccaatcacactctttcagttatcttaaaatgtacaattcagtcattattgactatagtcactctgttgtgctatcaaatagtaggtcttattcattctttctatttttttctactcattaaccatgccctcctccccctagaatgaaattttaagttcaccattgaggwtacttagaatttaaaataattctaatgtgttctgaataagccatgaccaaatctgcatatacatggctttgaaaagaattaatttttaaggtatttttttctcctctttctagattgtgaggtaaattttaaaaaaattctgtacagaaatggaatttaacttggttattggtaattaggccaatagagaccatgtttcctttggaagcctaaattatcta

SEQ ID NO: 882330 - DNA, 623 bp, Homo sapiens
taatcatctttgcaaaatggggcttttttttttcctggaatggctagaataaaattttatttcatttattttatttttattttattaaaataattttctgggtatacaataggtatatatacttatgggggtacatgagatgttttgatgcaggcatgcaatgtgaaataagcacatcatggagaatggggaatccatcccctcaagtatttatcctttgtgttacaaacaatccaatcacactctttcagttatcttaaaatgtacaattcagtcattattgactatagtcactctgttgtgctatcaaatagtaggtcttattcattctttctatttttttctactcattaaccatgccctcctccccctagaatgaaattttaagttcaccattgaggatacttagaatttaaaataattctaatgtgttctgaataagccatgaccaaatctgcatatacatggctttgaaaakaattaatttttaaggtatttttttctcctctttctagattgtgaggtaaattttaaaaaaattctgtacagaaatggaatttaacttggttattggtaattaggccaatagagaccatgtttcctttggaagcctaaattatcta

SEQ ID NO: 882331 - DNA, 609 bp, Homo sapiens
gtgatgtttgtagagaaaagtttgtggcagtaatcgatacaggaatcacttatatggatctgtgttacttggagggggctttagaaatggcatcaagaagaaaaaaagcaatgcttcttgtgtttaaaaaataatgcttttatcattgaaaaatagtaccttttaagatggccaaatccccaaaataaaaattcaaagcatattgtacttccttctgaggccaaatgcatcagractaatgctcttttgacaaaccatgctatttaagaaaaaatttagggagtggagagtccgattattgtttttcatgagtgttgaagtctatggaaacaatgaaggaatgtacagaaagtaaattagataaagatttgatttataaaaattgtccaggtttagaaatttttatatatccaaacagaagtcatgaatcaggtttccccaggctgtgaactagactaaggtggcatgtaccctcacattccaaagctgagtgccctctctgtccgtgtcacccagttaccctccttgggtgacataagagaagcccaacaattcctgggggtgtctcagagtccagcaggaaagatttatttgcagagttgagatgtc

SEQ ID NO: 882332 - DNA, 609 bp, Homo sapiens
gtgatgtttgtagagaaaagtttgtggcagtaatcgatacaggaatcacttatatggatctgtgttacttggagggggctttagaaatggcatcaagaagaaaaaaagcaatgcttcttgtgtttaaaaaataatgcttttatcattgaaaaatagtaccttttaagatggccaaatccccaaaataaaaattcaaagcatattgtacttccttctgaggccaaatgcatcaggactaatgctcttttgacaaaccatgctatttaagmaaaaatttagggagtggagagtccgattattgtttttcatgagtgttgaagtctatggaaacaatgaaggaatgtacagaaagtaaattagataaagatttgatttataaaaattgtccaggtttagaaatttttatatatccaaacagaagtcatgaatcaggtttccccaggctgtgaactagactaaggtggcatgtaccctcacattccaaagctgagtgccctctctgtccgtgtcacccagttaccctccttgggtgacataagagaagcccaacaattcctgggggtgtctcagagtccagcaggaaagatttatttgcagagttgagatgtc

SEQ ID NO: 882333 - DNA, 609 bp, Homo sapiens
gtgatgtttgtagagaaaagtttgtggcagtaatcgatacaggaatcacttatatggatctgtgttacttggagggggctttagaaatggcatcaagaagaaaaaaagcaatgcttcttgtgtttaaaaaataatgcttttatcattgaaaaatagtaccttttaagatggccaaatccccaaaataaaaattcaaagcatattgtacttccttctgaggccaaatgcatcaggactaatgctcttttgacaaaccatgctatttaagaaaaaatttagggagtggagagtccgattattgtttttcatgagtgttgaagtctatggaaacaatgaaggaatgtacagaaagtaaattagataaagatttgatttataaaaattgtccaggtttagaaatttttatatatccaaacagaagtcatgaatyaggtttccccaggctgtgaactagactaaggtggcatgtaccctcacattccaaagctgagtgccctctctgtccgtgtcacccagttaccctccttgggtgacataagagaagcccaacaattcctgggggtgtctcagagtccagcaggaaagatttatttgcagagttgagatgtc

SEQ ID NO: 882334 - DNA, 552 bp, Homo sapiens
gcctgggtatcaccagtggaggctgtggaacagaaagattgctggctgttctttcctctggaagcttcatcccacagaggcacccgccagatgtcagccagagctctcctgtatgaggtgtctgtaggcccctatcaggaggtgtctcctagtcgggatacataggagtcagggacccacttgaggaggcagtctgtcccttacagagctcaaatgctgtgctgggagatctgctactctcttcggagctgccaggcaggaacattgaattctgctgaatctgtgccccaaccacccctttccccaggtgctctgtcccagggaggtgggggttttatctataagcccctgactgggctgctgcctttttttcagagatgccctgctcraagaggagggactctgaagaggcagtctggctgcactggccttactgagctgcagtgggctctgcctagtttgaacttcctggcgtctttgtttacactgtgagggtaaaactgcctactctagcctcagcaatggtggatacccctccctctaccaaggttg

SEQ ID NO: 882335 - DNA, 622 bp, Homo sapiens
gtaattgtgtgcaaaatatgtagagaactcttataactcaataatgaggaaaaaactcaaaaagtgggcatttggacaaacaccacagaagatttttaaatgacaaaaaaaagacatgaagagttgctctgtcattagtcattggggaaatgatactgtgtacaactagaatggctgaaattaaaagactgacaataccaagagctggtgaggatgtgaagaaactgtagaactcttacactgtacattgttttggggaatgcaaaatggtatgtccactttttaaaatagtttggtggtttcttataaagttaaatatacacttgccatctaatctaatcattctattaataggaatttactcaagagaatgaaaatcagtgtttataaaaaaagattgtatgtgaatgttcattgcagcttcattygcaatagccaaaaactaaaagcaaaccaaatgttcatcaactggcgaagggacagacaaatcatgttacctccctacttagcaataaaaagaaggaagtacgtagcaacacagatgaatttcaaagcattgtgctaagtgaaaaaagacagacataaaagaatatatcatctgtgattctatttatatgaagtt

SEQ ID NO: 882336 - DNA, 619 bp, Homo sapiens
cacctagaattaaccatgacaggaggtgacggcccctgccttgcttgcaggtcacccccacggagcagggcatgagggtcctgactcagctggtggccacctacccccagggctttaaggtctggatgggccccatcttccccgtcatccgtttttgccaccccaacatcatccggtctgtcatcaacgcctcaggtaccacctggaatacttggtggtgggtgctrtggtgcatttgaggcctgcaagtccctctatccccaagccgtgtgtggcccctgcagtactctggtctctcctttccttctctctcagccatcttcatctttctttcatgtattcactaattcccatctcagcatctcctctctccattgccatctgaccccctgtcctggtgttctgggctgccctggggccccaagagacctcaacccaaggccctgtcctggaggaacccccaagcttaaggaggtggatgtggacagagacatccccaacttcatggggtcaagaaagggccagagggagatggatgacagcccagagaagagcaagttctctgctggggcaggctggaagccttcctggaggaagagttactggagccatgtctgga

SEQ ID NO: 882337 - DNA, 619 bp, Homo sapiens
cacctagaattaaccatgacaggaggtgacggcccctgccttgcttgcaggtcacccccacggagcagggcatgagggtcctgactcagctggtggccacctacccccagggctttaaggtctggatgggccccatcttccccgtcatccgtttttgccaccccaacatcatccggtctgtcatcaacgcctcaggtaccacctggaatacttggtggtgggtgctatggtgcatttgaggcctgcaagtccctctatccccaagccgtgtgtggcccctgcagtactctggtctctcctttccttctytctcagccatcttcatctttctttcatgtattcactaattcccatctcagcatctcctctctccattgccatctgaccccctgtcctggtgttctgggctgccctggggccccaagagacctcaacccaaggccctgtcctggaggaacccccaagcttaaggaggtggatgtggacagagacatccccaacttcatggggtcaagaaagggccagagggagatggatgacagcccagagaagagcaagttctctgctggggcaggctggaagccttcctggaggaagagttactggagccatgtctgga

SEQ ID NO: 882338 - DNA, 619 bp, Homo sapiens
cacctagaattaaccatgacaggaggtgacggcccctgccttgcttgcaggtcacccccacggagcagggcatgagggtcctgactcagctggtggccacctacccccagggctttaaggtctggatgggccccatcttccccgtcatccgtttttgccaccccaacatcatccggtctgtcatcaacgcctcaggtaccacctggaatacttggtggtgggtgctatggtgcatttgaggcctgcaagtccctctatccccaagccgtgtgtggcccctgcagtactctggtctctcctttccttctctctcagccatcttcatctttctttcatgtattcactaattcccatctcagcatctcctctctccattgccatctgaccccctgtcctggtgttctgggctgccctggggccccaagagacctcaacccaaggccctrtcctggaggaacccccaagcttaaggaggtggatgtggacagagacatccccaacttcatggggtcaagaaagggccagagggagatggatgacagcccagagaagagcaagttctctgctggggcaggctggaagccttcctggaggaagagttactggagccatgtctgga

SEQ ID NO: 882339 - DNA, 564 bp, Homo sapiens
cgcccacaggcctgggagtccccgggtcgcgctccggcgaacgcagtccctgaatgggcgcggcggacttgggaggcggactactcagtccccccgggaaggagggagctggggtccagatctttgctctgaaggagcctagggcaccgggctccaagaggagggagaaaccggggggcctggatttcttttcttttctttttcttttttttcttttcttttttttttttttttttttttgktgttgtttttgagaaggagtctctgtcgcccaggctggagtgcaatggtgcgatctctgcaaactccgcctcctgaattaaagcgattctcctgcctcagcctcccgagtagctgacactacaggtgctggacaccatgcctggctaatttttgtatttttaggagagatggggtttcaccgtgttggccaggctggtctcgaactcctggcctcaggtgacccgcctgccttggcctcccaaagtgctgggattacaggcttgagccatggtgcctggctggggcctggatttctgggtctgtgtctaagggggtgctgga

SEQ ID NO: 882340 - DNA, 564 bp, Homo sapiens
cgcccacaggcctgggagtccccgggtcgcgctccggcgaacgcagtccctgaatgggcgcggcggacttgggaggcggactactcagtccccccgggaaggagggagctggggtccagatctttgctctgaaggagcctagggcaccgggctccaagaggagggagaaaccggggggcctggatttcttttcttttctttttcttttttttcttttcttttttttttttttttttttttgttgktgtttttgagaaggagtctctgtcgcccaggctggagtgcaatggtgcgatctctgcaaactccgcctcctgaattaaagcgattctcctgcctcagcctcccgagtagctgacactacaggtgctggacaccatgcctggctaatttttgtatttttaggagagatggggtttcaccgtgttggccaggctggtctcgaactcctggcctcaggtgacccgcctgccttggcctcccaaagtgctgggattacaggcttgagccatggtgcctggctggggcctggatttctgggtctgtgtctaagggggtgctgga

SEQ ID NO: 882341 - DNA, 645 bp, Homo sapiens
gtagctgagttttggccaatcccagcagccatacttcaaccactcatagtctgctaagtgttcaaactgtgttcaaataaggcaaatgtcaacctggtgcaccaatccagctgtttctatacctcacttctgatttctgtacttcatttccccttttcttttgtctgtaaatcttcttccaccatgtggctgtgctggagtctctctgaatcttgctktgattctgggggctgcctgatttgcgaatgatactttgctcaattaaacttctttaaatttaatttggctgaagcttttcttttaacaaatggtgtcagaagtgggatctgaagtagaccttctaacaacctccaaaattgctgagtcaacaagcaagttacctgatgaacgtatttgtgtcctttgatgtctcagaatggctggggattgtgtggtaagttctctctcagatttcggagctccacagatttatgttttgagctctccaggtttctttgagcaaatttctgatccaaactgggtttgaaagtcatgacagaaactggacgggttgaggatcaaatttgatctggtaattaactagcttggatccagttagaagcctcttacctctgactgggtcagaaagaaactggtagtaagagg

SEQ ID NO: 882342 - DNA, 625 bp, Homo sapiens
ttgccattttcaacgcatgttttctgtttgtataaaagctttcccatgcaagagggctgatgttataacagtagattattacgctacagtgtattttcacctggtaaagaaaggtttttatgattccctgaggacaatcagcccctacacaatctagaacccaaagattggatcttctgagaacatcagagaaagactgtccttgacatccacactatagcaaaactttggaactttgaactttgggttcgtaatctcacaactgagaagggtccctccacactcttggaactgtacatccattggaacccttaaggtaaagctaaccagggaaatttctccccagaagaagatgccatccttgatataaacagcttttcccaagatcacagatcaaracttctactattatgagactcttatctttgaatactttttccttgtttatgcctctgtgaacaatagaaatggaaagggggtctgttgtgtgcacttatatggtatacttttattcataaatgattttgcagccagccttacacatgaataaccttatacctttacagataaaaaaatgaaagcccattgtaggtgagaaactttaaaggtagaaatattgccatgt

SEQ ID NO: 882343 - DNA, 591 bp, Homo sapiens
ctatattttccataaagctctgctggtgattgttttgctcagccagggttgatctgtgaatttcagattttggaccccaggtgtattactccattctcacgctgcaataaagaaatacccaagactgggtaatttataaagaaaagaggtttaattgacttacagttctgcatggctgggaaggtctcaggatacttacaatcatgatggaaggcaaaggggaagaaaggcaccttcttcacagggcagcaggaaggagaagtgccagcaggrgaagtgccagacacgtataaaaccatcagatctcgcaagaactcattcactatcatgagaacagcatgggggatgccatctccatgattcaattacctcccaccgggtccctcccacaacatgtggggattattacaattcaaggtgagatgtggatggggacacacagccaaaccatattaccaggtcttgaggctttaaccactattctctacttccttttaggtagaattttagtaacagagaagggcttcaggaagtgaactgtacagtgctattgcttgcttacacagtagactttcagcaaatgctgacatt

SEQ ID NO: 882344 - DNA, 635 bp, Homo sapiens
ataaagaaaatatagtatatagacacaatggaatactattcagccatacaaagaatgaaatcatgtcttttgcagcaacatagatagaactggaagccattatcttaagtgaaacaactcagaaacagaaaatactgtatgttcttacttataagtgggaactaaataacgtttacacatggacacagagagtgcataatagacactggagagtctgaagggtgggagagtgggaggggggtaagagatgagaaattacttaataggtacaatgtacattattcaggtgatggctatactaaaagcctagactttatattcatgtataagaaatgcactygtagctcctaaatttatacaagttaaaaaaaataaaactatcccttggttgattcttgagctgtgcaggcataagacaagactctaagaaagtaagtagaaaacagcagccagatggctgagagaaaagattttagcagttaccctcaactagggcaatagaattttaaatgcaagtgctgccaagtgaaagaggttcggtaaaaacttaggctttctaatgaaaacccagaaggaccacgccctagaaataagaacaatactctgggactaaagggtataccctacaaataggt

SEQ ID NO: 882345 - DNA, 635 bp, Homo sapiens
ataaagaaaatatagtatatagacacaatggaatactattcagccatacaaagaatgaaatcatgtcttttgcagcaacatagatagaactggaagccattatcttaagtgaaacaactcagaaacagaaaatactgtatgttcttacttataagtgggaactaaataacgtttacacatggacacagagagtgcataatagacactggagagtctgaagggtgggagagtgggaggggggtaagagatgagaaattacttaataggtacaatgtacattattcaggtgatggctatactaaaagcctagactttatattcatgtataagaaatgcacttgtagctcctaaatttatacaagttaaaaaaaataaaactatcccttggttgattcttgrgctgtgcaggcataagacaagactctaagaaagtaagtagaaaacagcagccagatggctgagagaaaagattttagcagttaccctcaactagggcaatagaattttaaatgcaagtgctgccaagtgaaagaggttcggtaaaaacttaggctttctaatgaaaacccagaaggaccacgccctagaaataagaacaatactctgggactaaagggtataccctacaaataggt

SEQ ID NO: 882346 - DNA, 668 bp, Homo sapiens
aagattttaaattccaagtcatttttcattcatctaactctgttaattatccttatttttgatttctttaaaatggagggaaaagaccatgataactttaaaacaatctgaagacagaatacttctaacacccagaaagtttttgtgtgtgcctttccagtcaacccaccttctggaggcaacagatgttcatatttctagtattacagagactttaacygttttaaaacttcgaatcaatgggattattcagtaggaactctcttctgcctggtttctttcactcgtcatgttctggaggttaatccgtgttcattaccgtaattgttgagaagtttcctattatatgaataaagcacaatttatttattcatttggctgtgcacaccattggctgattacagaatcttttagggattaaagctttggtagcattcttttttttttaattagattcaggggttacatgagcaagtttgttacatgggttcactgcgtgatgttgaggtttgggcttctaatgatcttgtagtgaacgtagtaacctatagatagttttgcaacactttaccctccccccatctcctcccttttggaatccccagtgcttattgttctcatctttgtgtccttgtgtactcaatgtttaactcccacttataagtgag

SEQ ID NO: 882347 - DNA, 668 bp, Homo sapiens
aagattttaaattccaagtcatttttcattcatctaactctgttaattatccttatttttgatttctttaaaatggagggaaaagaccatgataactttaaaacaatctgaagacagaatacttctaacacccagaaagtttttgtgtgtgcctttccagtcaacccaccttctggaggcaacagatgttcatatttctagtattacagagactttaaccgttttaaaacttcgaatcaaygggattattcagtaggaactctcttctgcctggtttctttcactcgtcatgttctggaggttaatccgtgttcattaccgtaattgttgagaagtttcctattatatgaataaagcacaatttatttattcatttggctgtgcacaccattggctgattacagaatcttttagggattaaagctttggtagcattcttttttttttaattagattcaggggttacatgagcaagtttgttacatgggttcactgcgtgatgttgaggtttgggcttctaatgatcttgtagtgaacgtagtaacctatagatagttttgcaacactttaccctccccccatctcctcccttttggaatccccagtgcttattgttctcatctttgtgtccttgtgtactcaatgtttaactcccacttataagtgag

SEQ ID NO: 882348 - DNA, 668 bp, Homo sapiens
aagattttaaattccaagtcatttttcattcatctaactctgttaattatccttatttttgatttctttaaaatggagggaaaagaccatgataactttaaaacaatctgaagacagaatacttctaacacccagaaagtttttgtgtgtgcctttccagtcaacccaccttctggaggcaacagatgttcatatttctagtattacagagactttaaccgttttaaaacttcgaatcaatgggattattcagtaggaactctcttctgcctggtttctttcactcgtcatgttctggaggttaatccgtgttmattaccgtaattgttgagaagtttcctattatatgaataaagcacaatttatttattcatttggctgtgcacaccattggctgattacagaatcttttagggattaaagctttggtagcattcttttttttttaattagattcaggggttacatgagcaagtttgttacatgggttcactgcgtgatgttgaggtttgggcttctaatgatcttgtagtgaacgtagtaacctatagatagttttgcaacactttaccctccccccatctcctcccttttggaatccccagtgcttattgttctcatctttgtgtccttgtgtactcaatgtttaactcccacttataagtgag

SEQ ID NO: 882349 - DNA, 630 bp, Homo sapiens
cctcctctttccttttttccttcctctcagtctcaccctagcaactttgacctctttttgtgttctctctgcttcattatgtggggcagctcagttctttctcacccttgctcccagactcaaaacccagcctttctgtgctcagtgaactctggtcaaatagttagatccattcagggtctcagcctttcctcactaaagtgacctcactttatcagatgtgatctgaagcacttagtcaactctaaaggctagtaacacatgatgaaatatctaaatgaagaaaaaaacacttaaaacattttagaaagtataaaagtaacttctcaagtccaataattatgagctgaagtcaaagttataattcaaattactgtaagagtaaawgcccctcaggaaacaaattcaaataaatagccttggtagacgtgttgtagatcagatttttaaaagatctggtttaaagatatttacgttcaaaggactggttcataattaccctgcttttgaccatctgtgtagtggctattaggcttctcaaaagattaatagtcatttgagttggtaacactaatttcccagaaggagtctttatttcattaaagtatattataaaattgctcaagcatt

SEQ ID NO: 882350 - DNA, 630 bp, Homo sapiens
cctcctctttccttttttccttcctctcagtctcaccctagcaactttgacctctttttgtgttctctctgcttcattatgtggggcagctcagttctttctcacccttgctcccagactcaaaacccagcctttctgtgctcagtgaactctggtcaaatagttagatccattcagggtctcagcctttcctcactaaagtgacctcactttatcagatgtgatctgaagcacttagtcaactctaaaggctagtaacacatgatgaaatatctaaatgaagaaaaaaacacttaaaacattttagaaagtataaaagtaacttctcaagtccaataattatgagctgaagtcaaagttataattcaaattactgtaagagtaaatgcccctcaggaaacaaattcaaataaatagccttggtagacgtgttgtagatcaratttttaaaagatctggtttaaagatatttacgttcaaaggactggttcataattaccctgcttttgaccatctgtgtagtggctattaggcttctcaaaagattaatagtcatttgagttggtaacactaatttcccagaaggagtctttatttcattaaagtatattataaaattgctcaagcatt

SEQ ID NO: 882351 - DNA, 615 bp, Homo sapiens
agtttgttattgttgttcatatatattagtcacatacattgaaaacttcaccaggcctggcacagtggctcatgtttgtaatcccaacactttgggaggcagagatgggaggattgcttgaactcaggggtttcagaccatcctgaaacaaagtgagacccccatctctatgaaatataaaaaaaatagctgggtatgatggcactcatctgtagcctcaactactyggcaggttgaagcattatgatagcttgagcccaggagttcgaggctgcagttagctaccatcatgccactgtattccagcttaagcaatagagcgagatccttgtctcaatttttttttttaaaaatcacaatatatagaaaacttcaccatataatgttataatttttgctttcaacaattatatgcactttataaaatttaaggggaagaataagaactattttatacttaacagctatttatcatttctggtatccttcctttgttcctgaagatctggattttctctgataccaggggatataactgaaattcccttcaaacttaaaaactccctttagcatttcttctagagcagatttgctgggaaacatatttttcatttg

SEQ ID NO: 882352 - DNA, 617 bp, Homo sapiens
ttagaggcaagttccactgaagatatgagtcaatcattgtatttaaggacatgccatattgatatcattcattttggtatcagaaaataaaagcaccttaatagaaatttacatgtggtttcatttttggagcctgcagcctgatgttttctgagaatttctccttgttttttctgcactttgcagaatacaagccacatagcaatargaaaaggtttcttaaaacatgccagatttctccttgcaaaccagcccaatctatgggtcaaactttcctattgttggagtatttaataactcatggaacttgttcccttcctcctttatcattgtactttaattctttaccttttattaaagccatccttaccaaagaaagattccacatttcgactgttggtactgtcaagtctctgggaatagaaagtcatggggaagaccagtcttggagaagcagagcctgagataatatgcacgtgaaatattgagtagtcctctctctcttactcttatctttggcttacatattcctttaagaaagagtctttctccataacaaacaaatcatgatgaccgatttgactgcaagggaatgtattacttttgtttgtccagga

SEQ ID NO: 882353 - DNA, 658 bp, Homo sapiens
aagtgtcccatgccaatataaaacacattataataagcatgtatacatcttattaaatcagaatgaatatccatatattcatattcatataacttgatataaaatagcagttggatacatagtattaatttaaaaattctagttttaaaatttataattttagatttttaatttaaattttaaatttcaaatttttaaaatacctcattttatttctgatgtctggaatcttatttagttgaaaatgtctctttgaattctctgagtaccatgagcttgtatagcttatgctgctgcctctaatgtagctgctattgttttcaatatggaatgaacaaggtgattggatttcttgaaccacttactataatagaacctctagatatttctaccaaataaagagtagagaacaaattaaaatacgccaaatgtatttttacagctactttcacatctattagatggagtctttcatagacattttatgaaagagtttcataatcctcacacttgttacaacrtacagtctaaacaggcaagatctattcactctaacataatatctaagggatggtgtgaaggatattgcaagcatatacacacacacgcacacacactcacatctcaccacaagttagagtttacagatagcggttta

SEQ ID NO: 882354 - DNA, 616 bp, Homo sapiens
atgttgagaagtcaaagaatgatgtccttctaagaataaatattctaacacatgatgatgtgctgaacaagatgaagaatttgtatttggatacatatttttaaagcaatgtttagttagtaattgaaaatactaaaccaggagaaaataatgtgcactctggtttccatactagagagatatagaagcagaaagttttacctcagtccacagwtctagtaaataaacatccaacacttaaacttgggtcatttgactccaattgatgaattttcagcaaacaatgaaatataaaagtaagccaattcaatatacaactccagaagttataaaattaacagtaaaataaaatggttgagagtagattgaaggaattaaaaataaaagcaagaaattaatggctcaaaggaaaataacaaaatcaatgataaaaccacaacatgatattttgaaaataattacaatactaacatgatccagaaaaaaaaagtgagaagggacaaatgcatgcacaaaaaaaaacaacataattaagttgaatttattttgggaatgtaaagatgatttaatacttgaaaatctattaatataatgcttgaaattaacaaactttaag

SEQ ID NO: 882355 - DNA, 616 bp, Homo sapiens
atgttgagaagtcaaagaatgatgtccttctaagaataaatattctaacacatgatgatgtgctgaacaagatgaagaatttgtatttggatacatatttttaaagcaatgtttagttagtaattgaaaatactaaaccaggagaaaataatgtgcactctggtttccatactagagagatatagaagcagaaagttttacctcagtccacagttctagtaaataaacatccaacacttaaacttgggtcatttgactccaattgatgaattttcagcaaacaatgaaatataaaagtaagccaattcaatatacaactccagaagttataaaattaacagtaaaataaaatggttgagagtagattgaaggaattaaaaataaaagcaagaaattaatgrctcaaaggaaaataacaaaatcaatgataaaaccacaacatgatattttgaaaataattacaatactaacatgatccagaaaaaaaaagtgagaagggacaaatgcatgcacaaaaaaaaacaacataattaagttgaatttattttgggaatgtaaagatgatttaatacttgaaaatctattaatataatgcttgaaattaacaaactttaag

SEQ ID NO: 882356 - DNA, 578 bp, Homo sapiens
atgcatgcacaaaaaaaaacaacataattaagttgaatttattttgggaatgtaaagatgatttaatacttgaaaatctattaatataatgcttgaaattaacaaactttaagaaggccaaagatgttctaatgcctggtttggtggattgtttcatttggatctaggatgattcactgtacctgtgcatttgtgcaagctcatttaatttggttggctcttaaaaatattcggattctttctcttaatttgaccccaattatagatatagtgttattgttcttaaatttcttgttgcatttagattatttctatgaagaaaggggaaaatgataaatttattcaatcatatttatgacaaagttttggcttccatattattgtttttrtatttttcttttattgtgaagtgtaccaagttttattttagaaattgctggaccagtaaatattgttcaagttgatgggttgtatagacttcagatttttggaatgttcttgaaaattattcccatttatgtccttaaaccttgcataatcttgtgaaataatgcttcataacaatgactgactgtgca

SEQ ID NO: 882357 - DNA, 623 bp, Homo sapiens
tcaaagggaatgcttccagcttttgcttgctcactataatattggctgtggatttgtcatagacggctcttattattttgagttatgtttcctcaatgcctactttgttgaggagttttaacctgaaaggattttgaatttcatcaaatgttttttatgtctattgaggtgataatgtagtttttttttttttagttcagttcatgtaatgaatcacatttattgatttgtatatttaaacaaccttgcatttcagaaataaagactacttgattgtgctggattagctgcaggatttggtttggyagtattttgtttaggatttttgcatgtgtattcatcagggatattggcctaaagttttcttcttttgttgtgtctcttctaggctttggtatcagaataatgctggcctcatagaatgaggtaaggaggagctcctattcctcaatattttggaatagtttcaaaaagtaccagctcttctttatatgtctggtagattttggctatgaatctttctagtctggggcttttttcttgttgtaggtttttattactaactcaatttcagaactccttattggtcagttcagaatattgatttcttcctgagtcaatct

SEQ ID NO: 882358 - DNA, 623 bp, Homo sapiens
tcaaagggaatgcttccagcttttgcttgctcactataatattggctgtggatttgtcatagacggctcttattattttgagttatgtttcctcaatgcctactttgttgaggagttttaacctgaaaggattttgaatttcatcaaatgttttttatgtctattgaggtgataatgtagtttttttttttttagttcagttcatgtaatgaatcacatttattgatttgtatatttaaacaaccttgcatttcagaaataaagactacttgattgtgctggattagctgcaggatttggtttggcagtattttgwttaggatttttgcatgtgtattcatcagggatattggcctaaagttttcttcttttgttgtgtctcttctaggctttggtatcagaataatgctggcctcatagaatgaggtaaggaggagctcctattcctcaatattttggaatagtttcaaaaagtaccagctcttctttatatgtctggtagattttggctatgaatctttctagtctggggcttttttcttgttgtaggtttttattactaactcaatttcagaactccttattggtcagttcagaatattgatttcttcctgagtcaatct

SEQ ID NO: 882359 - DNA, 655 bp, Homo sapiens
ttgcagatgacatgattgtatatttagaaaaccccatagtctcagtcccaaaactccttgagctgataagcaacttcagcaaagtctcaggatacaaaatcaatgtgcaaaaatcacaagcattcctgtatactaacaatagacaagcagagagccaaagcatgagtgaactcccattcacaattgctacaaagggaataaaatatctaggaatacaacttacaagggatgtgaaggatctcttcaaggagaactacaaaccactgctcaaggaaataagagagggcacacacacacaaaaagaaaaaaactccatgttcatggataggaagaatcaatatcattaaaatggccatagtgyccaaagtaatttatagattcaatgctattccatgaagttaccagtgactttctttactgaattagaaaaaactactttaaatttcatacagaaccaaaaaagagcccgtatagtcaagacaatcctaagcaaaatgaatgaagctggaggcatcatgctacttgacttcaaactatgctacaagtctacagtaaccaaaacagcacggtactggtaccaaaacagatatatagaccaatagaacagaacagagacctcagaaagaacaccacacatctacaaccatctggtttt

SEQ ID NO: 882360 - DNA, 613 bp, Homo sapiens
tgtatggattttcaagtctcaattttgttcagttcttttctgattttgtttatttattttcttctgctagcttttggctttgtttgttcttctttttctagtccttctaattgtgatgctagaatgttcacttgagatctttctaatttcttgatataagtatttagcagtataaactttcctattaacacctttagctgcaaaccaaagactctggaattttgtctttctgttttcattaatttttgctctactttgttgtttacccaaaagtcattgaggagcaagttgtttaatttccgtgtaactgtgtggttttgagagatctccttggtaatgatttccatttttattacactgtggtccaagattatgcttggtatgatttyggtatttttgaatttattgcaatttgctttatggcttcaatttctcaataattttgagattaatatcatgtactatacagaaggtaacatcatcacagattcaggaggaaagaaacgctttctgttgaagttttgatatcatgtctgaaatgagaaggaaacagcttgctcccttggatccgtggttccgcctgttgcctctagagggcgatgttgcatcaagt

SEQ ID NO: 882361 - DNA, 636 bp, Homo sapiens
tgaggaaaaagataaaatacatgaaaatggaatcaataggtaaaattccaagtacgtggacaaataagttttaaaggtattctcaggaggagattactgtgggacagaaaagataggagaaagtatcatggggaatagcaaatttagttaggtcttgaaggagagacacacattgaatttgttcattacacaattatttaattaaacaaataatgaggccaggtgccgtggctcatgcttgtaatcccagcactttgggaggccaaggtgggcgaatcacttgaagtcaggcattcgagaccagcctggccaacatgaagaaaccctgtctctactaaaaatacaaaaattagccaggcatggtggcatgcacctgtaatcccagctactagggaggctgaggcaggagaatatcttgaacccaggaggcggaggttgcagtgagctgtgattgcacatctgcactccagcctgggcgrtggaatgagagtctgtctcaaacaaaacaaaacgaaataaaaaacaaataataagtgacaggtgtttttgtaggtagaaggagtagggtaataaacaaaatagataaatgcagacacaaaagaccttccattacgaggcttgagtctatgtttgtct

SEQ ID NO: 882362 - DNA, 623 bp, Homo sapiens
tttttcccaatataaattaaaatagcatcatatatgtaacaattgaaaaggctgtctgtatactgcctaataggacctcttgtatcaatcacactttaagaaatactgatccagcccatacccctcatttcataaatgaaagaattgagatccacaagtatggtatcatttactcaagcacgacttacagtaaaatgaaagctataaaaagagtctaggctttatgatcccttgtcagttgcttcttccaccaaygatgcaaagcaggatctaaagtttgaagaaaagagttgggtgttttacatttaaattaaattaaaagttttatttaattgtgtatgttcaacctaggtacattagaagatacgactacctatcaaagtagagcattctcataacttcatcgcctagaaataacaagtatttatttttcaaattttcttgtatacatatacaactacatttctctatgaatggggctgataatgtccccagtatttattaatgtgcttgcttctctcaacattatagatatttccatgccagggatcttatattgaggatataattttaaatgactgtctagttttcattatatattttttaaaaagtgaatcaccttt

SEQ ID NO: 882363 - DNA, 623 bp, Homo sapiens
tttttcccaatataaattaaaatagcatcatatatgtaacaattgaaaaggctgtctgtatactgcctaataggacctcttgtatcaatcacactttaagaaatactgatccagcccatacccctcatttcataaatgaaagaattgagatccacaagtatggtatcatttactcaagcacgacttacagtaaaatgaaagctataaaaagagtctaggctttatgatcccttgtcagttgcttcttccaccaacgatgcaaagcaggatctaaagtttgaagaaaagagttgsgtgttttacatttaaattaaattaaaagttttatttaattgtgtatgttcaacctaggtacattagaagatacgactacctatcaaagtagagcattctcataacttcatcgcctagaaataacaagtatttatttttcaaattttcttgtatacatatacaactacatttctctatgaatggggctgataatgtccccagtatttattaatgtgcttgcttctctcaacattatagatatttccatgccagggatcttatattgaggatataattttaaatgactgtctagttttcattatatattttttaaaaagtgaatcaccttt

SEQ ID NO: 882364 - DNA, 623 bp, Homo sapiens
tttttcccaatataaattaaaatagcatcatatatgtaacaattgaaaaggctgtctgtatactgcctaataggacctcttgtatcaatcacactttaagaaatactgatccagcccatacccctcatttcataaatgaaagaattgagatccacaagtatggtatcatttactcaagcacgacttacagtaaaatgaaagctataaaaagagtctaggctttatgatcccttgtcagttgcttcttccaccaacgatgcaaagcaggatctaaagtttgaagaaaagagttgggtgttttacatttaaattaaattaaaagttttatttaattgtgtatgttcaacctaggtamattagaagatacgactacctatcaaagtagagcattctcataacttcatcgcctagaaataacaagtatttatttttcaaattttcttgtatacatatacaactacatttctctatgaatggggctgataatgtccccagtatttattaatgtgcttgcttctctcaacattatagatatttccatgccagggatcttatattgaggatataattttaaatgactgtctagttttcattatatattttttaaaaagtgaatcaccttt

SEQ ID NO: 882365 - DNA, 614 bp, Homo sapiens
gtaaaggtagttacatagataagaataaagccaatatttttgtagtttttgtttgtaactcccattttttccctaacttatttaacaaactaatacataaacaataattataattatattgtggaaaattatacagaataatctcattgtgtataatgagaacacaatgagtcaaagtgtgtttttccatgtgtataaaaatttcctttgttcgccgttgtaatttttaacagcacaacttatgtatttcaaatagacacaaaattagtagcatttacagtagtatcttaagctaaattgcctttgaatgagatcttgctttcaatactttgatgtccacaaggcatatctagaaaattttatgctttggaagatgaagactgcttaatccarcggggaaggggactatgatttctctttgactagttgccataacactgtccttaaggcatatgaaggacttttatatgttatttagacatcagtaggcacagaagctttgcagtacaactttgacatataaattctgtcattttttttttactttaaaataaattttttttttaaatgtcactttgctagcattgataacgctcttaggtccaccacaacat

SEQ ID NO: 882366 - DNA, 593 bp, Homo sapiens
taaacattcatacatataggttgatacataaataaaattattaggagacttgagtgctttctgatgcccaacagcaaaggacaagcctgtggttactttattcaaattgattcaaaagcctgaaagactttcagcaaagtagataagaaatgtctgggaaacctaggtggtcttaatattaggaaagataacagaatttgtgttgtcaccatatttagttctgtcagcgtatctctttggtttttgtattgaggtataatatgcatatagtaaagtgcatgaacattcatcaaatgtttgtgaacgttttagttatgcacwtacctgtgtaataatcctccaccaatcaagatgcagaatatttccaccaacccagaaattatttcattcctcttttcaatcaatacccacctctagagataaccactattttgatttctattgccttagattagttttgctttctcttgaatttcatattaatgaaatcatgcattacattttatatgtttcttatgttgaatactgttccattgtatgaatatgtcatcttgtttatctacttctctggtaatagaaatttgtgttgtttc

SEQ ID NO: 882367 - DNA, 667 bp, Homo sapiens
atgtgggaattaaaaaaggattgatgtgtccacatattaccacagacagattgatagggtcaggctagaaagaattatgtagaaaaactcggcgatagaagcaaaaggcagaatgggatgtacagctgagccagaaaatacaaggcaagaaaagataacagagatcgaatgcccataaatgtccttatttctgtgctagggctctgtgactgcaggtacaacagagaacacatgagatcctaaggaaagagtgtatgtacgggcgttggaggcctgtgagtaccatcagaacttcctgagtttcttccaaatgtcctttcttcagtaggtatatctctgaagcacctgtgtgttgaatgaagaattacctaaagggctgaatctttctcttcttaccttttctctagtcagtgccagactttagggcatgttgtcctctgggatcacagacctcattgaaaacaaatcccagtatcccagtayggcttccattctagtgggaatgggaaggcaggcccccgttgtgctcctctcctggggatgaatgttcactgaggttctgcagtacctctatgccatggctctcctttagtcctggaaacagcattcagactccagtccgtcatagcagtcactcaggatcttacagccagctcagcaacaaaca

SEQ ID NO: 882368 - DNA, 643 bp, Homo sapiens
attgccatatacatatagaacagttctgaccagtgagataggaccagaagttggatagggccttcccataatgtttttttctctcctgatacaagtacacatctctctatccctccttttctctttttaaaacatggaagagataactttaccgtaaaggaaaacacataactaatcccctttccttatsccatgcctggtagtcttttagatgccaagtcaaatccagcccccagatttaattttgcatgaaaatttttaataaaccattatttggttgagttttctgttgctgcagctaaacatagttctaactatagtaagattgacataaaatggctttatgatttcttgtttccatgtgtaaaggcaggaaaagatatataaacaaattactttgtttatacaaacatggggactccatttatgttgatcatatctgtttcataaagtattaatattcctatatttttttataaaggaaaaaaacttcacctttcatttagagaggactcgttattaaatttccatagcaatttcttatactcatggaagattatggaatccagatttcatcctaaagtcttttaaccacagacaatttccatgcaaataataactatagtcttacatttgtcttaac

SEQ ID NO: 882369 - DNA, 643 bp, Homo sapiens
attgccatatacatatagaacagttctgaccagtgagataggaccagaagttggatagggccttcccataatgtttttttctctcctgatacaagtacacatctctctatccctccttttctctttttaaaacatggaagagataactttaccgtaaaggaaaacacataactaatcccctttccttatcccatgcctggtagtcttttagatgccaagtcaaatccagcccccagatttaattttgcatgaaaatttttaataaaccattatttggttgagttttctgttgctgcagctaaacatagttctaactatagtaagattgacataaaatggctttatgatttcttgtttccatgtgtaaaggcaggaaaagatatataaacaaattactttgtttatacaaacayggggactccatttatgttgatcatatctgtttcataaagtattaatattcctatatttttttataaaggaaaaaaacttcacctttcatttagagaggactcgttattaaatttccatagcaatttcttatactcatggaagattatggaatccagatttcatcctaaagtcttttaaccacagacaatttccatgcaaataataactatagtcttacatttgtcttaac

SEQ ID NO: 882370 - DNA, 626 bp, Homo sapiens
ggtacactcaaaacctcatttgtgtcctgatatatgttttgagccaggaatatgtgtaagagttaaagaaagaggaaagaaacacaaaacacagcttggcagttaaagacaggtttactttagataaaacctgagaggggcttctggctgatttatttatttatttatttatttattttatttttatttttattttttggtcaggagcactttctctkgcagactaagagtatatattggttttagggtgagggggtttatcacaatcttggaatgtttatgtgtggaggagaagtttatggcggggtttggaatctctctgggaggaggggaggttatcttgaggctgatgtctttttggcaggagggggattatcttggggctggcaccttcccagtcagagcagggttatctcagagctagcatgcctctggttggggaggagtttggaatgtttctggttggagatgttatttgtggtttatggtcatgctgaccatagccattaggctgatggcctttggacttaggaagtttttgattaaggtgaatgttaaaatgagggcttgtccaagacagcgatgctcctgctttgtcaatatggaaaggacacagtccctgcttc

SEQ ID NO: 882371 - DNA, 609 bp, Homo sapiens
agtgagaggccatgacagctctctggagccagactgagccataccagccacccagtccaagtaataaagatggccacaaggagaacagtggcagctcaggggacatgaaagagaagctgggtgtggagtctgtggtgcacttacagacagagatggccctgccacccacacctaaggacataggctatttacccacacgcaaagtagccaacgctaatgtgcccatgcaggctctctggggcaccaaggtggcagtgaatcwgtggagtgcaggtgcactgccagcctgtgcccagtgcccacagcatcccatgggtcctcgagcagatcttgtatctgcaacagcagctacagcagatccagctcaccaagcagatctacattgagatgaacgtgtgggcctcccacatcctccactgtggcagggcaggggctgacaccctgaagactttgggcagccacatgtccctgcaggtttctgcagctgtggttttgcttagccagaaggctggaagccaaggtccgtctctggatgccttgaaacaagccaagatactgcacaccaacatcccttctaccttcagcactctgccccaggactgatgcctt

SEQ ID NO: 882372 - DNA, 609 bp, Homo sapiens
agtgagaggccatgacagctctctggagccagactgagccataccagccacccagtccaagtaataaagatggccacaaggagaacagtggcagctcaggggacatgaaagagaagctgggtgtggagtctgtggtgcacttacagacagagatggccctgccacccacacctaaggacataggctatttacccacacgcaaagtagccaacgctaatgtgcccatgcaggctctctggggcaccaaggtggcagtgaatcagtggagtgcaggtgcactgccagcctgtgcccagtgcccacagcatcccatgggtcctcragcagatcttgtatctgcaacagcagctacagcagatccagctcaccaagcagatctacattgagatgaacgtgtgggcctcccacatcctccactgtggcagggcaggggctgacaccctgaagactttgggcagccacatgtccctgcaggtttctgcagctgtggttttgcttagccagaaggctggaagccaaggtccgtctctggatgccttgaaacaagccaagatactgcacaccaacatcccttctaccttcagcactctgccccaggactgatgcctt

SEQ ID NO: 882373 - DNA, 567 bp, Homo sapiens
atatatgcttgtgggtatatatataacatatatattaatgtagcataccatccacactgttctgttaccatgctttcttacttaaactatatcatgggaaaccatcattgtcagtacatgaagacagctaccttattatttttaatctaaattttcaaacacacacaaactaggaagaattgtataatgaactcytttgtatctttcattcagctttaacaaccatcaactggctatctccttctctttaaagtttcaaattttgccattgtgtgactataccacattttatttagtcaatctcttgttgatggacacagattgtgttcaaattattagttttgtttgtattgtagcatagtttagtaaggtacacagatctcaagagtacagttcaatgagttctgacaaatgtatatgccatacaaccatcactgaaactaaaatatagaacatttcccataatcctgaaaactctctcatgtttcccccccagacaacacttccactaaagtaagaattgttcttatttacataaaaccatagaatagttctgtttattctatt

SEQ ID NO: 882374 - DNA, 599 bp, Homo sapiens
tataatataactagataacatagagacatctacatttcatatttcttttcacaatcccaattttttaaacctatatatttataccagtactgaattattagtgtcatttttaatctgacacatatataacatgacacagtgaatagctgtcaaattaagtgtcactatatggctattgtgtcatatatggtcatattctaataaccagtctttatgtattatagatttgtgaatttttyttttttggaggatggagaataaggtttggtgtgctatttgaattttgctcacagatctaatctggcattttcacttttacttttagatagttttgttcaatttgttttcaaaaaaattagaagctttttgggggaacaattgcaagagtcattccatataattcctcccaataatgttatgagtaaataaaaattaatatattcacccaacaaattaagttctcaatctgtgccaaatcctatgctatacaatgagtaacatgagctttgggaactgccttcaaacatgtgaagaaccagataccacagaaaacaaaaggaatacattaattgagaaaacatcacataaataattttggg

SEQ ID NO: 882375 - DNA, 599 bp, Homo sapiens
tataatataactagataacatagagacatctacatttcatatttcttttcacaatcccaattttttaaacctatatatttataccagtactgaattattagtgtcatttttaatctgacacatatataacatgacacagtgaatagctgtcaaattaagtgtcactatatggctattgtgtcatatatggtcatattctaataaccagtctttatgtattatagatttgtgaatttttcttttttggaggatggagaataaggtttggtgtgctatttgaattttgctcacagatctaatctggcattttcacttttacttttagatagttttgttcaatttgttttcaaaaaaattagaagctttttgggggaacaattgcaagagtcattccatataattyctcccaataatgttatgagtaaataaaaattaatatattcacccaacaaattaagttctcaatctgtgccaaatcctatgctatacaatgagtaacatgagctttgggaactgccttcaaacatgtgaagaaccagataccacagaaaacaaaaggaatacattaattgagaaaacatcacataaataattttggg

SEQ ID NO: 882376 - DNA, 647 bp, Homo sapiens
gcacaagctgtctcattttttgcctgccaccatccatgcaagatgtgacttgctcttccttgccttctgccatgattgtgagacttccccagccaggtgaaactgtaagtccaattaaacctctttcttttgtaaattgcccagtctctggtatgtctttatcagcagcatgaaaatgggctaacatagcatattggtaccagcagagtggagcattgaagaaaagatgcttgaaaatgtggaagtgaccttggaactgggtaacaggtgcaggctggaacagtttggagggctcagaagaagacaggaaaatgtgggaaagtttggagcttcctagagacttgttaaatggctttgacaaacatgctgatagtgatgtgaacaatatcatcttccaggatraggtggtctcaggtggagataaggaacttgcttggaactagagcaaaggtgactttgtcatgttttagcaaagagactgttggcattttgcccctgccctggagatttgtggaacattgaacttgagagagatgatttacagtatctggcagaagaaattcctaagcaccaaagcattcaagaggtgacctgggtgctgttaaaagcattcagttttataagggaagcagagcataaaagtttgg

SEQ ID NO: 882377 - DNA, 647 bp, Homo sapiens
gcacaagctgtctcattttttgcctgccaccatccatgcaagatgtgacttgctcttccttgccttctgccatgattgtgagacttccccagccaggtgaaactgtaagtccaattaaacctctttcttttgtaaattgcccagtctctggtatgtctttatcagcagcatgaaaatgggctaacatagcatattggtaccagcagagtggagcattgaagaaaagatgcttgaaaatgtggaagtgaccttggaactgggtaacaggtgcaggctggaacagtttggagggctcagaagaagacaggaaaatgtgggaaagtttggagcttcctagagacttgttaaatggctttgacaaacatgctgatagtgatgtgaacaatatcatcttccaggataaggtggtctcaggtggagataagraacttgcttggaactagagcaaaggtgactttgtcatgttttagcaaagagactgttggcattttgcccctgccctggagatttgtggaacattgaacttgagagagatgatttacagtatctggcagaagaaattcctaagcaccaaagcattcaagaggtgacctgggtgctgttaaaagcattcagttttataagggaagcagagcataaaagtttgg

SEQ ID NO: 882378 - DNA, 623 bp, Homo sapiens
atctggacagtaagggagattgtgaacttagttttcttacaggacataggtattataattattattgtggtaaaaatttcctcctagcaggaagataatttttttgtgtgctttgggaatcacccaaaagttttccactgcaaaaaycaatggaataaggaactgatattttctaaaccttcagtaagtggctaaatctatcaggcttatctattcatccccatagtgagaattccttgcaatatgtgtttgtggcattcttatagataccacagtcagaaaaaaaggggatggattaaaataagcagaaaaatttgctacattctgtgctaactttaaccccatataaatgctgtcttataagtagatctattaaatagggccatccatagccacagcctttcatattttaagtaaatatcacaacataatattttcatcagaaaacttgtctccaatttctagagccttttgttactcctggcactatcttagtaggactttagtgtgccagatatgagcctgctagatttaagtcaaataatgatttattcttatgccctcttctcaactgtgttgatcaaattcataaaacaaatgttagccttaaattccttacttca

SEQ ID NO: 882379 - DNA, 623 bp, Homo sapiens
atctggacagtaagggagattgtgaacttagttttcttacaggacataggtattataattattattgtggtaaaaatttcctcctagcaggaagataatttttttgtgtgctttgggaatcacccaaaagttttccactgcaaaaatcaatggaataaggaactgatattttctaaaccttcagtaagtggctaaatctatcaggcttatctattcayccccatagtgagaattccttgcaatatgtgtttgtggcattcttatagataccacagtcagaaaaaaaggggatggattaaaataagcagaaaaatttgctacattctgtgctaactttaaccccatataaatgctgtcttataagtagatctattaaatagggccatccatagccacagcctttcatattttaagtaaatatcacaacataatattttcatcagaaaacttgtctccaatttctagagccttttgttactcctggcactatcttagtaggactttagtgtgccagatatgagcctgctagatttaagtcaaataatgatttattcttatgccctcttctcaactgtgttgatcaaattcataaaacaaatgttagccttaaattccttacttca

SEQ ID NO: 882380 - DNA, 661 bp, Homo sapiens
aaagaagtgtagtgtgtgtgcatgcatgcgtgcatgtgtgtgtgtgtgtgttcagagtaaaacagcagaaaatcttaaatcaagaagaaaatcttaaaaatcaaaggggagggtgaaaaagactgttttcaaagaagtaaactgacagctgacttctcaaaaataacaatggaaaccaactgagatttgaattatttttcaatgttcagagagaaaataactaacatcaaattttgtataaarcagagcaattcttaaaataagaaataaaagcatttaaagaaaatctgcagaatttaacggtatattttctctaaaggaaactccacaagtagatggaaaggatgagggcctggattatactgcacctgccacctgtgtggttgtgctcaaagaacagaacctctttgggatggtttctaaatttcaaaataaagatgaggtattctcagctagtctcactgtattttattaattgaaacaccatatgtgaaacagaagactctaatgcaaacgtaaagagatttgttactaaaaccttaggccaagctttggatgttcttaaaagggcaatggcaggaatgagaatggggaaaatgatctatcctcagtgagttgtaggacttagagaaagcctcaagggctgtcatgtgttttatca

SEQ ID NO: 882381 - DNA, 629 bp, Homo sapiens
ttcctgacatgcggtgaggccacatctccactcacttcctgtcagtaggtgtcacttgaacaaattttctcatgtcctggccagtcacctggagcctggaggcatgtcttactttgcatacacctctgtcaaaatgcgtatcagacaattatgttataaattgaatgtcttaggtgttacagagtaggtgttgtggaatgaatatttgtgtatcctccaaagcgcactctctctttctctcwcacacacacacatacataccccaaggaaaggccatgtgatatcttgattttaaacttccagcctccagaactgtgagataacaaatttctcttcgttaagccactcagtgagtggtatattgttatggcagcccaagtagactaatacattaggttattctgctactgacccaccttactgagctagacctactttggtccccacatgtctccccagggacactgtacgaagcctggagctatgtcagtttttctgtactcaaaagtagtgccctcctatatttacctcttgtttgttttattggagttcctggcaggtatctcccttctctttgaactgtaaatagaaataatccttctttttgaagtaggattttctttctgaac

SEQ ID NO: 882382 - DNA, 728 bp, Homo sapiens
ctctacttcacatatgtacaaaagttaactcaaatggattaaagacctaaatgtaagatctagaagtacaaacacttagatgaaaacatagttgtaaatcttggccaccttggactatgcaacaatctcttatatacaacatcaaaaaaagcaactgaaggraaaatagataaattgggcattatcagaatttaaatctttgtgcatcaaaattcgcaaaatattccacaaaggaaaatgaaaagataacccacataatagaagaatatatttgcaagtcatgtttatctgataaggatctaatatcaagaatatatattttaaactcttacaatttaacactaagacaaatgccaattttaaaacggtcaaatgatttaaaccatcattgctccaaagaagacacacaaatggccaaaaagcatgaaaaaaaagatgctcaacattattattcattgggaaaatgcaaattaaaccacaatgagctgccacatcacacccactaggatgttcataatttttcaaaaaggaagaataagaaagagaaatgtaaaattctaagtgttggtaaggacgtggggaaattggaatcctcatccaccactggtaggaatgtaaaatagtacagacacattagaaaatagtttggcaatttctcaaatgactaaacacagagttaccatttgacccagcaataatagtcctaaatatctacttaagaggtcgaa

SEQ ID NO: 882383 - DNA, 591 bp, Homo sapiens
ggacattgtactgattattaaataatttgcttatcattttgattttttgagacttcttttaatttttatctgaacagcctctattctgggactaattaaagtcactactaatttatcacctttctgaggattctagtgcctgccctgtgcattacaatgtctcttgaatcctggatgctagtaatacaaactatgcccagcactatgtgaactctggaaattatttggcctgttgcttctctttgcctgagtttcctctcatgtatgtacagatcagccaaagacaaagagtgacccctccagagccagagttctcttctgaatctctctctccccctctttctctttgtctctctctctttttctctctccccaaatccctcctctctggtacacttattcawacattctagatgctttaggatccccaatctcctattctattcctcaacacaacgaggcagctgtgctgtgttgtggttaatcctccctgtgctgttgcctagaaactgcctccaggaaataagtggaagaaatgttaggactcacttcatttattttcattatctctgtattatctgtagtccaagg

SEQ ID NO: 882384 - DNA, 617 bp, Homo sapiens
caatagggtggagacaagttcgatcatacattaaataatattattaagctgaaataattaaaaatagttggcaatagtgaaagtataactagatagattgatagaagacagaaacaaattacatagagaaaattactgtactgcaaagatattactaatcagggagaaaataatagatttttgagcrcataatgttgagtcaattgtctagccacttgaaaaaaattaaccccttaccttattccttagatcaaaataactccaaatgataggcttaaaagattaaatataaaacataccagaaattttcaggatttaaaaaagtaagcttagagtgggtcaggttttctaagcaagaccaaaatttcaggagacattataaagatgaatgcatttgaatataccataaggaagagatatatgaaagcaaatatttctacgtggcaaaaatacaataaaacagcaaaaactaaacgccaaaatggaataaaaagcttcaaaatataaagtcacataaaacgtgactttaatatataaagagctttagtaaaccaacaaaaaattaactctccaaaagaaaattgtgctaatactataatagctaatgttacttattt

SEQ ID NO: 882385 - DNA, 617 bp, Homo sapiens
caatagggtggagacaagttcgatcatacattaaataatattattaagctgaaataattaaaaatagttggcaatagtgaaagtataactagatagattgatagaagacagaaacaaattacatagagaaaattactgtactgcaaagatattactaatcagggagaaaataatagatttttgagcacataatgttgartcaattgtctagccacttgaaaaaaattaaccccttaccttattccttagatcaaaataactccaaatgataggcttaaaagattaaatataaaacataccagaaattttcaggatttaaaaaagtaagcttagagtgggtcaggttttctaagcaagaccaaaatttcaggagacattataaagatgaatgcatttgaatataccataaggaagagatatatgaaagcaaatatttctacgtggcaaaaatacaataaaacagcaaaaactaaacgccaaaatggaataaaaagcttcaaaatataaagtcacataaaacgtgactttaatatataaagagctttagtaaaccaacaaaaaattaactctccaaaagaaaattgtgctaatactataatagctaatgttacttattt

SEQ ID NO: 882386 - DNA, 591 bp, Homo sapiens
gtctccaaaatgaacacttaaacataattttcaatagactattcaaagagagacatacaaatggattttaaaattattttttcaacccaggcttcagtaataatagagaaaattttgaaatggtattctgaattagcatttttcacctattaacttcagaaagataaaaatgtttaataatacattgtgttggcaaggaagtgaagcaatatttattaaatgaaaaatgcatgggttctctgttatcatttacatatttycaataatttttataaatatatttgtccatgttggcaaacatctttttatggggataaccatttcagcataatctttggtagtaaaagactggaaatgaaaatacaaaaatgcaaaactgtttaaatataatatagtacagccaaacaatggaatactacgtggccattttgcatggacaaaaaacaaggcacagaatgatatgtatgtttgtctgaaaataatgagtatgtacgtgtatgagagtgtttgaaagaacagatgcatagatgcctctataatgagaactgtgatactgaaggacagatgaggaggaaagacttacttttgctg

SEQ ID NO: 882387 - DNA, 591 bp, Homo sapiens
gtctccaaaatgaacacttaaacataattttcaatagactattcaaagagagacatacaaatggattttaaaattattttttcaacccaggcttcagtaataatagagaaaattttgaaatggtattctgaattagcatttttcacctattaacttcagaaagataaaaatgtttaataatacattgtgttggcaaggaagtgaagcaatatttattaaatgaaaaatgcatgggttctctgttatcatttacatatttccaataatttttataaatatatttgtycatgttggcaaacatctttttatggggataaccatttcagcataatctttggtagtaaaagactggaaatgaaaatacaaaaatgcaaaactgtttaaatataatatagtacagccaaacaatggaatactacgtggccattttgcatggacaaaaaacaaggcacagaatgatatgtatgtttgtctgaaaataatgagtatgtacgtgtatgagagtgtttgaaagaacagatgcatagatgcctctataatgagaactgtgatactgaaggacagatgaggaggaaagacttacttttgctg

SEQ ID NO: 882388 - DNA, 638 bp, Homo sapiens
atgttcctgctcattctttgtgagagtttcaatgggaaatcattaggcctccatctcacaatactgactttctttcttctgacttatttttgtttcctaatcttaaaaaaaatctttaatgggcacttactttttcttcaattaatatataaacaaacctgcaytgacatggttaaattcctggactctcagttcttagggatggactaaatggctgatatcatcacttaaaaaagtgtcttgaatttgttggagcttatgttgagaaataaagtttatattttttaattgttaccttttaattccatatttctataaactttttgaaacccccttataccttgatctgaaaaatctgccttgatttgagggtctggggataatctcgtttttctcctcagggattatgtgtaatgttaaagccacaaaagtagggcagtgctgaaacaagaagtgaatataccctgttcccactctaccactggaggaaatgaggacacaatctggtatcaacagtttgataaccatggctcacagtatctgattggaggtttaaagaacgaggtgaccagtcaaatggcttcactgcctgtattagtctgttctttcattgctataaagaaatacttgagactggg

SEQ ID NO: 882389 - DNA, 638 bp, Homo sapiens
atgttcctgctcattctttgtgagagtttcaatgggaaatcattaggcctccatctcacaatactgactttctttcttctgacttatttttgtttcctaatcttaaaaaaaatctttaatgggcacttactttttcttcaattaatatataaacaaacctgcattgacatggttaaattcctggactctcagttcttagggatggactaaatggctgatatcatcacttaaaaaagtgtcttgaatttgttggagcttatgttgagaaataaagtttatattttttaattgttaccttttaattccatatttctataaactttttgaaacccccttataccttgatctgaaaaatctgccttgatttgagggtctggggataatctcgtttttctcctcagggattatgtgtaatgttaaagccacaaaagtagggcagtgytgaaacaagaagtgaatataccctgttcccactctaccactggaggaaatgaggacacaatctggtatcaacagtttgataaccatggctcacagtatctgattggaggtttaaagaacgaggtgaccagtcaaatggcttcactgcctgtattagtctgttctttcattgctataaagaaatacttgagactggg

SEQ ID NO: 882390 - DNA, 612 bp, Homo sapiens
acaactaaggatctcagcctcagttattttcaggaagttgacgtgttctgtgaaagcaaacagtacaaagaaagtagaatcctgtctagcatttagttcctatggacatcttagatttctttaatttattttcttatttgccattttgcaaaggaaagagcttgtacctgattctagaagaaattagactataggatttgtaacaagcaggaggaggtgatttgcaccaaggtatttcagatagtgatggactgggatgacttaaggttggccatgtggattggtataaggcaaatcaatttgcttttagttattaatctcatctctcaaacaatcagaaacccagaatgagygtttatttcaagctgcattatctacagattattttacccagtatcctgacttcagtgagctacagtcctttgaggaaagaagcctcttcaaaggacttcagctcactgatgaaagtatttgagactgggagacttaattaaagctgacatttaaggatgtgtgcaaggcaatctttccaaagacaatataaaagggaaaaaaaaggctttatttttttaatctggtggtccccagcgaaaggcagtctaaattaaacac

SEQ ID NO: 882391 - DNA, 613 bp, Homo sapiens
catactatcccactagtgcagcaaagtaaaatttctttaaatattcacatattgataaatagctgtggagaaaaaactttaaaatgttatgttcccatatgtgtttttcaggcttgttgtataacctagaatatgatctatcctggaaaatataaccatgcatgattgagaagaatgtgtaatctgatcttgggtagatagatgtctgttaggtctacctggcttttgtgttgttcaagtcttctatttccttgttggtattctayttgtcctatctattattgaaagtgaggtattgagtcttcacctgttattcttgaattttctgtttttcccttcaattctgtcagtttttgtgcatcatgtattttgggatatgtcattaggtgcatatatgtttataactgatatattcttaatggatgcccttttatcattataaaatttcccattttatctctagtaacattttttggtttaaagtatactttgtctaataataatgtagtgacaccagtcatatctttacctatcctttttactttcaacttatgtgtatctctgtatctaaagtgtgtctctgacagtgtatagatgtgtgtgtgtgtgtgtg

SEQ ID NO: 882392 - DNA, 613 bp, Homo sapiens
catactatcccactagtgcagcaaagtaaaatttctttaaatattcacatattgataaatagctgtggagaaaaaactttaaaatgttatgttcccatatgtgtttttcaggcttgttgtataacctagaatatgatctatcctggaaaatataaccatgcatgattgagaagaatgtgtaatctgatcttgggtagatagatgtctgttaggtctacctggcttttgtgttgttcaagtcttctatttccttgttggtattctacttgtcctatctattattgaaagtgaggtattgagtcttcacctgttattcttgaattttctgtttttcccttcaattctgtcagtttttgtgcatcatgtattttgggatatgtcattaggtgcatatatgtttataactgatatattcttaatggatgcccttttatcattataaaatttcccwttttatctctagtaacattttttggtttaaagtatactttgtctaataataatgtagtgacaccagtcatatctttacctatcctttttactttcaacttatgtgtatctctgtatctaaagtgtgtctctgacagtgtatagatgtgtgtgtgtgtgtgtg

SEQ ID NO: 882393 - DNA, 621 bp, Homo sapiens
ctgaaagtcagccagtcagtgcccctgagtgccaagcaatcagcaatagcctcaccctagtgactctgtttctgcagataatgttaactcatttacacctctgaagtttgccaatccctgaattccatgcttccccaaaacccagtataaatcagctgtctgttgtgctcagcaagattgtgtctgattttcataggtctcctttgctattatttccaataaatgcacatggtctttgtatttcacagcattgagtagtgtcaaatccttcgacagctgccaaagtatattttcttgtgggacatttggacttggacaacttttcttactatttttcttcaatgctcaaaacaaacctaacataaagratatttattcttgtttgaaatgatattcagcatcagcagaaatagttaacatgctatcagaacttataaaatcaacatttagtattataagaaaatgaatctctctgcagatcattccagccagaatagtgatgtttattgctttgtacatcattgaagtcactgattccaaaatcagctatttcaaagcagttgtggattacatttagggtgattgtgtcccacatagcatagcaacaagattcttcactgc

SEQ ID NO: 882394 - DNA, 609 bp, Homo sapiens
agggcccaaaagaaatactgtcactgaaaagagcactttcctgtatttgagggctcttcctctcttctggtacacccggggaaaaacctggcagagtccacccacagtctttgaggattaattctgtaagaacttcttacactgaagggaatcctcctccaggggatgattctgctctgtgcttctgagctctgatggcaatcacatcaacatcgcyggggactgtggcagaagaggaacatcacccactggaaaccggggcaagttgctcctctgtagttccaggaaatggccagaggcacagctctgctgttccaatttgcagttttctctaacatcaaaaataaaatgtgatttgcatttgaaattttacagaattcctcattttaggtcaagactggccttacccataggttagtgacttatgtggtaggatttaacacacacacacacatacacacacaaatattatccataaaaagaattatattcccaccaacctgctgtggcattcatcagtgaccctttgaagttcagccattgaaggggcaggttaaaatgcaaatttgtttcttggagaggtagcacatagagctattatcaactgtt

SEQ ID NO: 882395 - DNA, 607 bp, Homo sapiens
aaagaatctccctctctaactaatgccaccaagcagtcccttcaccccagagcaaaggcataacctatcttcacccaagtgaactatgtattcttgaaatatatctccttggaactaaaccatttttctgttcacttcaaatcaaccagtgttaatatcatagatctgacagcttagaaggcctgtgttctccttcactcttctcttgaccctatgtgagtttgattcaagagcatggggattagtcccttctcttgaattacaatcaccaatcagcacaccacrtccagttgctctttttaagtctaggagagcaaaaacaatgcacaggtgaaggaaactatgcctaggcctcatccctaggttgtacaaagtaactgaatttatggcttcaaggacagaataaatcaaataaaatcaaagaagcccattttcagggaatagaaacaattcacagaaataacaccttgaatgaaattctcatttttagtgcagaaatggaacataacattcttagattacttgctttctaaaagtgaatattctttaggtattactttttcaacattgatgagtttacaacatttctttttgcatagcagacaaa

SEQ ID NO: 882396 - DNA, 635 bp, Homo sapiens
ggccctgatgtggcgttgcatcttccggaaagggaaggccttttataaaccacacaaaagtgcaatctgttcgccaagcttgaacccaaggggctatctctacattcacccagcagggctgccttttctaaatcgcacaaagcaccatatgggctactggcctgaatttagcaactgggaggaggtcaatggagrggacacaattttaaatttacatgaaaaccctttgtaaactgtataacactattcaagtgtaaagcaggaagaggtgattcagaagcttagcaggtgacaggagaaattacactgaccacaagccttttctgcctaacccacagcatgtagaatctccatgagacgtttaagtacccgacaaactcctcagtgggaaaccatttgagggcagactggccagaaagcacagatgggaatggatgtgattatttctaaaagtccattctagtcacaaaccccaaggcagatctagccagtggggcagaagagccccagacagaagcacctgagccagcttggcctgacctaactgtcaggaccctttgatcttgctggagcttgacttggagaaaacatctggttctggggattctcaggggccatatagtgtgaaaccgagg

SEQ ID NO: 882397 - DNA, 592 bp, Homo sapiens
caattggtagagactatgcggagcatgctggtaagaaagattctgaggccacatctatactcagaggaagagagtgatgtgtttattagcaatatttaccaagggagcagaagcaggaggcaaccccacaccattttgtatttcccattcctgctctcgatgtcattccctgamatgagtcctgcagagaaagaataatcagagccaattctccattggattgtccttttggtaaagggcaaatttttccatttctgtcttttccatggaccatttcccctgctatcaattgctgttgcctgcagcctaagaaataaaatttttaaataaatgagaacgttctataattctctctaaaatcataaacaatgtgtcaaggccaaacacttccctggtgtgatttattcctatgtggactcatccttgtataattagcaggaataatcacaccctgagccagctggcagagcccctggggacagagaccacccaaagaaggtccttgttctcctgagtcacataaagggagtcacacaaggcgggagtggaactcaggtgtccggagttctagtcccagctctgcttctaccta

SEQ ID NO: 882398 - DNA, 591 bp, Homo sapiens
ggtaacatccagcgttaagcacactctgtgttttgttatgttatgttttgttttgttttgttgctttctatcccaaagtcttctctaatgtctcaggagatcccttagtttaagggcaagcacagcctgaaattatagggaaactaccacccctgttggcaaacaccaaccaatggggaaaaagagccagggaataaacgcactagctttgcgtcccttaaatagacaattctgagcggcaacctgtgtgcttcttgggaratcctaccagaaccgagtcccacttgagtcagttattgctcgacccactttcttcttttataacttatttttatagatcaagggagtacaagtgccacttttgatacatggatatattgtgtagtggtgaagtatgggttttcagtgtaaccatcacctgaatagtgtacattgtactcattaggtacttttcattcctcattctcctcccacactcccaccttttcaagtctcaatgtctgttatctttgtccatgtctatgcattatttagctcccatttataagtaagaaatgtagtatttgaatttctgtttctgagttacttcac

SEQ ID NO: 882399 - DNA, 591 bp, Homo sapiens
ggtaacatccagcgttaagcacactctgtgttttgttatgttatgttttgttttgttttgttgctttctatcccaaagtcttctctaatgtctcaggagatcccttagtttaagggcaagcacagcctgaaattatagggaaactaccacccctgttggcaaacaccaaccaatggggaaaaagagccagggaataaacgcactagctttgcgtcccttaaatagacaattctgagcggcaacctgtgtgcttcttgggagatcctaccagaaccgagtcccacttgagtcagttattgctygacccactttcttcttttataacttatttttatagatcaagggagtacaagtgccacttttgatacatggatatattgtgtagtggtgaagtatgggttttcagtgtaaccatcacctgaatagtgtacattgtactcattaggtacttttcattcctcattctcctcccacactcccaccttttcaagtctcaatgtctgttatctttgtccatgtctatgcattatttagctcccatttataagtaagaaatgtagtatttgaatttctgtttctgagttacttcac

SEQ ID NO: 882400 - DNA, 591 bp, Homo sapiens
ggtaacatccagcgttaagcacactctgtgttttgttatgttatgttttgttttgttttgttgctttctatcccaaagtcttctctaatgtctcaggagatcccttagtttaagggcaagcacagcctgaaattatagggaaactaccacccctgttggcaaacaccaaccaatggggaaaaagagccagggaataaacgcactagctttgcgtcccttaaatagacaattctgagcggcaacctgtgtgcttcttgggagatcctaccagaaccgagtcccacttgagtcagttattgctcgacccactttcttcttttataayttatttttatagatcaagggagtacaagtgccacttttgatacatggatatattgtgtagtggtgaagtatgggttttcagtgtaaccatcacctgaatagtgtacattgtactcattaggtacttttcattcctcattctcctcccacactcccaccttttcaagtctcaatgtctgttatctttgtccatgtctatgcattatttagctcccatttataagtaagaaatgtagtatttgaatttctgtttctgagttacttcac

SEQ ID NO: 882401 - DNA, 628 bp, Homo sapiens
gttgtaccgtgagcttttttacaacttcaaagtgggaaacatttattgcccttactcatggtgctgtctaaagaataactttttactctcctgaacatttcagggttctactcttattagagaaattgtactattatcattttatttttaaaatatttttagaaatgggggtctcactgtgttggtcaaactcttgagctccagccatcctcctgcctcagcctccaggggagctgggactccaggtacgcaccaccccacccggccactgagtcactattaaaaatcatttagcatagccaggcctggtgtggtggctcacgcctgtaatcccagcactttgggaggctgaggtgggtggatcacctgaggtcaggrgttcaagaccagcctgaccaatatggtgaaaccccgtctctacttaaaaaaaaaaaaattagcctggcatggtggcacccgcctgaaatcccagctactcaggaggctagggcaggagaatcacttgaacccaggaggcggaggttgcagtgagccaagatcacaccactgcactctagcctgggtgacagagtgagactccatctcagaaaaaaaaaaaaaaatcatttagcatacccagtctggggct

SEQ ID NO: 882402 - DNA, 639 bp, Homo sapiens
gaatgtaagctaagacatgccttttctccctgtgaatagagaggacacggagccagaagacacaaccctgcccgtctgctctcagtagtgcctcatccccttcaaaagccctagatactggcctatgcagctgtcccagggactactgaccacagcttctctatcggtgatacatgttcctggcttcctgtttttaagaagtactggacacacctgtgtcactttcctgaaagaaagagtgctgagattggagggtccaagtggaattacaggctgagacagagagaagatacaggagatgctggccctaacagagagggaaaacaaaacaaaacaaaacaagaaactattcttatgaaataaaataaaaagtctccccatctgagagtccactggtctttcctgaaagccaagtcatttttccatcgaataaatgcacragtaaaaatcaagaaaacataaacatggataaaagtttcctcatagagttgacaagattattcacagagacagacttcttggtctcaattttctcagcatcctcagagtttactgtgtggacactatgatcacagaaagaatctcaggtgccaaagctagcaattcaagttgtttctggtggaagtcagtgccctcctg

SEQ ID NO: 882403 - DNA, 594 bp, Homo sapiens
ggctgcttttaatgtatcctttctctgtaataaacgaatcacaagtatactaggtttcaatgagttctatgagtctttctagtgaattatggaacctgatttaggaaatacccaaccttgccattggtgccagtagtgagagtggtcttgcatgaacttatctcccctttgtagttgagtcctagcgacttacagttgggggcagaagtcttatgtagatttagtctggaggtctatgaccttaaccttgcagtttggctaactctgggtagctacattttgtattgagcaactctatatgaataaaagaagttttgttcatataatgccttaacagtgaatcaagtatatcaagaaagttttttaaaagttaaaagtaggcaagtctactggtaataaagtaggcaagtcacaaggtaattaaatgcctacgtttcaatgattacacrtgttgcttagaacatacacatatatgagatcatcacgttaaaatatttctaacacacaggctggcaacacctaacaataataataattagtaattgtctagttcttactactaactggtttctgttctgagtgttctacatatat

SEQ ID NO: 882404 - DNA, 598 bp, Homo sapiens
gttatcatttcgctcccacatataagtgagaaaatgctgtatttggttttctctttctgtgttaatttgctaaggataatgacctccagcttcatcaatgtccctgcaaagggcatgatctcattattttttatggctgtatagtatttcatggtttatatctatcacattttctttatccaatctgccattcctggccatttaggttgattccatgtctttgctattgtgaatagtgctgcaatgaacatatgcatacatgtgtctttatgatagaaygattattattcctttgggtatatacccagtaatgggattgctaagtcaaatggtagttctgtttttaggtctttgaggaacagccatgctgttgctcctaatggttgaactaacttacactcccaccaacagtgtaagtgttcctttttctccacaacctcaccagcacattattttttgactttttaacaatagccattctgactggtgtgagatggtagctcattgtggtttttatttgcatttctctaataatcaggaatgttgagctttttttcatatgcttggtggctgtatgtgtgtcttcttttgaaaagtg

SEQ ID NO: 882405 - DNA, 755 bp, Homo sapiens
ctgcctcgaggcaggaggagaaatgagagaacctcttaaagcctctttccagcccccagagcctgtctccatgaaaaaggcccaggctcattaatgcagagctgcatcctccaggacacagggggttgctgggttgttaagtttggaacctttgccggcttagtggttaccaaactccytttgttctcaagacttgacttgataaatgggctggctttatccctttaaagccaaaaacacaggttctgagtgctgtgttgtttgtggtgttgagatgcccaggctggagggaggaagctctagggggtttttgctgagcccagaaacactgtggggataactatggtcagaattttgtctttggtcccggaaccagattgtccgtgctgccctgtaagtacagttaagtggagatagaaaatgagtccagtgcttgatgtggggagaagctgcagggtcttgaggccaggagtccaccgtgacctcaggagtggtgatggagaagaaggttaaaaaaggaatgagaaacagaaccataaggacaatacagaggaagggttcattttcgggaaggaaaatcacaaggccgtgtgattaacgctggaggaaatgcactcctttggagggtcccttctcaggagggctttgtgtcggggaaagctgagctgttaggtttttgatgctgagataatcactatgcagaaggacaaggcttctcctttatctttgggaaggggacaaggctgcttgtcaag

SEQ ID NO: 882406 - DNA, 645 bp, Homo sapiens
agttgacatacattttgaccaggaagtttgaagcaactggattaaaaagcttgagttaatacagaggcatcaaaatagctgtatcagggtgggcatggtggttaagcctgtaatcccagaaattggggaggccaaggcaggcagagacctgagactgggagtttgagaccagcctaacctgaggtcaggagattcgagacagcttgaccaacatggagaacaccatctctactaaaaatacaaaattagccaggtgtggtggtgcatgcytgaattcccaactactcgggaggctgaggcaggaaaattgcttgaacccaggaggcggaggttgtggtgagccaagattgcaccattggactacagcctgggcaacaagagcaaaactccatttcaaaataataatgacaataataataatagctgcattggaagtttttgcttgttttttagcagaccctcagcccatatttgttccccttctccccgcttcccatgtctcccattctaacctatggttagaatggctttgcttttgtccttgaacttgttgccttttttctgttttgaattccctgaacactttctatatggtagccaccaaatgaatttcttctccaatatcttccctgctcctttgagacc

SEQ ID NO: 882407 - DNA, 645 bp, Homo sapiens
agttgacatacattttgaccaggaagtttgaagcaactggattaaaaagcttgagttaatacagaggcatcaaaatagctgtatcagggtgggcatggtggttaagcctgtaatcccagaaattggggaggccaaggcaggcagagacctgagactgggagtttgagaccagcctaacctgaggtcaggagattcgagacagcttgaccaacatggagaacaccatctctactaaaaatacaaaattagccaggtgtggtggtgcatgcttgaattcccaactactcgggaggctgaggcaggaaaattgcttgaacccaggaggcggaggttgtggtgagccaagattgcaccattggactacagcctgggcaacaagagcaaaactccatytcaaaataataatgacaataataataatagctgcattggaagtttttgcttgttttttagcagaccctcagcccatatttgttccccttctccccgcttcccatgtctcccattctaacctatggttagaatggctttgcttttgtccttgaacttgttgccttttttctgttttgaattccctgaacactttctatatggtagccaccaaatgaatttcttctccaatatcttccctgctcctttgagacc

SEQ ID NO: 882408 - DNA, 645 bp, Homo sapiens
agttgacatacattttgaccaggaagtttgaagcaactggattaaaaagcttgagttaatacagaggcatcaaaatagctgtatcagggtgggcatggtggttaagcctgtaatcccagaaattggggaggccaaggcaggcagagacctgagactgggagtttgagaccagcctaacctgaggtcaggagattcgagacagcttgaccaacatggagaacaccatctctactaaaaatacaaaattagccaggtgtggtggtgcatgcttgaattcccaactactcgggaggctgaggcaggaaaattgcttgaacccaggaggcggaggttgtggtgagccaagattgcaccattggactacagcctgggcaacaagagcaaaactccatttcaaaataataatgacaataataataatagctgcattggaagtttytgcttgttttttagcagaccctcagcccatatttgttccccttctccccgcttcccatgtctcccattctaacctatggttagaatggctttgcttttgtccttgaacttgttgccttttttctgttttgaattccctgaacactttctatatggtagccaccaaatgaatttcttctccaatatcttccctgctcctttgagacc

SEQ ID NO: 882409 - DNA, 601 bp, Homo sapiens
cataaattttaaaaatatctattcatttaaaaggaacaatattacctgttgatataaataacaaattttaatgaaaagtaactatattttccaaaacaaaatgaaatttgtgagtggtattattttacattttacagatctctttcatatctgccttaacagttgtcagccggcttctcgtttgtgtggctgcattcattctgttgtgctatgttgtcctgtttggagtatttgaagaagacctagcatcactaacatgcggttgggagagggaggcaaagcttttttaaacgattgtggatattctatgatagtccaccaaaactccrtaagtgatagtttcttaaaggttagctgaaatgtgaaatttttctactctattttattgaaatcttcaggtctgtgtcacactttaaattgatctttatcatgcatgattttctaactttacccattggtcaatgggagaatatcaattcattgagtcatgcagatcttccaaatatattttgaaaaattgcactgttcccttgtgagagaatgtgagtgaaaaaggcatataataggtcatgttattgtgaacatggttttcatctgagaa

SEQ ID NO: 882410 - DNA, 600 bp, Homo sapiens
atgcttaaccagatatctaggcattccatgacccagtcaagttgacacataaaattaaccatcacacctagcctccaatctaaggtggaggggagatacgtctatttgacccaaaaatatttattgagcacctaatatatgccaagcgaagcgatgtactgggctctragcaagaatatagtggtgaacaagagataagatccttgctctcaagcaactgccatctttatagaagaaaacagaagataaacaaagaagaaggagaaaacaaaaaaatagagaagagtggtttttttcaattatattaaaatagcatgaaatagatagtggttacttgctaatgatgagaaagcgaaatttaatctatgatctgaatgacaagaagaaatcagctacacaaaatgctgaaagcattccaggaagagagcacagctcatgcaaaaggccctgaggtaggaattttagattttagaaacttattaagtaagtggaacagtggaaataaaaacagtcaggaggtagagattcaccttgcaaggcatggtaacgagttttcattttattctaggggatacaggaagtcattggagggttttaagc

SEQ ID NO: 882411 - DNA, 554 bp, Homo sapiens
atttatgatttatttcagcagtgttctgtagttctccttttagagatctttcaccttcttggttacatatattcataggtattttatttttttgtagctattgtaaaaatgattaaattattgttttctcagcttggttgctcttagaatatagcactgtactgatttgtgtawattgattttttttaacctgagatttactaaattcagttatcaagtctaggttttttttttttttttggaggagcctgtacaattttctaggtatgagagaatatcattagaaaacagagatagtttgacttcctcttttcccatttagatgccctttatttctttagtttgcctgattctctggctatgatttttagtattatgttgaataaaagtggtgaaagtgggtatccttgtcttgttacagttaacaggtaaactgttttcaacacttcccattcagtatgatcttggttgtgggtttctcatacatggattttattatttggagatatgtcccttctatgcctagttgagaggtttcattaaaaagtgactct

SEQ ID NO: 882412 - DNA, 554 bp, Homo sapiens
atttatgatttatttcagcagtgttctgtagttctccttttagagatctttcaccttcttggttacatatattcataggtattttatttttttgtagctattgtaaaaatgattaaattattgttttctcagcttggttgctcttagaatatagcactgtactgatttgtgtatattgattttttttaacctgagatttactaaattcagttatcaagtytaggttttttttttttttttggaggagcctgtacaattttctaggtatgagagaatatcattagaaaacagagatagtttgacttcctcttttcccatttagatgccctttatttctttagtttgcctgattctctggctatgatttttagtattatgttgaataaaagtggtgaaagtgggtatccttgtcttgttacagttaacaggtaaactgttttcaacacttcccattcagtatgatcttggttgtgggtttctcatacatggattttattatttggagatatgtcccttctatgcctagttgagaggtttcattaaaaagtgactct

SEQ ID NO: 882413 - DNA, 554 bp, Homo sapiens
atttatgatttatttcagcagtgttctgtagttctccttttagagatctttcaccttcttggttacatatattcataggtattttatttttttgtagctattgtaaaaatgattaaattattgttttctcagcttggttgctcttagaatatagcactgtactgatttgtgtatattgattttttttaacctgagatttactaaattcagttatcaagtctaggttttttttttttttttggaggagcctgtacaattttytaggtatgagagaatatcattagaaaacagagatagtttgacttcctcttttcccatttagatgccctttatttctttagtttgcctgattctctggctatgatttttagtattatgttgaataaaagtggtgaaagtgggtatccttgtcttgttacagttaacaggtaaactgttttcaacacttcccattcagtatgatcttggttgtgggtttctcatacatggattttattatttggagatatgtcccttctatgcctagttgagaggtttcattaaaaagtgactct

SEQ ID NO: 882414 - DNA, 596 bp, Homo sapiens
gcaaaatgagaggggtgaatcacacaggtttgtgggttggtgttgcatgtagtgtgccttctttcacagtggtcatctggcaaaaaatttgtgagtacagtgcaagtgattggaggtagcttttctaaggcccaggaatggaccttttgagggggtcatctctctccgcctcacactataaaacacagaaaagaagaaatagaatctttctctgaaaagcaactgctgagggaatatgtttaaattagacaagccttacaagaggtgcttataagagtgttaaaaatttactggaaagaacaacacctgttaccacaaaagcacatttaagarcataacctaaattctctataaagcaactacgcaattcaaaaaagccaagcaacccagtaaaaaaattcaagatcttaaagacaaaatagtcatgttaagaaagactgaaactgaacttcttgagctgaaaaattcattacaagaatttcataatacaatcaaaagtattaatagcaaaatagacaaagctcaggaaagaatctcagagctcaaaactggttctgcaaattaagtcagtcacacaaaaataaccaaaaaaatta

SEQ ID NO: 882415 - DNA, 570 bp, Homo sapiens
tctgcatgtcctggaatctcacatcccaaaatgagctttcctttgaccacgcatctagccaattcctcttctctctgctctgcttcacaacaagatttctcaaaaaacatattatactacactcactttccatgtacttttctatgtgctactatctggttttgtctcatctttctactgagatgtttctattaaagttgccaaccatttacatcttcccaaacccaatggatactttttgttcctctgtcattttaccccccactgcttattttatggctcttccccctatactaaatgtaagaatacacaagagctaagtccrcagcattctgctcttctatctgaacactctttctcagatgattgtattcgtccattttcatactgctgtaaagaactgcccgagactgagtaatttataaagaaatgaggtttaattgactcacagttctgcatggctatgaaggcctcagaaaacttacaataatggcagagtggggaagcagggacatcttacatggtggcaggtgacagagcaagtgaagggggaagattctcttataaaac

SEQ ID NO: 882416 - DNA, 681 bp, Homo sapiens
aaaattgcaaactaaaataatgagattccactacagtcatattagaatggcagaaatcaaaatcactgacaaaccaaatgctggtgggggtgtggagcaacagcaactctttctcatggctgatggcagtgcaagatggtacagccacttcagccacttgggcggtttatcagtttcttacaaaattaaccatattcttactatacaatccagcaatcacgctccttggtatttacccacataagttgaaaactcatgcatatacaaaaagctgcacacaaatgtttctagcagaatcactcgtaataaacaaaacttgagaacaatcaagacgcccttcagtacatgaatagctaaataaacagtggcaaattcagacaatgaaatattattcatcactaaataataagctatcacaccatgaaaagacttagaggaaacttaaatgcatattactaggtgaaagaggcaatctgaaaagaacacatactgcatgatatcaactgtatagcattytggaaaatgcaaaactatggaaatagtaaaaaagagaatccatagatatcctatttttggggcatagatggatgaataggcagagaacagaggattttttaagcagtgacaatactttgcatgatactttaatggtggatgtgtgccattatacaatgtgtctat

SEQ ID NO: 882417 - DNA, 572 bp, Homo sapiens
ctcaattaggaaaatgatgcaggagcatcatgagatagcatgttgtatcttcttcaggctttttttttttttttgcatttttcatcaaacacaatccagaataaaattaaatatagaaaacaaatcaagaatcgatcttcatttaaaataagtaaaaagaacggtaagttctgaagataaatgcttgtgggagacaatccaacttatttaatataaggaatawctctcctatgtcaaataggtactttttttcaagagatagtttagaaagtaaaaagtaatttaaaatttccttttgtatggaattctctatttaagtcattaaaaatattaaaacctggagctgaaaaattgaactatgtatggtaggatttgcattttcaaagaagcctctgtctcactagtggttgttaataaaccccagtcacagtaaaatagaagctggcatttgttccatgctgttaaaaacaaatttgtgcagtatatttggaagtgtattttcttaataattcctattttacagtgcatggcctcctactgtatgaggcaaatgatgataatggcaatcatca

SEQ ID NO: 882418 - DNA, 665 bp, Homo sapiens
actgaatataaagatggaaaaggaaagtcacattataaaaactattgacaggattcaacaaaatattaattataaagagtgaagcacaatgacatgtcaaaaagccctccccacttccattccacctcctacctatgccttaattatttaagttgtatagtagtaagaatattctaggttctgctgtagccaaatgccacaatcttagtttcttaacaataaacaagtttttttcttgctcataaaaagtctcytgtagctccaggtgactcttcagggcatggagtggctaaatatttcaaaatacttctatttcatgacacattcacttcaacatgatggtgtggggtccattttgtcaggttaaagagagcatgacacactgactcatgagtgtttcaaccccaaagtgatatttatcactaccaattacagtcgattaaccagaattagtcacatggccccattcaacttgcaagggtgggaaatacagtcttctgtatgtctagataagcaaagagaactgaaaataatcattaaaaataataatcattatctagaagacaaggaaatggtggctgtacaccaataacttgagcgatataattcttcaaagaggaaaaaaatcaaacaatagaagaaaatacaagaatgtgtaaggggat

SEQ ID NO: 882419 - DNA, 632 bp, Homo sapiens
ccaacagcttgcacagtgagcctggaaaagccacagacactcaatgccagcccatgaaagcacccaggagaggggctatatcctgcaaagccacaggggcagagctgcccaagaccatgggaacctacctcttgcatcagcgtgacctggatgtgagacatggagtcaaaggagctattctctagctcttgtaggtgtgcttcattctttcttattctctttcttttgtctcctctgactgtatcttcaaatagcctgtctgcaagctcagtaaatctttcttctgtttagtcagttctgatgttaagagactttgatgcattcttcagtttgtcaatttaatttttcagctccagaatttctatttaatttttagaaattatttcaattcttttattaaattcattggatagacttgttgtttgtcagtgtttgatgatgtctgagcattgaaraatcagatatttattctcatttttgcagtctgctcttctttgtacttatgattcttgagaaagctttacaagtattctaagggtgctatgatgtaagtctttggtcactttagccatatttgcattatggagcaccccaagcctggtatcacagtgactcttgaagactcacagagg

SEQ ID NO: 882420 - DNA, 600 bp, Homo sapiens
cttgatatgatgttaaaaccaggtattgtgatcactcacctgacttttggtccttataaagatgcttacgtgtgtggatatttgttcaatttggtgtctttgtagggtgaggacaatcactggagcattctacatggccatattgtgccatattctcaaataaaattaaagggaatattcttgtgactttgggttaggcaaatatttagtagacaggatactaaaacataaacaacaaaaaagacaaaaacatgataaactggttttcattaaaaattttaatttttrttctacatggctaaaactgaagagataagacacagactgggagaaaatatgtgtaaagcatatctgataaaggacatacatctatgcaaagccagttacataattgtgagttcaagtggaaaatagaaatgtgagatcctttatcaaaaagcaaatgaaataggacattaaaagtataaatatataaagatcctttaaagacattttattacttgtgaaatataataggaacaattgtgcttctaattataaaaattaaaattttaaattataataatgatttttatcattaatctgtatattttccaatgc

SEQ ID NO: 882421 - DNA, 567 bp, Homo sapiens
taaaaactctcaataaactaagtattgatggaacatatgtcaaaataataagagctatttatgacaaacccacagccaatatcatattcaatgggcaaaagctggacacattccctttgaaaaccagcacaggacaaggatgccctctcttaccactcygattcaacatagtcttggaagttgtggccagggcaatcaggcaagagaaagaaataagggtattcaaataagaagagaggaagtcagattgtctctgtttgcagacaacatgattttatatttagaaaaccccattgtctcagcccccaaactccttaaactgataagcaacttcagcaaagtctcagaatacaaaatcaatgtgcaaaaatcacaagcattcccttacaccaaaaatagacaacagagagccaaatcacgagtgaactcccattcacaatcactacaaagagaataaaatacccaggaatagagctaacaagggatttgaaggacctcttcaagaagaacttgttacaaaccactgttcaaggaaataagggaggacacaaacaattggaaaaacat

SEQ ID NO: 882422 - DNA, 671 bp, Homo sapiens
agtttccttggtgaggatctataagtcataaactcagttctttgcctaaacacatctttatttcacttagtggtttcagtggatataaatgtccatttaacagttattattgaagatggctgactagatgacgccaggtgaaacagctcccactgagggactgagacgactcgtgtgcttttaacagatcttcagagtgaaggtgctgagagtggacagagggaagacacaactcattggtgtccctgaaagagatggggagaatagaaccaacttggaaaacatatttcaggatatcatccatgagaatttccccaacctaactagagaagccaatattcaaataaaggaaatgcagagaaccccargaagatactctttgagaaggtcgaccccaagacacataatcatcagattttccaaggttgaaatgaaagaaaaaatgttaaatgcagctagagagaaggtcaggtcacctacacagggaagcccatcatcagattaccagtgaacatctcagaaaccctataagccagaagagattggaagccaatattcaacactcttaaagaaaataaattccaacccataatttcatatcccgccaaactaagcttcataagcaaaggagaaataaggtcattttcagacaagcaaatgctgagggaatt

SEQ ID NO: 882423 - DNA, 631 bp, Homo sapiens
caccccttcatataacaaatatttaagattttttaaagtgtcaatgggattttcaaaggcttaattcagtttagcactgggagtagaaaatatctcaaatcaaaggcaagattcccaaagctttacatcatcattgttcacagaactatgcctttgaaaaaatgattagaaacaattgtggttctccttgaatctcagaactccactaccaaaaaggatggaaataatatgtatgtgtgtgtgtgtgtgtgtgtgtgtgtgtgtgtgtgtgtgtgtrtatagactttgtgtgcattatattaaactatattatgctacatgttaaacgggatatgaattcctattcttcagtggcttataaactaaatcacactttaacatttaaataatagatgaaatgtcaaaatgagtgctgctgacaaatttaaataggaagaaagtttgacaatccttaaaagaaaggtgaaatcactatggagtaggactcacatatgacggcttcacaaagataggacttcagctagattcaggggttctcatattcagttgtgactaaggatcacatactggacacttgttggaatttcagttcctggggcccatccccagaaagtctaattcagtaagtcca

SEQ ID NO: 882424 - DNA, 627 bp, Homo sapiens
tcaaattctgttacaacacaatgtaaacttttatagaatgaagaaatttctaagtgcaagtaggtggcgcatttatttttagcaacattcaataccatagagcccaaggcaaccaagtattttgaatcaacaaagaccctgctttttataaaggatagtaggctacccaaacttttctatgagttcctacttcagtgtttttcagctatttaacactttaacctatgccactttaataaatgttaaacatttcatgcagtctctttttctgatggcaatccgtttcccaaggaaatatccctggtttacaattatgtgctgtgtatttgtaccagccaaacagactttatcaaattttactttttttagtttgcattatgagaraagtagtttgtttccaaaaagaataaaaatatgataagcattctcttctttctaaaaattgttgcctctgtgtttatatgggtttcattcatagttatcaccacctttcacttctactgctccccagagatgtagcatttatctgaatacatttacttgaatttttcaaaatctacccacccccagtaacatacaacataacatgggcatttccataaacctcaaataattccttcaataaac

SEQ ID NO: 882425 - DNA, 666 bp, Homo sapiens
agagtgcaatagcacgatctcagctcaccacaacttctgcctcccgggttcaagcgattttcctgcctcagcctcctgagtagctgggattagaggcatgtaccaccacaccctgctaattttgtattttttagtagagatggggtttctccatgttggtcaggctggtcttgaactcctgacctcaggtgatccgcctgcctcagcctctcaaagtgctgggattacaggcrtgagccaccgcgcccggccaagaatgtcttaatgtcttcttattttatgaaggataattgcatatatcacaggctgtgacacctgtagccacctacacatttcttccacagcatttatacttttcccccaagatataagccctgggtctggagggttgtggtagatctgtctatcttgcagccaccgaagaccatgctctgtccataaattcccctaatacatcaccctgtactgacaaactggatttgtctgcctcatcctttggtttcttggctccttccgggtttgagggtcactttgaatatatggccctttcatggaacatatagttaaaattaaagatactaatgactctatttccagtagtaaagagagcacagatagtgcatagcatagcagagtataacatagcatgaactgttcatagagata

SEQ ID NO: 882426 - DNA, 542 bp, Homo sapiens
gttggttgctcctaatgttgctcgacaaattgatgaaagaagaggatgagctcagggattcaaattccaagctcaagtgctgcataaatgacctaagagcttctatttgtgccctgaaggagtcctttatctcctctagtggtagggctaaaattgctgcaaatcaaacacagaacctcatcctrtgattggctggattacaatacaagttaaactctcaaccttgcagggtgtctcctattaaagggaggacatcaattgggaaagaataggatcttgtaaattagaatggagatgtgtaggaagaccctgatgaagctgaggacagtgagctcctaaattctgagtcttctttgcctgtggaagagaacaccccatcccaaccaaaagtggtctccccaactttagtgcaagtggcctcccccagctagtggcagctgcatccatgtccttggggctgtcagcctctccacccatagtagtcttggtctttccaccttcctctgagaagattaaccctgcattgccttaatacactgtaa

SEQ ID NO: 882427 - DNA, 603 bp, Homo sapiens
cactctctctgtttgaattgggatattcgtcttctcctgccctcggacatgaaaacttctggttatcaggccctgagactcagattaggacttacaccactgccttccgcccccaccccccaccaattttcaggccttcagacttggactggaactacaccaccagctttcctgggcctccaacttgcagactgcagatcataagacatctcagccttcataaccatatgtgccaaccccttataataaatctctttctgtatatctatatattgcctattgattatttttcttagtagaaccytaattttccctgtggttttcctgaagtaattctgtaaaagtttgtattttttttcttctgtgaccattaaactctctgctcaggtagcttagtggttcattaatgattggatggaagtttccttaaactcctggaattaataagtctaccaaactttgctgaggggctctgtgtgtgtatttgggcactctttcaatgctccagcatgtagtttaaaactcttgtgttagccttcacattctgcttttacagacactcaaggtcagccagcggtgaaagttcaggaccttctcaagtct

SEQ ID NO: 882428 - DNA, 603 bp, Homo sapiens
cactctctctgtttgaattgggatattcgtcttctcctgccctcggacatgaaaacttctggttatcaggccctgagactcagattaggacttacaccactgccttccgcccccaccccccaccaattttcaggccttcagacttggactggaactacaccaccagctttcctgggcctccaacttgcagactgcagatcataagacatctcagccttcataaccatatgtgccaaccccttataataaatctctttctgtatatctatatattgcctattgattatttttcttagtagaaccctaattttccctgtggttttcctgaagtaattctgtaaaagtttgtattttttttcttctgtgaccattaaactctctgctcaggtagcttagtggttcattaatgattggatggaagtttmcttaaactcctggaattaataagtctaccaaactttgctgaggggctctgtgtgtgtatttgggcactctttcaatgctccagcatgtagtttaaaactcttgtgttagccttcacattctgcttttacagacactcaaggtcagccagcggtgaaagttcaggaccttctcaagtct

SEQ ID NO: 882429 - DNA, 669 bp, Homo sapiens
gaatacctgtcccaagaattctccctctgtaaatctttcattctaccaactaaggcagaattcagtcatcctcaatttctctttctatagattttccttgcatataacaagagaaaaaaaggaaagagaagtcatcaggaactttaggcctctaattctgtaaaggggctaccagaacaatatttttaaaacagaaaaaccaggtatcaagtgataagatatggtccctagggccagaggtctatgagaaagaagttggtgtgaacagggcagtttggctttcattcctcatctgccacgctgtgcaccaacrccaaggtccccatcagggcccatctcccgcccaacgctttctcactttggactaacttccatcccaatgagcaagcctggggtctttggcctattcctttatgaaccatgacacactttctccagaaaggcaagacagggaaggagacattagacaccatgagccccctacctctatagaggcactaacacagcagtgctgatgaaatgagagaggaaatccacaggaaccagaggcacagagcagcactgacctgtggagcagcaactactgtgaacaaggctatgaagttacctgttcctttgtccctgctgcttttactgtggagaaagctgttaacttgtgtctcaatcagg

SEQ ID NO: 882430 - DNA, 629 bp, Homo sapiens
ttctgttagatcaattaagataaaaatataaattttttattttactttcacttattctttttctaatattctttctttctttaaatacatccaagtttctgacaaatatttctttcattattcctgaggagcttcttttaactttatgagaccattcttctggtgacacacgttctcagttcttgtttgtctgacaaaatgtttatttcatcytcacttttgaaagataatttcataggatacagaagtttaagatgctggatttcttttctctcgatactttacatatttcattctaatttatttttacttctcagcaagtaagccattttttaaacttctgtatcttttttaaacttcttacatcttttccttatctttgattttctgcagtttaaatatgataagactaagtgtagctttttcttttattcctttttttttttttttggaatcatcctggttgattctcttagtgtcctgattgttgttaagtgtttgacattaatttcagaaaattctcagtcacttcaaatatttcttttttttctctttcttctccttatggtgttcccagtatgcatagttacatcttttgttgtcccactattgttagatattctgttcct

SEQ ID NO: 882431 - DNA, 632 bp, Homo sapiens
atgaacaacttgacttgctttccaatggagcccagcatttgaagctgtgataattgtcagtttaaatgttagtaagtgaatgcttgtaatttacaagtgaagctgcttctcttatcaagggtcccatttcctgtgggctgtttggaagtataaactgttatcagaggatttgtgcttatttgaggcttggcttgcccatctggtcagagagagaaagtctggagagtatgctgagtctaattctgctgtaccccatgacgagcctgtcctgttcaacattccacttgcggtccatgaatcaagcgctattcatgggcacagaacagaatgaaccaacctaaaccatttcgcttgcttgacattctctaaatcccactcccccctttaaacgcacaagctcagggcctgtttcaaagggcaaatattgtgaaaatgaagaaattrttacagattatacttggaaagagttcaaatgttgttgaaataccgtgatctgtaggtggcatgtcttcaaagagattcatttgaatagatcaggctgaggaacagtcaatagcaaaatagttatttgtgtatcaagtatggacaaattctcacataccaggaggctgcgagacagcactttcacaagc

SEQ ID NO: 882432 - DNA, 607 bp, Homo sapiens
gaaggccatgggtaaggcagatcagagcaaaaggttaataaattagttgtagacttgtttagtttgagacatctacttgatctccaaatggcgatatcaagttagcagttagataagtcggagaatggaaaataaatcttggctagaggtgattgagaattagtagtgggtaggtagtatttaaacccatgagacaggatgagattacaaatgtagtgaaagtagagaagaggttcaaagactttttcctggggcaccaaaagataagaagatgaagataaactgaacagtcctatatttattaaaggcattttcatattggaaagaagaaaaactgtcactattcacagatgacatcattatctacayagagagcccttaaaaaatctattaaaaaacctactagatcaaatggtatttctgtctttaggtctttgaggaatcgccacactgtcttccacaatggctgaactaatttacactcccaccaacagcgtataagcattcctttttctctgtaacctagccagcatgtaattttttgactttgtaacagtagccattctgactggtgttagatggtatctcattgtaccattagacccag

SEQ ID NO: 882433 - DNA, 607 bp, Homo sapiens
cctttattcacctctccttcagagctgaaaactgactgtagcacatctgtaatagtctttcttttgaatcacatagttctaacagtttcaaacaaggctactcatttgctgctctccagggaattttacaatagcggaaagttcagatctcccaaatttctgacctgctatgacttacacatttccataacctttattactggagtaccctccttctgagagtggcttctaatagtcttgttaattagaaccaaaatacatcagaggccttctagatatccaaccagagtgcagtgaaagtgttcagtcactgtataagcacagaaaaaaagaatgacaaggttcacttttgatgatacggggtgttattaataagacatgtttcctttttggtactagggtgctcmtggtgctgtaggtgcccctggtcctgctggagccacaggtgaccgggtaagcatgcattttcactaagccaacagcaatatctaaaatttcccgccttccctagtcccaaagagccccagcaattcatttttatggcttggtataaagcctacttatttaaaaacctagctattgtgatagagcagcaggaaacaaatgc

SEQ ID NO: 882434 - DNA, 676 bp, Homo sapiens
gttttctcaagtgtataacccataccacttaacccccaaaatgaatatagcattaagtaaaaatccacttcattttactctgtgagatgtgcgtcagttatctcttccaaggcaactaagactctgtctgtccaccactgttctctctccctcccagttctttgagcatctatgtcaggcacattaacagattcatctttggtcccattatagggcgaagctggggctgctggtcctgctggtcctgctggtcctcggggaagccctgtaagtaagaacctgggtcattttgtatactcacacctcacaatgtttagacattgatgaacctaggattgataacacatttttaaatcccttctcccacctagggtgaacgtggygaggtcggtcctgctggccccaacggatttgctggtccggctgtgagtatcacataatgaagattaatctgaaaacatcctaagttggggagtagagtgggtcggaataccagagctgtaactgtttatttccaacagggtgctgctggtcaaccgggtgctaaaggagaaagaggaggcaaagggcctaagggtgaaaacggtgttgttggtcccacaggccccgttggagctgctggcccagctgtaagttgaattcactggtggtccacacagcagctacccattagatc

SEQ ID NO: 882435 - DNA, 676 bp, Homo sapiens
gttttctcaagtgtataacccataccacttaacccccaaaatgaatatagcattaagtaaaaatccacttcattttactctgtgagatgtgcgtcagttatctcttccaaggcaactaagactctgtctgtccaccactgttctctctccctcccagttctttgagcatctatgtcaggcacattaacagattcatctttggtcccattatagggcgaagctggggctgctggtcctgctggtcctgctggtcctcggggaagccctgtaagtaagaacctgggtcattttgtatactcacacctcacaatgtttagacattgatgaacctaggattgataacacatttttaaatcccttctcccacctagggtgaacgtggcgaggtcggtcctgctggccccaayggatttgctggtccggctgtgagtatcacataatgaagattaatctgaaaacatcctaagttggggagtagagtgggtcggaataccagagctgtaactgtttatttccaacagggtgctgctggtcaaccgggtgctaaaggagaaagaggaggcaaagggcctaagggtgaaaacggtgttgttggtcccacaggccccgttggagctgctggcccagctgtaagttgaattcactggtggtccacacagcagctacccattagatc

SEQ ID NO: 882436 - DNA, 676 bp, Homo sapiens
gttttctcaagtgtataacccataccacttaacccccaaaatgaatatagcattaagtaaaaatccacttcattttactctgtgagatgtgcgtcagttatctcttccaaggcaactaagactctgtctgtccaccactgttctctctccctcccagttctttgagcatctatgtcaggcacattaacagattcatctttggtcccattatagggcgaagctggggctgctggtcctgctggtcctgctggtcctcggggaagccctgtaagtaagaacctgggtcattttgtatactcacacctcacaatgtttagacattgatgaacctaggattgataacacatttttaaatcccttctcccacctagggtgaacgtggcgaggtcggtcctgctggccccaacggatttgctggtcckgctgtgagtatcacataatgaagattaatctgaaaacatcctaagttggggagtagagtgggtcggaataccagagctgtaactgtttatttccaacagggtgctgctggtcaaccgggtgctaaaggagaaagaggaggcaaagggcctaagggtgaaaacggtgttgttggtcccacaggccccgttggagctgctggcccagctgtaagttgaattcactggtggtccacacagcagctacccattagatc

SEQ ID NO: 882437 - DNA, 605 bp, Homo sapiens
caagccaacctgtgttatcacctagggtcttacccataatactcagtattttttctctatttagggacctcctggcactccaggtcctcagggtcttcttggtgctcctggtattctgggtctccctggctcgagaggtgaacgtggtctaccwggtgttgctggtgctgtggtgagtgcttgacagtattctgactccattaacataagaaaagattttaaaagctgccacttcaaatgtgacagattgatcactgaataacttcacttaagatttttattcatggcattttctttatacagatcacatgtcacttatctaagaagctttaataccaccttacttagacacacactataaagacacagcttaattatgcagaatgatttttggttctttccacgcacttaggaacgatacaatctctaattgcgtttactcctctgcaatatgaaatgctggcatcatttatcctgtaggaagaatgaaactctggaagttctgaatcgttccattaaaccttatacgtgacaacaactagaaaccatctcatctccataaaatatatcaactttttgaattcatttcatttgggatactgaat

SEQ ID NO: 882438 - DNA, 686 bp, Homo sapiens
tttacctttgctctgtgatgttctgttttatattatgattggttttatatgtattttcttctgagtgatttataaactctttggtggaaagactgagtcttgtatatatttatattttttagtgaataaaacacagtgccttaaacatagtagacaacaagtcttctccaaattgtcaaatcaaaattaatatgctacaagatacagaattataaactcaatactgtctatacattaattactggacatctaccatctaccaaatatgttyggagacattttccaacatttaatggtactttctaatatttttgtggtttgaaattttaatattcaactattaaatatttgtggaatttattttttatttataaagtgagaaaatgacctaaagagatttatttctaaagagaacctaaagagaacctaaagagaaatttcagtaacatttttcaactgaaacttctccatgtatgtgcattatttttttcattggtatattagattcttatatataactattattatgttctcttctagttatttgtttacctccttgtggggacactacaatcgtggttttatattgtgttgttttatggaaatatggactattaatttttattctgaaaaggaaatacatttacaaagttcacaattcaaaaggatttatagtaaagttttcc

SEQ ID NO: 882439 - DNA, 607 bp, Homo sapiens
ttcagtttgttgtggttaatattattttatttgcatgcttttttggtataatgtgaggagagggtagagagctacaagtatatttatttggtcttcagatgtgggcaattaaattgtaataaatgctgccaaactactccactccccaatttccactcttataagcacttctgttttaaaaattacattggctgtttgtacatatttattcttccagataaattttagaatctaaaatcaaatctttaagttccataaacaattctgttgtggtgtcactattttaaaagcctcaacttttgctgttctcaaacatggatccgaggctttgggataaaagctagttgccatcctctgagtgtttcatgtgcttttacatttctgggcattcgcacaggctatgcctttagctgcaaataccattttyccccccaactgtgtcctggttctagaaaacccagttcaagagtcccctctccaagtttgtgaatttgtcttgacttccctcccccaaaactcctcctgagtcagcagcccctccctgtgctgtgttggcttcccaagaacacctctcctgggtgcttcacttgattgtcacaaccaccag

SEQ ID NO: 882440 - DNA, 588 bp, Homo sapiens
caagaagttctttgaaactaatgagaacaaagatatgacacaccagaatctctgggacacagctaaggcagaattaaaagggaaatttatagcactaaatgcccacattaaaagttagaaatatctggccaggtgtggtggctcacacctgtaatcccagcactttgggaggccgaggagggcagatcacaaggtcaggagatcgagaccatcctggcaaacacagtgaaaccccgtctctactaaaaatacaaaaaattagccagacgtggtggcgggtgcctgtagtcccagctattcgggaggctgaggcaggagaatcgcttgaacccgggaggtggaggttgcagtgagctgagatcaygtcactgcactccagcctggacaacagagagagactccgtctcaaaaaaaaagaaaaaaacattagaaagatctcaagttaacagcctagtgtcaaaactaaatatactagagaacaaaagcaaacaaaccccaaagctagcaaaagacacaaagtaaccaagaccacagctgaactgaaggtgttggagacatgaaaaacccttcaaaatattaacgaatcca

SEQ ID NO: 882441 - DNA, 624 bp, Homo sapiens
ttttgacctatgtaagaagatattttaaataatataaaagccaaagaaaattaaatccagtgatataaccctgagtgggtttgcagaattctgtgggaaaaaaatattataggtgaaatccaaactgaaacatgtwatgtacctgaaccataagattgcaagaccatttagtgagttgatatggtgactacagataagactgaatatgttctatcacagtaacagatatcagagtccctggtcaatatcttaggcgaatatgcatattccaaccatctaggggagtatcctcaaagactttgtggtaacactgttgtttcctttgtgggaaagcctacttttacccttaaaatatttaaagtaaacatagaaatatttaggtaattaaacccattagttaaaataagtttaagcatatttagtatttcaaaattgtgatgcgtactgttcagaagaatattgactattcaatgaaacttttttttaatgtaagctgtataaattgagtagttgagttcaccttttgagttttaaattcaaagtacttacggtatttatatgcactgtgactggaatatggaaaagaagttaaaatcgggccaggcacactggctcactcctacg

SEQ ID NO: 882442 - DNA, 624 bp, Homo sapiens
ttttgacctatgtaagaagatattttaaataatataaaagccaaagaaaattaaatccagtgatataaccctgagtgggtttgcagaattctgtgggaaaaaaatattataggtgaaatccaaactgaaacatgttatgtacctgarccataagattgcaagaccatttagtgagttgatatggtgactacagataagactgaatatgttctatcacagtaacagatatcagagtccctggtcaatatcttaggcgaatatgcatattccaaccatctaggggagtatcctcaaagactttgtggtaacactgttgtttcctttgtgggaaagcctacttttacccttaaaatatttaaagtaaacatagaaatatttaggtaattaaacccattagttaaaataagtttaagcatatttagtatttcaaaattgtgatgcgtactgttcagaagaatattgactattcaatgaaacttttttttaatgtaagctgtataaattgagtagttgagttcaccttttgagttttaaattcaaagtacttacggtatttatatgcactgtgactggaatatggaaaagaagttaaaatcgggccaggcacactggctcactcctacg

SEQ ID NO: 882443 - DNA, 599 bp, Homo sapiens
ggttttctcagttggaaattttccaggacataaggatgtgaatgcccatcttctcaaaagacatgctgtagatgccaacagatctgagcagcaggatggaatgtatcgaaataaatggcaggattatccagtgctggagcccttatttaagaagcccatattaattgagctgaatatagttggcattccaacaaatatatgctgaaaggaaaatagcaaaaacaacttaggggatatgttctctcacgtggttgataatttgtttcctaacattctgtcactgaacctggctggatatggaaaagtccattctactttcattctacttcagctactcagatcttagttgtaccctagaacttttcatgatggataattgtacccttctatacttttcatttaaaccatgtcactcaccaataattacctaycattttcagctaattgcctctagtgccttggctccaaacattctttgacccaactgtatttacacttttcctcattcctttatacccctaaaatttgcagtccccttcttacttagctaatattttacaatctctcccacaaacaccctcaaatggctttgcatctct

SEQ ID NO: 882444 - DNA, 637 bp, Homo sapiens
tccagtgattctattcccttcttttgctaatttcttggaaagtagccagaagactttactaccagggatgatttggaaagtcagcataagtgagaataatgaatacctattgcatactctattttattctaaacacagtctctgctaggctttgacctaccatgaagtggggaaacctttatggtcactctcacttctacacagtctctgtatattggtggtacacattgtgtgaaataccttctccatctagagattgcttcatttttttattataaaaacattacacaamatttgtttaaggtgtcatgtaaatatacttttagtgactgtcatttttggggtttcactctcagaggaaaatgaattatttatattaggtatttctgaatacctaatctgaatatgcttgcttttttaaaaaaaccagttctctgcaatgttcacccatccacctacctaaaatatgcaccacttaatcttttattcatgctgctccacagcgtgccgtaatcataacccacttgtggtagactcagacactgttgttgtatgaatgcctcatttatctctttctgtgcatatttatgtttcagttagctattttcattgcatgtagttccttccatagtgtggg

SEQ ID NO: 882445 - DNA, 617 bp, Homo sapiens
  misc_feature 539, 541, 547, 550, 551: n = A,T,C or G
tgatgtataccctcccctaattttttccccgactctacaaccatgctgtgatgttcctggctttgtgtgagttaacttacttgggagtacaagaaaagaaaagaggcttttcagcgtaggattatttgtttatttgtttgtttgtttgtttaagagataagatctcactctgttgcccgggcttragtgcagtgacgcaatcatagttcactgcagccttgaactcctgggcacaagcaatccaattctcccatcttggcctcctgagtagctggaactaaaggcatgtgccaccatgcccatcatgttgtttttccttgttaaaaccactgaagccatcttcctggtacccatgatgagatcgcttctctacttgtcttcttgttgcttattctatcatctctgcacctcctgctttccaagaattcactggctactagatagccttctgctattttctagtatccttatgtgctctcaaaatatgtgatacataagcaaaacactgttaaccatcacgaaagtttagattaacagcntntttctnttnntgtagttgcaatctttcctctctccttctaccattttttatttgttttaatgaaaagaggcttcta

SEQ ID NO: 882446 - DNA, 617 bp, Homo sapiens
  misc_feature 539, 541, 547, 550, 551: n = A,T,C or G
tgatgtataccctcccctaattttttccccgactctacaaccatgctgtgatgttcctggctttgtgtgagttaacttacttgggagtacaagaaaagaaaagaggcttttcagcgtaggattatttgtttatttgtttgtttgtttgtttaagagataagatctcactctgttgcccgggcttaagtgcagtgacgcaatcatagttcactgcagccttgaactcctgggcacaagcaatccaattctcccatcttggcctcctgagtagctggaactaaaggcatgtgccaccatgcccatcatgttgtttttccttgttaaaaccactgaagccatcttcctggtacccatgatgagatcgcttctctacttgtcttcttgttgcttattctatcatctctgcacctcctgctttccaagaattcactggctactagatagccttctgctattttctartatccttatgtgctctcaaaatatgtgatacataagcaaaacactgttaaccatcacgaaagtttagattaacagcntntttctnttnntgtagttgcaatctttcctctctccttctaccattttttatttgttttaatgaaaagaggcttcta

SEQ ID NO: 882447 - DNA, 617 bp, Homo sapiens
  misc_feature 539, 541, 547, 550, 551: n = A,T,C or G
tgatgtataccctcccctaattttttccccgactctacaaccatgctgtgatgttcctggctttgtgtgagttaacttacttgggagtacaagaaaagaaaagaggcttttcagcgtaggattatttgtttatttgtttgtttgtttgtttaagagataagatctcactctgttgcccgggcttaagtgcagtgacgcaatcatagttcactgcagccttgaactcctgggcacaagcaatccaattctcccatcttggcctcctgagtagctggaactaaaggcatgtgccaccatgcccatcatgttgtttttccttgttaaaaccactgaagccatcttcctggtacccatgatgagatcgcttctctacttgtcttcttgttgcttattctatcatctctgcacctcctgctttccaagaattcactggctactagatagccttctgctattttctagtatcctyatgtgctctcaaaatatgtgatacataagcaaaacactgttaaccatcacgaaagtttagattaacagcntntttctnttnntgtagttgcaatctttcctctctccttctaccattttttatttgttttaatgaaaagaggcttcta

SEQ ID NO: 882448 - DNA, 721 bp, Homo sapiens
agccaagtttatggctgaaaaatgacttagctctctaagctggtgcacctcaccaggctccttacacacttggaaaaaaacaaaaagagcctattcatgttttaccaatttctcaagacccatctgctcccactttttcctgacctgctcttgttccaatacccttgtgactcttgccttccttgtgactataaccttgggcctgtctctggaccttcgactggggtctggattttgcctcaagctttctgtaaaacactaagacttgcctccccatcatgacccacmactttggctccactgactccaccccacaatcccagcaatctcatctgaaccatggcccagccagttcaagccatggctgaacaaactccaacaaggaggagattcagatagaggcaaaaccaagtcaaagcccaggtcttctgaccctgaaaccaatgaactttctactactttctactgcctactccttgcctctgctttactgttagttttacattctgtattagccagtaaatctagcccctctccattatatgaagacagttttcacgtccctgtaccaccccaaccaattttcctgagccttctctcctctacatgaatcatccacagcttcttaaaactgacctcataattcatggtttccagaccttcagagggctcataaactcaatcatcatcctctttgaaagaaaaagtgataatactttgg

SEQ ID NO: 882449 - DNA, 721 bp, Homo sapiens
agccaagtttatggctgaaaaatgacttagctctctaagctggtgcacctcaccaggctccttacacacttggaaaaaaacaaaaagagcctattcatgttttaccaatttctcaagacccatctgctcccactttttcctgacctgctcttgttccaatacccttgtgactcttgccttccttgtgactataaccttgggcctgtctctggaccttcgactggggtctggattttgcctcaagctttctgtaaaacactaagacttgcctccccatcatgacccaccactttggctccactgactccaccccacaatcccagcaatctcatctgaaccatggcccagccagttcaagccatggctgaacaaactccaacaaggaggagattcagatagaggcaaaaccaagtcaaagcccaggtcttctgaccctgaaaccaatgaactttctactactttctactrcctactccttgcctctgctttactgttagttttacattctgtattagccagtaaatctagcccctctccattatatgaagacagttttcacgtccctgtaccaccccaaccaattttcctgagccttctctcctctacatgaatcatccacagcttcttaaaactgacctcataattcatggtttccagaccttcagagggctcataaactcaatcatcatcctctttgaaagaaaaagtgataatactttgg

SEQ ID NO: 882450 - DNA, 721 bp, Homo sapiens
agccaagtttatggctgaaaaatgacttagctctctaagctggtgcacctcaccaggctccttacacacttggaaaaaaacaaaaagagcctattcatgttttaccaatttctcaagacccatctgctcccactttttcctgacctgctcttgttccaatacccttgtgactcttgccttccttgtgactataaccttgggcctgtctctggaccttcgactggggtctggattttgcctcaagctttctgtaaaacactaagacttgcctccccatcatgacccaccactttggctccactgactccaccccacaatcccagcaatctcatctgaaccatggcccagccagttcaagccatggctgaacaaactccaacaaggaggagattcagatagaggcaaaaccaagtcaaagcccaggtcttctgaccctgaaaccaatgaactttctactactttctactgcytactccttgcctctgctttactgttagttttacattctgtattagccagtaaatctagcccctctccattatatgaagacagttttcacgtccctgtaccaccccaaccaattttcctgagccttctctcctctacatgaatcatccacagcttcttaaaactgacctcataattcatggtttccagaccttcagagggctcataaactcaatcatcatcctctttgaaagaaaaagtgataatactttgg

SEQ ID NO: 882451 - DNA, 560 bp, Homo sapiens
ggactttggggacttgggggaaagagtgggaatggagtgaaggataaaagactacaaatcgggtacagtgtaaactgctcaggtgatgggtgcaccaaaatctcagaaatcaccactaaagaacttattcatgtaaccaaacaccacctgttccctcaaaaacctgtggatataaaaaataaaaaaaagatgataatgtgagttttgtccttcattctattgatacggtgtattacttcaattgattctcatatgtttaaccaaccttgcatttctggaataaatcccactcattcattgtgttataattctttctatatgttactggattaattttgtaatatgttgagaattttgcatttatgtttataagggctgttggtctgtagttttttttccttaatatttcattgtstggctttggtataagaataaaactggacttttagaatgtgttgggaagtcttccctcagcttctatctttttttttttttggaagaatttttattaactcatctttaaatgttaggttaaattcactagtgaagccttctgggcc

SEQ ID NO: 882452 - DNA, 644 bp, Homo sapiens
gacagaaaatattcagaaataaaacaaatgaaaaataacaatacaacagtaaaaaatacaaacagaagaaaacaatacagtataacaactatttacatagcattcacattgtgttaggtattaaaagtaatctcaatatgatttgaagtattggtgaggatatgtgtaggttatatgcaagtactataccattctatatcacagacttgagcacccacgacttttggtatctgcagaggtcctggaactcatccctgtgaatactgagggatagctatatagtgtgcacaatctctaaagaagggaaaaagagaacayggacagtggtataagggattctatagccaggcttagaaatggcacactcttacttgtgctcacactccatccaacccgaccataagcagggttaagaaatgtagtctttctgtgtacccaggaagagaaaacaggattggtgaatatccagtccatcttggccacatgctgttccacagcttaccacattttacaacaatgaataccaatgagaaatcaacaaaccccaaaatattgtgctcactttctctccctactcttataccttaccttagccatccttgattctaatgattccaattagagttgagggctttaaatcaatg

SEQ ID NO: 882453 - DNA, 641 bp, Homo sapiens
ttccttatacctctgcattaagctcttaattcacaaattacttccattgttaagttattgagttcttaaacaaatatttggtcatgattttcatctactccacatcaaaatgttcatactgtgtaggctgtttgccttttttgtcctgctattttccaccattttgtgacatttttgtatggatctccttgttcsttttttattattagtcatccttgagtgagcagaaatcttcctagagcaggtatttgaaagaagtagtgtggaagaggggctggggctgtgttctgcgttagtagaaaatcccctaattcttagaaaaatcctttatgattcatggtcttgtgggagaaggttgtgaagcgggttttgtgaatgtgcttcatgtgcaatagagagtgactgagaggtggtttaacctttcttcttagctcacaaagaatggctgctacagagctgcttaacacccacagtttttcttctacatgctgcacatttacaaagatggagtatccgtgagttttctcactcattcctacctcccctgccattttaaagtatccaaggaagttggggagattccctcagctaaacagccacccagatcttattgttccaaacaaaaaattattagatttgcc

SEQ ID NO: 882454 - DNA, 636 bp, Homo sapiens
aaaaaccctatattctgattgtattttagttatggatcagaaatcagtacttgaaaatgctgacctttctttcttctttccggacatcagaagttaaatttaattaattaaatctttctgtatttagttaatacaattaagttgtattaattgtgttgatcataagtctccattcatggcacttcatcaacctcagaccatgatgggccttatttatttttaaagatctaataagtacctgtgaacccaccatccagcctaagaactatgaagaactcccatctgtctatgtgctcctcctcactccaggtaccctgcctttctactcctgcgtgagagaaaaccataattgtgaattttctggttaccatcccgttgctttttaatattttcctttgcttctcttgtagtttaattccatatgtatgtactcctaaaccaatacattgtttaatttggcttattgcattttaataaggatatcaatgtcaaatagtgttctggaatttgcttcatattgttagrctttatgctatatgtatccttgttgttttttggtaactgaaggccattgtttttcactgttatagaatattgcagtgtataaataatcatttatcttttctcctattgctg

SEQ ID NO: 882455 - DNA, 610 bp, Homo sapiens
atcctaccgctatgctactgggacagctggctctgccactgggctccctcctggatgaacactagggaggggtaaggaatgtgggtcagggtttggggagacctctggtgaagcaagagggaaggggaccttgtgtttctgggctctatttagtacacactagagtaacagcttttaaagttgaatacagctattctatagatatatgtctattaagtaaaaatgttcgccagtgtatacattttttgaaatgtcttttgtttcaaaatgtttaactgtttttattttggagaggcttatgattaatgcagctrtgaattaagaattgggagacaattgatcgccacgtctttagccttttgcatcttcagatgaacttggttttcagacaacccattgcagatcccgtcttgagttatccagagaagttttatttcagcagtccgatgctctattcttggagggcattttaggacaaaaattttcagtagtagccatgtactggggtgagcttcaagctaatgggagtcttagatgtagtggtatgctttcagtagacatcaaactaatgataaactctgcttagtaaaagaaaagttattctactgaa

SEQ ID NO: 882456 - DNA, 580 bp, Homo sapiens
cttcattgatttttttgaaaatggaaaaatgaaaaaaaaagtgctcagctaaatccaggaaagagatttaatacaactgtcttttaataatattaagtttcccagaatcaatattttctccccctcatattatactatgggttgctacacaccagttgctatgtaagggaatggaatcaatatagacttaccttctttggagactatttcaaagacctgcataatggtgcatagattaggaagaatgaaattgaattttaagtacactgacatgctgtcatcttcaaccgggagaatatagattgttccagggccygtgagacccaagggattcaggatgagaggtgtcagccatggatgaacccacagaaccccaaggatggcagctcctctaggattgtttaacaaatgccaaacacaggcatttgggccactcataatataatcttcaaacactctagggtgtacttcatggggggtgggggaatggtggtgtattctttacaaagtttagcatagtgatttttcaattatgccagagcaagtttgtgttaactcagactctgatgtggtggttcct

SEQ ID NO: 882457 - DNA, 584 bp, Homo sapiens
tgaccttctgggcctgtcttctttcacttagcataatgttctcaacattcatccatgctgtggcatggatcagtacaccttccttttctttttggccaaataatattcttacatcaagtttttaattgcagcatattctactgctgactcagractcacagaccctgatttatctacagatccccatcttccatgagcataagtcaatgattattttacgccatttagttcttttgaagcaatagtaactagattgtcattttatgacatcatgacctccccaaggggctttggggcttgctaacaggggaagacatgggaggagagctgagtaacagtcatgaaatgccaaaagtgacacacctcatatttcatgaaccatgactaatcacatagccaagctgaatttcaagggagtgaagacatgtaaccagcacttcaccagaaatagacaagaactggaaattggtgaacatcagtaacaaccacctccaaaaactgataaccacgtgcctcccaatatgggccgaactgtgtccctctgactgtcaattcatgtgctgaagacctgactcccaatgtga

SEQ ID NO: 882458 - DNA, 551 bp, Homo sapiens
ccccatatataaatacataataaacaaaatacatataaaatatgtatttatttctatgtattcccataaataaaatacatgtaaaatatatattttataattcccttgaataagaaaattctcaacttctacagatggatatggtaaataaagaaaacctatccaaataggagcattatttttgcaacctggtaaaaccagactgtttcttctccacatataggccagaaatgtggaaaacacttttctctcaccatcttccattaagagaaaagagagcttgtgctactacttgaaaaattaactgcttaatcttccactgaaattccggtcagcaaaattaatggggagtgggacaatktctatagaaaaactctgtggtgagtggttttgatttatagctggacatattaaatgtataagttatgctagaagccactctttactagacatatttcctaagtaaattagtatagtgacttgcacatgctatatttaaaattttcctttctttaaaaaatgttgcaagcctgttctttagcattacttga

SEQ ID NO: 882459 - DNA, 595 bp, Homo sapiens
ttcaaagtgactgaaaaggtcccaaaacttttcaacggcatttaaagcatttgtgtgtgagatacctgaaagtgtgtataagtcattttgttctatattcatttgtgtatattagtgttaattactgaacatgagttaagatcttataaatacggactagaaaattcggtcttgtttatgcatctgctcttgaccttgctagcatataaacggaaatgcagaagggaagctagcatttattgagcacctactatatgaacagcagtttatatatactttatctcattaaatcctcatggccttcaacctaatgagatagttatttcaaagacattttacagatgatgtaattgagttcatagcagttaagaaacmtcccaatggctacacagctaatgcatgctgaagagattacatggcaaagctgacttaaaggaaagcccgtgcgttatagtgattgcatgtcatcttccctacagtggctttacatgctccatgtttctcagacaggaggtggcacttcttaacagatgttcatccttagtcaacagtttgagaaaaatgacaattcaggaaaaggtgaatggcacttcag

SEQ ID NO: 882460 - DNA, 595 bp, Homo sapiens
ttcaaagtgactgaaaaggtcccaaaacttttcaacggcatttaaagcatttgtgtgtgagatacctgaaagtgtgtataagtcattttgttctatattcatttgtgtatattagtgttaattactgaacatgagttaagatcttataaatacggactagaaaattcggtcttgtttatgcatctgctcttgaccttgctagcatataaacggaaatgcagaagggaagctagcatttattgagcacctactatatgaacagcagtttatatatactttatctcattaaatcctcatggccttcaacctaatgagatagttatttcaaagacattttacagatgatgtaattgagttcatagcagttaagaaacatcccaatggctacacagctaatgcatgctgargagattacatggcaaagctgacttaaaggaaagcccgtgcgttatagtgattgcatgtcatcttccctacagtggctttacatgctccatgtttctcagacaggaggtggcacttcttaacagatgttcatccttagtcaacagtttgagaaaaatgacaattcaggaaaaggtgaatggcacttcag

SEQ ID NO: 882461 - DNA, 540 bp, Homo sapiens
caggatgtgatcagataactgatttagccctaatgatagttaatggcagtggctggaatttaatggggttgataatttcatgtaattggggggtcttcaaatgagggaatgctcctgagtggcactgcattagggctgctgtstgagtcaaacaggtgcttcctgtctgtgtttcccttctgcagctctgttaaggaggagattcgagaacttctaggaatattgcagagcttttgggtgtgtttccacttcactgtatggctctctttctgcgaggatgcaccaaaccaggtgatgtttcttagagggcgtgccaacctggtttagtttcagacaatgttttagtttaaatttatttttttcttttaaatttaataacccttaaccaatctaggtgactatttcaatggatctagcatagaacttggcaggtgataagtgtagaatgaactaattttaattgtaactgccatgtctacattagaacgttgtgatccaaggtgccgcttttgtaattatcatgatgatattaagctataa

SEQ ID NO: 882462 - DNA, 611 bp, Homo sapiens
attttgatgccttgaccaggatagataccttcatggaggaaaagagttgcctgtgaggtttagcttattaaatctatttgagatttgtctcatgacttccatcgttacctgtgcatgggtataatctctgagtacatagtcaggaccctcctgagtgagttttgttttgttgtaggtaggtcgtgtcaggaggtgagtggtaaatatcaccctgtctttgacaaaactcctacctatgtacctggaaaatatacatcttttggacagttgattgtcctcccataagaagatggacaagcttcttgaggatgcaggtcacaacttggaatcagatttgaatccaatttctttggccacttttatttatgtattgttgagcctgaagttgaggcatgcatccatttcttacactgcaggataggaagtgggatgtcaartggagtggctgtgatgatgaagtgagatcctgaatttaagacaattcctgacaggtggtaaatgcttttagggagacaattccccaaggtgcctcatggttctgcatgtcttataagaagaacagtaactacattttttgctggactatcttttcaagaatgtttgtttcgtgc

SEQ ID NO: 882463 - DNA, 592 bp, Homo sapiens
agtgtatcactcttttctttgttatgtgtcatttctgtgccttggtttagaaatgcttctctgccttggagttctaaaacaaatctctatttttcttccataaatgttaaatttagaaaaccttttcaaattcatctggaatttatttttttgtaactggaatgaaagaaagttgtttttttccaaatggatagtcagtcaacccagaaccattttttgaatagttcattctttccccactggtttatatgaccttctgccatatgtgaaatgcacatgcatatgttggtctgttgttaatctctctaatcagttcatctgagctattcctttacctctatttctttgctctrataagttgtaggttctcttgaattttctaagtaaataatcatatagcctacaaataatgacaattttatttcttcctttctgatgattatatcaattatttttttgccatgccatgtcatgctggctaggatctctggaacaatgtcatttagttttattttttttaatagagatgaagtctccctatattacccagtctggtcttgaaccgatgagctcaagtgatcttctcatcttg

SEQ ID NO: 882464 - DNA, 610 bp, Homo sapiens
agttttcttttttcttttttatgattcttataaatagagtataatttacacacattaaggctcaaagttttataagttttgataaacgtatatacctgcacaatcaccataccagtcagggcatagagcatttccatgacctcagaaacccccttgtgccacccttagcagcaagcattgttctgttttccagccttacaacttagctttgcttrctctccagcccagagaaatgaaaacgaaaaagttccactaaaaaaaacatgtataaggatgttaataccagcatttttcataatagtttcaaagtggaaataatctaagtgtttatcagtaggagaatcaataattacactctggtatgtctgtgtagtggaatactgctcatttgaaaggaattaagctattcatacacacaacatgggtgaagatcagatacaatgtaaattcattttataattagtaaaagaagttttagtacattttaattctgggatagccttcacttttgctttatgcatttctttaatggttaagttataataattacatactaatttaaaaagtttaaatgcaaaatgcagtaatcattgtgattaaatgttagtag

SEQ ID NO: 882465 - DNA, 565 bp, Homo sapiens
ccccatatataaatacataataaacaaaatacatataaaatatgtatttatttctatgtattcccataaataaaatacatgtaaaatatatattttataattcccttgaataagaaaattctcaacttctacagatggatatggtaaataaagaaaacctatccaaataggagcattatttttgcaacctggtaaaaccagactgtttcttctccacatataggccagaaatgtggaaaacacttttctctcaccatcttccattaagagaaaagagagcttgtgctactacttgaaaaattaactgcttaatcttccactgaaattccggtcagcaaaattaatggggagtgggacaatktctatagaaaaactctgtggtgagtggttttgatttatagctggacatattaaatgtataagttatgctagaagccactctttactagacatatttcctaagtaaattagtatagtgacttgcacatgctatatttaaaattttcctttctttaaaaaatgttgcaagcctgttctttagcattacttgaatcagattcttggg

SEQ ID NO: 882466 - DNA, 594 bp, Homo sapiens
tctgtttctgagtccaaccttcttagattccacatatgagtgagatcatgctgtgcagtgtttgtttttctgtgtctggcttgctttcacttagcataatgtcctccaggtccacccatgttgttgcaaatggcagaatcttcttcttgttaaagactgartaatatccctgtgtgtgcgtgcatgtgtgtgtgtgtttgtgtgtgtgtgtgtgtatcacattttcttcatccattcatccatcaatggacactaagcactaaggttgattccgtatcttggctattgtgaataatgctgcaataaacatatgagtccagatacctcttcaagatactgatttcatttcctttaaatatatgcccagaagtgggattgctggatcatatggtagttctatatttagtatcttgaggaatttccatactgtttttcataatgattgcagcaatctatattcccatcaacagtgtacaagggttccattttctacatggccttaccaacgtttgttatcacttatctttttgataatagatattctagcaggtgtgaggtggtatctcattgtggttttaatttgcattttcctga

SEQ ID NO: 882467 - DNA, 594 bp, Homo sapiens
tctgtttctgagtccaaccttcttagattccacatatgagtgagatcatgctgtgcagtgtttgtttttctgtgtctggcttgctttcacttagcataatgtcctccaggtccacccatgttgttgcaaatggcagaatcttcttcttgttaaagactgagtaatatccctgtgtgtgcgtgcatgtgtgtgtgtgtttgtgtgtgtgtgtgtgtatcacattttcttcatccattcatccatcaatggacactaagcactaaggttgattccgtatcttggctattgtgaataatgctgcaataaacatatgagtccagatacctcttcaagatactgatttcatttcctttaaatatatgcccagaagtgggattgctggatcatatggtagttctatatttagtatcttgaggaatttccatactgtttttcataatgattgyagcaatctatattcccatcaacagtgtacaagggttccattttctacatggccttaccaacgtttgttatcacttatctttttgataatagatattctagcaggtgtgaggtggtatctcattgtggttttaatttgcattttcctga

SEQ ID NO: 882468 - DNA, 577 bp, Homo sapiens
atatgcaaactgtcttcaatagaatgctctgtccagagtcacagtggagtccatcgcaacaaataaggtcagacagctcacagctacaactgggctcatgccttccaagtatcaaagtcataacaaacttcctctgtgtgagtccacaaggcattcttcctctgggggaatcactccctttccattgtcctgatactctctctctgtggggctgtagaggagtgcatggcttttgccctacttccaagccttctcagggaacacagcagggacaaagagctgaaggctcagccttggccatggcccatcaggcccactgcaggcttctcctgggagaagatccagagcctcgggctctgggctcccatatgcagggagaacctccgaccacagaaattggaaggagctaccactscctaggagacatcttcccttgagctttttcaagggctgaacaaacagagcccacacttgttcacggaatccatgggcctcagcacatcagagagaggagaagaaattgacccagagtgtaacccacccccaacttcgggccccaccaagaattgtcagtgat

SEQ ID NO: 882469 - DNA, 655 bp, Homo sapiens
cccaagggcagaactttgttacttaaacaccatcctgtttgcttctttcctcaggaactgtggctgcaccatctgtcttcatcttcccgccatctgatgagcagttgaaatctggaactgcctctgttgtgtgcctgctgaataacttctatcccagagaggccaaagtacagtggaaggtggataacgccctccaatcgggtaactcccaggagagtgtcacagagcaggacagcaaggacagcacctacagcctcagcagcaccctgacgctgagcaaagcagactacgagaaacacaaastctacgcctgcgaagtcacccatcagggcctgagctcgcccgtcacaaagagcttcaacaggggagagtgttagagggagaagtgcccccacctgctcctcagttccagcctgaccccctcccatcctttggcctctgaccctttttccacaggggacctacccctattgcggtcctccagctcatctttcacctcacccccctcctcctccttggctttaattatgctaatgttggaggagaatgaataaataaagtgaatctttgcacctgtggtttctctctttcctcatttaataattattatctgttgttttaccaactactcaatttctcttataagggactaaat

SEQ ID NO: 882470 - DNA, 640 bp, Homo sapiens
cattcattgcaacatgatataaaataacaacacaataaaagcaattaaataaacaaacaatagggaaatgtttaagttcatcatggtacttagacttaatggaatgtcatgccttatttacatttttaaacaggtactgagggactcctgtctgccaagggccgtattgagtactttccacaacstaatttaatccacactatactgtgagattaaaaacattcattaaaatgttgcaaaggttctataaagctgagagacaaatatattctataactcagcaatcccacttctagatgactgagtgtccccacccaccaaaaaactatgcaagaatgttcaaagcagctttatttacaaaagccaaaaattggaaatagcccgattgtccaacaatagaatgagttattaaactgtggtatgtttatacattagaatacccaatgaggagaattaacaagctacaactatacctactcacacagatgaatctcataaaaataatgttacataagagaaactcaatgcaaaagatatgttctgtatgttttcatccatataaagttcaaaaccaggtaaaaataaagttagaaatttggatggaaattactcttagctgggggtgggcgagttagtgcct

SEQ ID NO: 882471 - DNA, 588 bp, Homo sapiens
ctcttaaagaagaaatggtcaagtacttcatttcccaactgttttctatttttcttttcccaaaactattccaaaaagtttatggggctttgtgtttattgtttatgaggtaaacaaatatgagtttttactcccagatttttccaaattaaaaaggcagtgacaaatatccatttaaattaaaaatccaagccattattgacattggaacttgattctacatatgcattaaaaaaaagacctaacagggggaaacctacattgtgttcataactggggatatccaacagcatcagtatgtcaaatttccataaatgaatccatgtattcaatgycattcctttaaaaaatttcacggccttttcccacagaatttgacaagacggaaaaaaatcatttgaaagagtcaaggtaaagaacagccaaaatgtgattaaaagaaaggaatgcttgtctttctagacataaagatactctttaatcatagtaatcaaaggactgtatcattaaagctcaaagagaccaactgaactcagtggacaggcaagaaacagattcacacatttatgtcaagaccatgggggaaag

SEQ ID NO: 882472 - DNA, 588 bp, Homo sapiens
ctcttaaagaagaaatggtcaagtacttcatttcccaactgttttctatttttcttttcccaaaactattccaaaaagtttatggggctttgtgtttattgtttatgaggtaaacaaatatgagtttttactcccagatttttccaaattaaaaaggcagtgacaaatatccatttaaattaaaaatccaagccattattgacattggaacttgattctacatatgcattaaaaaaaagacctaacagggggaaacctacattgtgttcataactggggatatccaacagcatcagtatgtcaaatttccataaatgaatccatgtattcaatgccattcctttaaaaaatttcacggccttttcccacagaatttgacaagayggaaaaaaatcatttgaaagagtcaaggtaaagaacagccaaaatgtgattaaaagaaaggaatgcttgtctttctagacataaagatactctttaatcatagtaatcaaaggactgtatcattaaagctcaaagagaccaactgaactcagtggacaggcaagaaacagattcacacatttatgtcaagaccatgggggaaag

SEQ ID NO: 882473 - DNA, 583 bp, Homo sapiens
tccttcaatcctgtttattagcatatggaaaacacatttgaagataaccagatataaattcaaggccttgaatccaaagccgtcccaaactactgattccctgtgttcttccaggccctcagaagatgtcggttaaaggaaatcataaaaagtcaaactatagcctctgtgttatgtccccactaaagccagtatggccagactttactgtagctgagaggttcttgctcatggagtcttgaaatagagcttcccaacttcagcagagatgcctattatacaacattaaataaaagaygaatttaaatgaatcaagtcttgactcttcttccaccatcatgggttttacagaacagcattatccagggctccattcaaggtaattttgctttttcattgcttgacaaatgctttcccatttccctgcaccctagacaaattggtatttctcagcagctcttagaatgacaatggcagttttctcttcatcgttttttcatttcttcatcctctcgccatgagaggcactcatcaggggatctctaatcctacccatctcattacctcttcactctatttgtca

SEQ ID NO: 882474 - DNA, 584 bp, Homo sapiens
atgccagaagccaaagacaggccaaaagctaggcctcttgggccaaacagccaagctgtgaatgcaaaggacaagttattgaaggaaattaaaagtgctactccagtgaacacacaaacagtaagaaagtaaaacacttattgctgatagggagagtttgagtggtctggatagaagatcaaacmagccacaacattcccttaagccaaagcctaatccagagcaaggtcctaactgtctccaattctatgaagtctgagagaggtgaggaagctacagaaaacaagtctgaagctagcagagattggtcatgaggttcaaggaaagaagccatttccataatataaaatgtcaaggtgaagcagcaagtgctaatacagaagctgcagcaagttttccagaagagctggcaaagataatcaatgaagttgaccatattaaacaatagattttcgatagtgacaaaacagccttctattggaaggcgatgccatcaaggactgtcctagctagagaggagaagttagtgcctggcttcaaagcttcaatgaacaagctgaatctcttgttaggggctactgcag

SEQ ID NO: 882475 - DNA, 584 bp, Homo sapiens
atgccagaagccaaagacaggccaaaagctaggcctcttgggccaaacagccaagctgtgaatgcaaaggacaagttattgaaggaaattaaaagtgctactccagtgaacacacaaacagtaagaaagtaaaacacttattgctgatagggagagtttgagtggtctggatagaagatcaaaccagccacaacattcccttaagccaaagcctaatccagagcaaggtcctaactstctccaattctatgaagtctgagagaggtgaggaagctacagaaaacaagtctgaagctagcagagattggtcatgaggttcaaggaaagaagccatttccataatataaaatgtcaaggtgaagcagcaagtgctaatacagaagctgcagcaagttttccagaagagctggcaaagataatcaatgaagttgaccatattaaacaatagattttcgatagtgacaaaacagccttctattggaaggcgatgccatcaaggactgtcctagctagagaggagaagttagtgcctggcttcaaagcttcaatgaacaagctgaatctcttgttaggggctactgcag

SEQ ID NO: 882476 - DNA, 698 bp, Homo sapiens
aacggtgcctttgaacactaactttcagaaatagaagatagaaaatgtgcagtaaggcatcttgcttcagtaacacccaagggcacattctgtctacagttcctcactctgtcatctgtcctcacacgtaggctttctgcttatacactccaaattacaactacctaacagcttctaaaatgagtgtctggcttggaagatttttaaatgctatcagagaatgtctgtttcaggatttaacttgtccagtgcaaagaagtgaggctgggccacaagttgacccatcacttcacctgtaagagcaaattaattacccctcaacataagtgttatatttatgtgccaagtatggtcgataatgaggtctttaccgtgtagccatatttcaagccattgttcacttaagtaaacacattttaatcactgtcatttyattatttattcttgagtctactatacacctgtcagaacattttgtgtttgactaactgtcatctccttgtatctttcctgcatcatatataaaccactgtccacctccacatttttccctcttactgaagtcaagcactacacaagttcatggggacttagaggcaagtgtgacggctgaccaccccaatagtttgcaaagcctttcatctgctcctctgaaaacgcttttcacacattccttccatatatctctctgctgcaat

SEQ ID NO: 882477 - DNA, 698 bp, Homo sapiens
aacggtgcctttgaacactaactttcagaaatagaagatagaaaatgtgcagtaaggcatcttgcttcagtaacacccaagggcacattctgtctacagttcctcactctgtcatctgtcctcacacgtaggctttctgcttatacactccaaattacaactacctaacagcttctaaaatgagtgtctggcttggaagatttttaaatgctatcagagaatgtctgtttcaggatttaacttgtccagtgcaaagaagtgaggctgggccacaagttgacccatcacttcacctgtaagagcaaattaattacccctcaacataagtgttatatttatgtgccaagtatggtcgataatgaggtctttaccgtgtagccatatttcaagccattgttcacttaagtaaacacattttaatcactgtcatttcattatttattcttgagtctactatacacctgtcagaacattttgtgtttgactaactgtcatctccttgtatctttcctgcatcayatataaaccactgtccacctccacatttttccctcttactgaagtcaagcactacacaagttcatggggacttagaggcaagtgtgacggctgaccaccccaatagtttgcaaagcctttcatctgctcctctgaaaacgcttttcacacattccttccatatatctctctgctgcaat

SEQ ID NO: 882478 - DNA, 643 bp, Homo sapiens
acctttaagaatgaggtacagtgatcactccccttttacagaggagccactgaggcacagagttggcaaggttgctaagtggccaagtttggtttgaagccaacggtatggcttgagtgcccatggctcaaccactcaaccctacctcctctcccaaacactgtaagaacccaaatgtcaaatgcacctagggcaagtcctcgacagaaaggcatggggtgtgaaaagaatgtataattagaggatctgaccaaggcagggagaayaccactgaggaattaatgcaggagctgagagcggaaagcagggtagtgaagagaggagagaagagcatcgaggtaggagcaaaagcaagagatccgccaggataaagggcttggagagcaggaggactagaattcagcccatcaggacagagaacataggagggtggcaaacaggaggttatggccccaggcggacaagggaaagacaggaaggtgccaaccatgctggaccgggctaagacagctggggagccactgagggcatgctgcaggggagatcactgggctaatacttgtgagtccaaaagacttttctggctgtatctacacaatcatggcacagtcctcccaataggcaggccgacacaaaaccaacc

SEQ ID NO: 882479 - DNA, 643 bp, Homo sapiens
acctttaagaatgaggtacagtgatcactccccttttacagaggagccactgaggcacagagttggcaaggttgctaagtggccaagtttggtttgaagccaacggtatggcttgagtgcccatggctcaaccactcaaccctacctcctctcccaaacactgtaagaacccaaatgtcaaatgcacctagggcaagtcctcgacagaaaggcatggggtgtgaaaagaatgtataattagaggatctgaccaaggcagggagaataccactgaggaattaatgcaggagctgagagcggaaagcagggtagtgaagagaggagrgaagagcatcgaggtaggagcaaaagcaagagatccgccaggataaagggcttggagagcaggaggactagaattcagcccatcaggacagagaacataggagggtggcaaacaggaggttatggccccaggcggacaagggaaagacaggaaggtgccaaccatgctggaccgggctaagacagctggggagccactgagggcatgctgcaggggagatcactgggctaatacttgtgagtccaaaagacttttctggctgtatctacacaatcatggcacagtcctcccaataggcaggccgacacaaaaccaacc

SEQ ID NO: 882480 - DNA, 674 bp, Homo sapiens
aaaaactacagcattgacatactgattgctcataatatgccaggcactggataagcgccctatttcactaccaaacataattcttccaataatcagcagtaaccttatgcatcccacttacagatgaagaaatgagacaaaggaagttcacacagctaccaaaattgggaaccaggaattaacctcaggcagtgtgactgcacagccagggcccttccaaacaattggttaactaacctgggtcttttgctggccaatgtatcaggggaataatcctagccaacaaattcaagggaaaacggaaatcaagcaaatatgaatgaacttcatttactgaaacaaagtaggctttgatagggactgtgttaccatctctagacctaactatgattatgtcatttcttagtgcctcttgcggcaaagaaagtgcactttacataaaaaaacaatagaatgcatctggcaraagtatgagaagagtaacgatcatggtgatggtggtgatgatgatgatgatgacagcttcaagagcagcagggtaaggatgccactaaaatcaccaccatttatgtgccaggcattatgatacagtcattacatataacctttttctcccactatattgcatgctgcttcacttaccttgtaaaacattttagacataaaaggtgctc

SEQ ID NO: 882481 - DNA, 642 bp, Homo sapiens
catcacaattaaaagagctagagaggcagagaaaaaaatccaaaagccagcagaagacaagaaaataactaagatcagagcagaactgaaggagatagagacacaaaaaaaccctccaaaaataaaataaatgaagacaagagctggttttcttgaaaaaaataaaaaatagacagcaagctagattaataaagaagaaaagagagaagaatcaaatacacacaataaaaaaatgataatagggatatcaccactgacaccacagaaatacaaactaccataagtgartactataaacacctctatgcaaacaaactagaaaatctagaagaaatggataaattctgggacacataccccctcccaagactaaaccaggaaggagttgaatccttgtaatagcaccaataataagttctgaaattgaggcagtaattaacagtctactgaccaaaaaaagcccaaggccacatggattcacagccaaattctaccagaggtacaaagaggaactggtgtcattccttctgaaactattccaaacagttgaaaagcaggggactcctccctaagtcattttatgaagccagcatcaccctgatgccaaaaccaggaggagacacaatgaaaaaagaaactgta

SEQ ID NO: 882482 - DNA, 501 bp, Homo sapiens
ttcttaaaaggagacatttacataaccaacaaacatatgaaaaaaagctcaacatcactgatcatcagagaaatgcaaatcaaaaccataatgagataccatctgaagtcagtcagaatggtgagtactgaaaaaccaagaaacaacagatgctggtgaggctgtggagaaattagaatgcttttacactgttggtgggaatgtaaattaattcaacctctgtgggaagacagtatagtgattcctcaaggatctagaacagaaataccacttgacccagcaatcccattaccaggtatatgcccaaargaatataaatcattctactataaagacacatgcacacttatgtttagtgcagcgccatttacaatagcaaagactcagaaccaactcaaatgcccatcaatgatagactggataaagaaaacgtggtgcatatacaccatgggaatactatgcagacatataaaggaatgagatcatgtcctttgcagggac

SEQ ID NO: 882483 - DNA, 501 bp, Homo sapiens
ttcttaaaaggagacatttacataaccaacaaacatatgaaaaaaagctcaacatcactgatcatcagagaaatgcaaatcaaaaccataatgagataccatctgaagtcagtcagaatggtgagtactgaaaaaccaagaaacaacagatgctggtgaggctgtggagaaattagaatgcttttacactgttggtgggaatgtaaattaattcaacctctgtgggaagacagtatagtgattcctcaaggatctagaacagaaataccacttgacccagcaatcccattaccaggtatatgcccaaaggaatataaatcattctactataaagacacatgcacacttatgtttagtgcagcgycatttacaatagcaaagactcagaaccaactcaaatgcccatcaatgatagactggataaagaaaacgtggtgcatatacaccatgggaatactatgcagacatataaaggaatgagatcatgtcctttgcagggac

SEQ ID NO: 882484 - DNA, 548 bp, Homo sapiens
cttttcttgcctctcttccctcttcagcccacaaactccttgaggtctgagcatcattttgtccatggctttgggcagggtggctggcacagggtaggggtaccacaaataactgttggagtgtagccagccccttgtttagggaagagatgggtctaacagctgggcatgctggtcttgtgatctggatctgagatgccgccttgggtggtgggtagagggatgaccctgagccagccctgttgcaacagmtcctcctgaagatcccagatgctccaggtgccatctctaggttagctgtgctgtaggatcacagcagggggacaaattttcacgtgaaaagaacaatcacatcaagcaaaatgctcactcactgacagagatcaatgaagcagacagcaactcattgcaactgctcctgtcctgtcggtcgagaggagagtgcagcgtgacccaacagccctgctgctcccagccgcagacaagccatccttcttggctgctgttttcatcattttttaaaggactgttgagggtgggaggaagta

SEQ ID NO: 882485 - DNA, 548 bp, Homo sapiens
cttttcttgcctctcttccctcttcagcccacaaactccttgaggtctgagcatcattttgtccatggctttgggcagggtggctggcacagggtaggggtaccacaaataactgttggagtgtagccagccccttgtttagggaagagatgggtctaacagctgggcatgctggtcttgtgatctggatctgagatgccgccttgggtggtgggtagagggatgaccctgagccagccctgttgcaacagatcctcctgaagatcccagatgctccargtgccatctctaggttagctgtgctgtaggatcacagcagggggacaaattttcacgtgaaaagaacaatcacatcaagcaaaatgctcactcactgacagagatcaatgaagcagacagcaactcattgcaactgctcctgtcctgtcggtcgagaggagagtgcagcgtgacccaacagccctgctgctcccagccgcagacaagccatccttcttggctgctgttttcatcattttttaaaggactgttgagggtgggaggaagta

SEQ ID NO: 882486 - DNA, 631 bp, Homo sapiens
aatatgattcaacccaatactgagtgaagtgtcatcacttcccttttactgtctattggaaaattacagctatgttctaagaaatatgggtcattgtttctttatatattttggtccatttatttagccacatgtctcaagcatctactttatagttaaacaaaaattggtgtcctcttttagtaagtttattcttcctgtaaatggttttccaagctatcaagcaatatgatctcctatcctatgattttcaraaaagctgttgtttcattgttgaaatattatagctgtttagcaactttcctccccacattgtcagtacaaaatcactattatcaatttcaaaatatggttaacaaaatagtgctactgtcttagtctgctcgagctgccatggacaaaatattgtatattgggtagctgaaacaacaaaaattttctcacagttccagaggctgggatgttgaagatcaaggcactggcagaatcagttcctggtgagggctcttttcctgtcttgtagacagccaccttcttgctgtgtcctcatgttagaaagaaaaagagggagagcacatcctacagcgtctcttcttacaagggcattcatccctttatgggagccccatcc

SEQ ID NO: 882487 - DNA, 592 bp, Homo sapiens
acatgacccagcgatcccattagtgggtatatacccaaaggattataaatcatgctactataaagacacatgcacacgtatgtttattgcggcactattcacaataacaaagacttggaaccaacctaaatgtccatctatgatagactggattaagaaaatgtggcacatatacaccatggaataccatgcaaccataaaaaaggataagttcatgtcctttgcagggatgtgaatgaagctggaaaccataattctaagccaactatcacaagtacagaaaaccaaacaccacatgttctcatcataggtgggagttgaacaacgagaacwcatggacacagggtagggaacatcacacaccagggcctgtcggggggtagggggctgggggagggatagcattaggagaaatacctaatgtaaatgacaggttgatgggtgcagcaaaccaccatggcacatgtatacctacgtaacaaacctgcacgttctgcacatgtaccctagaacttaaagtataatgataataaaataacaattgttttacttttaaattcatttttagaccattttattttactagaatttt

SEQ ID NO: 882488 - DNA, 556 bp, Homo sapiens
atgctctttgtgcccacattctgctgggctggtctttgaatgtctagttttaacgggcgggaagccatagttcatgtatcaagtggctaccgcagcacaggtagcagccggggagatggaaagagatagaaatgaggcctgctagggcgagacagagggaacaacasaactgtgggttgatcagagactgaaattcagaaatgccctcagccctcatgaagtccacagccatggaggccaaatgcttcatgtcatcccctctcattgtccgaggcttcacttagggtttggaggtgggaaagaggtgtctccctgagctcaaaggctgtttttgggggcctgaaaccatacaggatgtacaataggagtgcaggtggtttggggccaacatcccaagtggagcgccaacatgctctctggttctgggaagatgtggaggaaaccctttggcaccaagcaaataaacaaacacacacccaaacaaaacaacatgaaaagccccatgctgaaaactttccacttgccaacatgtttttgtcgctgccaaaggtttagg

SEQ ID NO: 882489 - DNA, 556 bp, Homo sapiens
atgctctttgtgcccacattctgctgggctggtctttgaatgtctagttttaacgggcgggaagccatagttcatgtatcaagtggctaccgcagcacaggtagcagccggggagatggaaagagatagaaatgaggcctgctagggcgagacagagggaacaacagaactgtgggttgatcagagactgaaattcagaaatgccctcagccctcatgaagtccacagccatggaggccaaatgcttcatgtcatcccctctcattgtccgaggcttcacttagggtttggaggtgggaaagaggtgtctccctgagctcaaaggctgtttttgggggcctgaaaccatacasgatgtacaataggagtgcaggtggtttggggccaacatcccaagtggagcgccaacatgctctctggttctgggaagatgtggaggaaaccctttggcaccaagcaaataaacaaacacacacccaaacaaaacaacatgaaaagccccatgctgaaaactttccacttgccaacatgtttttgtcgctgccaaaggtttagg

SEQ ID NO: 882490 - DNA, 580 bp, Homo sapiens
tatctcagttgcagataacggcatagttcaaaagaatttgacattttgactatctggccactttgtgtctttctctctccagttctaatcactttaaatgacatggaggcttctagaagcccaagtaaaggggagctttaatttaagaaatcctctccatggcttccctygctcctgtctctgtatgcaggtttcccatcctccactcttttcaccttgagtggttctctctcccattcatcccttacccactccctttttctgagcaaaacttgggagctccatcagccccctccccacacgtcatgatgaaggtctagttgctggctcagcagatgaagtgtcccacctccttagaaggctggggtaggggtagtgatacagatacacagaactgaatactcttcaacctagtggaagagaacaggaccaagacaaagatctggttgttgcgaggggtctgtggtctagcgggttgctgccagaactctacctggggcgtgtatggtcacgttcacatcatactatatttgagactttagttcagagctgcccctataactttctcagtgctgatggg

SEQ ID NO: 882491 - DNA, 580 bp, Homo sapiens
tatctcagttgcagataacggcatagttcaaaagaatttgacattttgactatctggccactttgtgtctttctctctccagttctaatcactttaaatgacatggaggcttctagaagcccaagtaaaggggagctttaatttaagaaatcctctccatggcttcccttgctcctgtctctgtatgcaggtttcccatcctccactctyttcaccttgagtggttctctctcccattcatcccttacccactccctttttctgagcaaaacttgggagctccatcagccccctccccacacgtcatgatgaaggtctagttgctggctcagcagatgaagtgtcccacctccttagaaggctggggtaggggtagtgatacagatacacagaactgaatactcttcaacctagtggaagagaacaggaccaagacaaagatctggttgttgcgaggggtctgtggtctagcgggttgctgccagaactctacctggggcgtgtatggtcacgttcacatcatactatatttgagactttagttcagagctgcccctataactttctcagtgctgatggg

SEQ ID NO: 882492 - DNA, 602 bp, Homo sapiens
gatccacccaagaggatcgagtccccctgggaactttgcagtttcagccaatagtttctgccacgggagttttgtgcacgttagctcctggaacacttagaatagtcagtgatgtggggtgcatgtgtgggtcttaagcctcctccataaagcagatgttctcagcctcagtgctgttgatactggggtcagatcattctttgtggtgggggccctgttgctatccattgcacaatgttgagcagcatccttggcttctgcccactggttgtatagcgctcccccaccccacctccactatatccatccaaaatgtatcctgatattgccaaatgtgccccggggcggggggcrgggtacaatcactccctgttgggaaacacggctatagatgaagaaactaaaaccgagaaagtgtccgtggcacaagtaactgatgcaaagccacacctggaacccactaactacagaactttgaaggcaccttggcctttttctgtaactgcattctcagctgaagaggaatagctatgtagagttcagtttttgtagtcagattcctgggttcaaagctgggctccacacttaacttgctatctgtg

SEQ ID NO: 882493 - DNA, 637 bp, Homo sapiens
tggagatgactgaagcccgagtgacagtcacaggctgttcccgatcacgctggggtcacacgctctggtgagcacccagccggccagagctgtgctattggtttggcacaggtagaaagttgaccccgcacgtgccgtagaaggtcatttcgttcggttcatcagctatactcggactggctaaaggaagattttattgaaatcgtttcccatgaacacgtcaacttgtggggcaggaagggaaattttcttcccgtttgggattgaaaagatgaggcttaaccaaactcgttcttatgttcgttggtttgttttttctttctttctttcttttttttaaacagactctcactctgttgcccaggctggagtacagtggcgtgatctcggctcactgtaacttccacctcccaggttcaagcaattctgccaccycagcctccttagtagctgggattacaggcgcacgccaccacacctagctaatttttgtatttttagtagagatggggtttcaccatgttggccatgctggtctcaaactcctgaactcaagtgatccacccaccttagcttcccaaagtgcttgggattacatgagtgagccactgcgcctggcctaaacttgtttttaatc

SEQ ID NO: 882494 - DNA, 594 bp, Homo sapiens
ccataacccatgttatgaggccagcatcaccctcaaaccaaaacctggcagagatacaacaaaaaaagaaaatttcaggccaatatccctgatgaacatcaatgcggaaatcctccataaaatactggcaaaccaaattcagcagcacatcaaaaagcttatcaaccacaatcragtcagcttcatccctgggatgcaaggctggttcaacatacgcaaatcaataatcataatccataacataaacagaaccaatgacaaaaaccacatgattatctcaataaagaaaggccttagataaaattgaatatcccttcatgctaaaaaaaatctcaataaactaggtattgatggaacatatctgaaaatagtgagatatttatgacaaacccataggcaatatcatatgaaatgggcaaaatctggaagcattccctttgaaaaccagcacaagacaaggatgttctctctcaccactcctattcaacatagtattggaagttctggctggggcaatcaggcaagagaaagaaataaagcatattcaaataggaagagaggaagtctaattgtttctgtttgcatatgacataa

SEQ ID NO: 882495 - DNA, 597 bp, Homo sapiens
gtgttagaaacagccattggaactgctttcaggtttgttctttatccctttgatatgtcccttttactttatttatttcaacacttccttacctttggccactgcaaaatgctcctgacacaccttgtactttcactgccttagccctaaattcagcagttttcccaagatgctctaattcttttaaacatatttatggaagtaaaagtagattctcctttcagtaaatatggtaccatcatttgataggcatattattttaaaacttacctttagttaaaggattttccaagatttgtaaaggttaatttgcatttgttgagatactataacattttatcaatacacacatttattaggccataatgatttacattataaaacattttttaacttctaaagggattttttggcaatatgttcttctgaagaatttgttaaataatgsatataagatatttggcttgccatattttagtttctgtctgtacaattttttcttaatacatctatctcaaaaagtgaatgtatcagccaggatacaggaggttaggctgcagtaacacaaatccccaatgtcactgacttcaggcattt

SEQ ID NO: 882496 - DNA, 522 bp, Homo sapiens
aaatcttttcctacatgaaaatctcgttcaaaagagaaaaccagattttaccattgcatcagtgtattattaatactaaaactaattttaataaaaccttataaacaaatcaacccaacccctgtcagtttttgaatacataagattttcataaaccttttataacctcttaaaagttttttcccaaactttctatatttatttagttttatctatatcatttccccttcaatttgaaacatttacataacttctaaactagataaaattattttttctcaataaacaccacattctcatgsctttctttgaatcttccttaccaaaaacacacccaattttccttgtacactttgcatacaaaaggatttctcttttatatagtagttttaattacatacattaattataatgttaatgttggtaacccttatttttaggatgttgctaattttaattgttatgtaccagacgcagatcctgggaaagagacagggctgtgaattcctggagggtctgacc

SEQ ID NO: 882497 - DNA, 607 bp, Homo sapiens
ttttaaaaatatggttggtctttctttgtaatgaacacgaagacctgcacatttgaaaccccatgtttttcctgttccacaccatgaccgtgagtggtagcaccaggttctcctcaattcattctcaaaaggctactgtgtcccactctattgacctggctcttgtcaacatcatcactggcctccactttgccaccagttacttctctgtccttagctgttattcaaactctcagcagggttcaaaacagttggtcgcrctgtccttttatattttctcccacttcaaatactttcttctcaacttctcaattccagaatcctttgggtttcctgcagcctacctggctctgcctgctctgcttcctttgctagaccctgctcctctaccagaacttaaacaatagcacgcaccaggggcgtgccactggctctctgtccaccctatccacactgtcacttcaggtgttttcacacagtggtgattacctctgtgccagtcttagccaagtctatgtctctgttgagtcttagactcctgtacctgatggcctatctggcttgccccttgggtgtctagcagatacctcagatgttgcctgttcta

SEQ ID NO: 882498 - DNA, 607 bp, Homo sapiens
ttttaaaaatatggttggtctttctttgtaatgaacacgaagacctgcacatttgaaaccccatgtttttcctgttccacaccatgaccgtgagtggtagcaccaggttctcctcaattcattctcaaaaggctactgtgtcccactctattgacctggctcttgtcaacatcatcactggcctccactttgccaccagttacttctctgtccttagctgttattcaaactctcagcagggttcaaaacagttggtcgcactgtccttttatattttctcccacttcaaatactttcttctcaacttctcaattccagaatcctttgggtttcctgcagcctacctggctctgcctgctctgcttcctttgctagaccctgctcctctaccagaacttaaacaatagcacgcaccaggggcgtgccactggctctctgtccaccctatccacactgtcwcttcaggtgttttcacacagtggtgattacctctgtgccagtcttagccaagtctatgtctctgttgagtcttagactcctgtacctgatggcctatctggcttgccccttgggtgtctagcagatacctcagatgttgcctgttcta

SEQ ID NO: 882499 - DNA, 639 bp, Homo sapiens
gtgtggtaaatatacaccatggaatactatacaggcataaaaaagaatgacataatgcaggaacacggatggagctggaggccattatccttagcagactaatgcagggacagaatgctctcacttataagtggcagctaaatgatgagagctcatgaacaccaagaagggagcaacagacactggggcctacttgaggatgggaggaaggagaggatcagaaaaaataacattgggtactaggcttagtacttggttgatgaaataatctgtataacaaactctygtgacatgagtttacctacataacaaacctgcacatgtacaccagaacttaaaataaaagttaaaaaaaaatctatgatacaaactctcaacaaactagaagacaaagtgcctgctaaggagaattttttaaaattctgtaaaaacaaaaaaacaaaacaaaaacaacaacaacaaaaaaacagtgtacaaatgcaggaatcccctttaagaccagaaacaagctacacatttctgttttcacagctttccctcatcattgtactagagcaagggtgtccaatattttggcttccctgggccacactggaagaagaagaattgtcttaggtcacacataaaatacactaacac

SEQ ID NO: 882500 - DNA, 639 bp, Homo sapiens
gtgtggtaaatatacaccatggaatactatacaggcataaaaaagaatgacataatgcaggaacacggatggagctggaggccattatccttagcagactaatgcagggacagaatgctctcacttataagtggcagctaaatgatgagagctcatgaacaccaagaagggagcaacagacactggggcctacttgaggatgggaggaaggagaggatcagaaaaaataacattgggtactaggcttagtacttggttgatgaaataatctgtataacaaactctcgtgacatgagtttacctayataacaaacctgcacatgtacaccagaacttaaaataaaagttaaaaaaaaatctatgatacaaactctcaacaaactagaagacaaagtgcctgctaaggagaattttttaaaattctgtaaaaacaaaaaaacaaaacaaaaacaacaacaacaaaaaaacagtgtacaaatgcaggaatcccctttaagaccagaaacaagctacacatttctgttttcacagctttccctcatcattgtactagagcaagggtgtccaatattttggcttccctgggccacactggaagaagaagaattgtcttaggtcacacataaaatacactaacac

SEQ ID NO: 882501 - DNA, 603 bp, Homo sapiens
tagacgcatatagttggatcttgatgttgcttttttaaaagatccattctgccaatctgtttttggacggaggagtttaatccatttacatttaaagtaattcctgatagggaagggcttacgattttcattctgttgtttgttttctgttatactttttaccccttgttgcttccattatcccctttgtgtttagttgtgtttttttggtgacactttgattcctttctcattttttgtgtatattctatagatatttttctttgtgattaccatgctgattacgtataacatcctaagttatarcaatctactttaaactgataccattttaacttgaatcacatacaaaaccttactcctttacatcttcactccctgtatgttattgatgtcacaagttacacatttatatattgtgtacccaataacacaaatttatactttttatgctaatatggtttggctctgtgtcctcatgcaaatctcaagtcaaattgtaatccccacgtgtcaggagagggacctggtaaatcatggcggtggatttaatatgctgttttcatgatagtgagtgaggtttcatgagatctgatggtttaa

SEQ ID NO: 882502 - DNA, 631 bp, Homo sapiens
aaaattgagatgcataatttagttttcctcaatatactcagctagcaaaagacagactcaggattcaaactcaagtcaaagatgggactctttgagagaaagagagagaaggaggaggaggaagaggtggagagggaaggaagaaaggaggaaagcaggaagggaagaagaaatagagctcctggaaaaggaacaaaatcagaattatctgatggggcaaaaagattctacttgttgaatacaggtgatgttggccatgtggtttgmttgtgtgcacagcaccaacaggcatccatttgtgcagcactggccacctgcagtgaagcactgtctctagggactgcaggagagtaatcagatggctcctgaggttacttcccttagacggtattcacggagaaaagtaagtccctaatgtggggccagacacatcagatgtagaaaaggcatttgttgaaatttaacacccgttattttttaaaacatactttaaaaatctccaattttctatacagtcttacaaatcctaattttactcatttttccagctccaatccagtctaaaattctttttgaatctttttcttgaaatctggctttagatattgcaaaccctaatatactgctacat

SEQ ID NO: 882503 - DNA, 631 bp, Homo sapiens
aaaattgagatgcataatttagttttcctcaatatactcagctagcaaaagacagactcaggattcaaactcaagtcaaagatgggactctttgagagaaagagagagaaggaggaggaggaagaggtggagagggaaggaagaaaggaggaaagcaggaagggaagaagaaatagagctcctggaaaaggaacaaaatcagaattatctgatggggcaaaaagattctacttgttgaatacaggtgatgttggccatgtggtttgattgtgtgcacagcaccaacaggcatccatttstgcagcactggccacctgcagtgaagcactgtctctagggactgcaggagagtaatcagatggctcctgaggttacttcccttagacggtattcacggagaaaagtaagtccctaatgtggggccagacacatcagatgtagaaaaggcatttgttgaaatttaacacccgttattttttaaaacatactttaaaaatctccaattttctatacagtcttacaaatcctaattttactcatttttccagctccaatccagtctaaaattctttttgaatctttttcttgaaatctggctttagatattgcaaaccctaatatactgctacat

SEQ ID NO: 882504 - DNA, 672 bp, Homo sapiens
gaaagatcaggaattagaacttctcaaagaggagagtaattttgtgttttagcttttactaaattacctataagaggaaagagtaggcattaaaatatattacaaaggttgtcatctttcaagtttttgaacacatatattcagctatgttccttcagttgtttgaagtttattgtttctaggagttatcttgatttttccctaagcatccaataatttcatcttaaatcacgacatcaactacatttctaaagaccggaatgctttcagaattactttatatgcatgaagaatggttctacctcttttcttagataaactcagtgataataaacactgaaaaagccttcagaataaaaactgaaaaaaaaaagatacagtaagcccttcttgtgaagtaaaagagcattaatatgagacatttaaaaacgggccagataaagtrggtaaaattgatatgtccctgaatttaaaaaaaactgaaagtaaactgaccctgtaaaactcaagaaaactagaagacaacaaatataaatcaatttaaataagaagaaaaatgtgacaaatgtaaacaatcaggaaattagttaacaacaagaaaaatagaattgttgaatcaaaccaagaactggtatttcagaagacaaatctttcagaaatctcaccaagaaa

SEQ ID NO: 882505 - DNA, 597 bp, Homo sapiens
tgggtaaaattgatatgtccctgaatttaaaaaaaactgaaagtaaactgaccctgtaaaactcaagaaaactagaagacaacaaatataaatcaatttaaataagaagaaaaatgtgacaaatgtaaacaatcaggaaattagttaacaacaagaaaaatagaattgttgaatcaaaccaagaactggtatttcagaagacaaatctttcagaaatctcaccaagaaaaatagagaaaccataaacatcaagaatgagatgagagattgcacacagatatgaatggaatgaaagaaattataagtttgggggcagaaaagtggtaagtcaagaggaaataggtgattwtctaggaaaaaaataagttatcaaaattgatttaagaagaggtaaacacatgagtaaacttctaatgactaaagttattcaaacagccattactaaaaaggaacaaaggaaacgtggttttaaaagacaaatcttttgtagtcttcaagtaatacttagttcttatacattgtactatggtttgaatgtgttccctccaaaattcaggtattgatgcttgacggccaaagtaaagatattaagaggtg

SEQ ID NO: 882506 - DNA, 597 bp, Homo sapiens
tgggtaaaattgatatgtccctgaatttaaaaaaaactgaaagtaaactgaccctgtaaaactcaagaaaactagaagacaacaaatataaatcaatttaaataagaagaaaaatgtgacaaatgtaaacaatcaggaaattagttaacaacaagaaaaatagaattgttgaatcaaaccaagaactggtatttcagaagacaaatctttcagaaatctcaccaagaaaaatagagaaaccataaacatcaagaatgagatgagagattgcacacagatatgaatggaatgaaagaaattataagtttgggggcagaaaagtggtaagtcaagaggaaataggtgattatctaggaaaaaaataagttatcaaaattgatttaagaagaggtaaacacatgagtaaacttctaatgactaaagttattcaaacagccattacyaaaaaggaacaaaggaaacgtggttttaaaagacaaatcttttgtagtcttcaagtaatacttagttcttatacattgtactatggtttgaatgtgttccctccaaaattcaggtattgatgcttgacggccaaagtaaagatattaagaggtg

SEQ ID NO: 882507 - DNA, 651 bp, Homo sapiens
aatccgggcagcccagatgagtggatttcccctcagtgaagcacaccctctccaccaagagacaatcgaagtgcttcattaaacaggttctgttccctgtaccacccaactgggtgagaccctccaacaggggttgtcagataccttatacagaagcaatcctactggcatcagattggtgcccctcgaggtcagagatcytagaagaaggagcaagcacccatctttgctgttctccagtcttcttgagtgacagctcaggtgcaggagcaaaccagatgaatagggcctcaagtgaatccctagcaaaccacagcagccctacagaaaggggaccagaccattgaaagaaaaacaaacagaaagcaacaacagcatcatcaacaacaaaatgtccccacaaaagcccatccaagggtcagcagcctcaaatatcggaactagacaaactcatgaagatgagaaagaatcaacaaaaaaacacctgaaaacccaaaaggccagagtacctcttctcctccaaatgattgcaatgcctctccagcaagggcaaagaactggacagaggatgagatggatgaattgacagaagtaggcttcagaagatgggtaataaaaaactccactgagctaaaggagcatgttctaacc

SEQ ID NO: 882508 - DNA, 551 bp, Homo sapiens
aaaaaatggataaattcctggatgcatacaccctcccaagactaaaccaggaaaaagttgaatccctgaatagaccaataacaagttctgaaattggggcagtaattaatagactatcaaccaaaaaaaaaaaaaaaaagcccaggaccagatggattcacagctgaattctaccagaggtacaaagaggagctagtaccatttcttctgaaactattccaaacaattgaaaaggagggactcctccctaactcattttatgaagccagcgtcattctgtaccaaaaccrgacagagacacaacaaaaaaaagagaacttcaggccagttaacctgatgaacatcaatgtgaaaatcctcaataaaatactggcaaaccaaatccagcagcacatccagaaacttatccaccatgatcaagttggcttcatccctgagatgcaaagctggttcaatgtatgcaaatcaataaacataatccatcacataaacaaaaccaaagacaaaaaccacattattacctcaatggatgcagaaaaggcttttgaaaa

SEQ ID NO: 882509 - DNA, 631 bp, Homo sapiens
tcaaaatagtaagagctatttttgacaaacccacagccaatatcatattgaatgggcaaaagctggaaacattccctttgaaaactaatacaagacaaggatgtcctctctcacactcctattcacatagtattcaaagttctggccagggcaatcaggcaagagaaagaaataaatggtattcaaatagagagagaaagtcaaattgtctctstttgcagagacatgattctctagaaaactgcatcatctcagccccaaactccttaagctgataagcaacttcagcaaagtctcaggatacaaaatcaatgtgcaaaaattacaagtattcctttacaccaacaatacacaagcagagagtcaaatcatgaatgaactcccattcacaactgctacaaagagaataaagtacctaggaatacagctagcaagggacgtgaaagaccttttcagggagaagtagacacaaacaaatggaaaatattccatcctcatggataggaagaatcaatattatgaaaatggccttattgcccagagtaatttatagattcaatgttattcccatcaaactaccattgacatttttcacagaattagaaaaaaactaatttaaatttcatatgaa

SEQ ID NO: 882510 - DNA, 631 bp, Homo sapiens
tcaaaatagtaagagctatttttgacaaacccacagccaatatcatattgaatgggcaaaagctggaaacattccctttgaaaactaatacaagacaaggatgtcctctctcacactcctattcacatagtattcaaagttctggccagggcaatcaggcaagagaaagaaataaatggtattcaaatagagagagaaagtcaaattgtctctgtttgcagagacatgattctctagaaaactgcatcatctcagccccaaactccttaagctgataagcaacttcagcaaagtctcaggatacaaaatcaatgtgcaaaaattacaagtattcctttacaccaacaatacacaagcagagagtcaaatcatgaatgaactcccattcacaactgctacaaagagaataaagtacctaggaatacagctagcaagggacgtgaaagacctyttcagggagaagtagacacaaacaaatggaaaatattccatcctcatggataggaagaatcaatattatgaaaatggccttattgcccagagtaatttatagattcaatgttattcccatcaaactaccattgacatttttcacagaattagaaaaaaactaatttaaatttcatatgaa

SEQ ID NO: 882511 - DNA, 631 bp, Homo sapiens
tcaaaatagtaagagctatttttgacaaacccacagccaatatcatattgaatgggcaaaagctggaaacattccctttgaaaactaatacaagacaaggatgtcctctctcacactcctattcacatagtattcaaagttctggccagggcaatcaggcaagagaaagaaataaatggtattcaaatagagagagaaagtcaaattgtctctgtttgcagagacatgattctctagaaaactgcatcatctcagccccaaactccttaagctgataagcaacttcagcaaagtctcaggatacaaaatcaatgtgcaaaaattacaagtattcctttacaccaacaatacacaagcagagagtcaaatcatgaatgaactcccattcacaactgctacaaagagaataaagtacctaggaatacagctagcaagggacgtgaaagaccttttcarggagaagtagacacaaacaaatggaaaatattccatcctcatggataggaagaatcaatattatgaaaatggccttattgcccagagtaatttatagattcaatgttattcccatcaaactaccattgacatttttcacagaattagaaaaaaactaatttaaatttcatatgaa

SEQ ID NO: 882512 - DNA, 554 bp, Homo sapiens
ccccagtgtggtggtattgacaggttgggcctagtggaaggtttctgggtcatggaggtggacacctcatgaatggcttggtgcaattcttgttcttgagatgctggtttggttcttagtgtaattacttcccttgagagttcttataaagccaggcagtccctcaggtttggtgcctgcagaayttaaattaaataaaccccttttctttataaattgcccagcttcaggtgtttccttatagcaacacaaaatggacatgccctctgctagtctcaatttatgccaattactggaataaacaaatagcaagggagattaatcattgaacagtgcttagcctattttctgctgctataacagaataccacagactgggtaatttatacagaaaagagatttatttcttacagttctggaggtggggaagtccaaaatcattgtgccggcatgtagcaaacgtcatctcatggggcaagggtagaagcagaagtgaatgcatgagacagagagaggaaattgggctgaacttttccttttattgggattccact

SEQ ID NO: 882513 - DNA, 622 bp, Homo sapiens
ttccttttattgggattccactctcttaataacagtattaatgcattcattaccttcatgagccttcatgacttaatcatctcttaaaggtcccactttctgtaaattctgatacaatggcaagtatatttcaacacgaactctggaggggacactgaaacacagcacacagccaagcttctttgaccaagctgactacaggatgcccttgatggagagaccagggatcatcaccttcaagttcctggtccttcttcttgaactaaagactccttggctttgctcatgttggctttagccaccagttgctttacagcctcccacactcagtctctcagcttaggtatcagaagatacttccattttttwaaaattatttagctctctcatgacctcctgtcagcagatctacctcgcacctcatttccttaggctgatacctaatgatgctccaaccccacggaggggcatctagctaactggtactaaataacagtcacttaaaaggtagtttaaatttcacacattaagacatacatgtttgtgcaaggcagaggttttctttcttgttgactgtattttcaggttgtagttacagatacccattaacaagcctgccttc

SEQ ID NO: 882514 - DNA, 622 bp, Homo sapiens
ttccttttattgggattccactctcttaataacagtattaatgcattcattaccttcatgagccttcatgacttaatcatctcttaaaggtcccactttctgtaaattctgatacaatggcaagtatatttcaacacgaactctggaggggacactgaaacacagcacacagccaagcttctttgaccaagctgactacaggatgcccttgatggagagaccagggatcatcaccttcaagttcctggtccttcttcttgaactaaagactccttggctttgctcatgttggctttagccaccagttgctttacagcctcccacactcagtctctcagcttaggtatcagaagatacttccattttttawaaattatttagctctctcatgacctcctgtcagcagatctacctcgcacctcatttccttaggctgatacctaatgatgctccaaccccacggaggggcatctagctaactggtactaaataacagtcacttaaaaggtagtttaaatttcacacattaagacatacatgtttgtgcaaggcagaggttttctttcttgttgactgtattttcaggttgtagttacagatacccattaacaagcctgccttc

SEQ ID NO: 882515 - DNA, 661 bp, Homo sapiens
atttgacatgtgaaattacatgggaagcattgtctaacaagaaaggatggtttaaccttcttaagttatatcttaaagaatatgttattaatatatgttccaaagttatatgggatttctaaaatcctaatatgtctgggtatatgctatcggtcataattctggttattatgttgagttattgtaaaccacagaaataaccaaatttccttttcaattgtctttatgaccatttaaagtcatttccacagttaattccttaattctgatgcagtttctcaaaacttcacaagcacataaaatcctagaatatggtgtctttaaagagawtcatgaaaggatgggaagaaccctgacacatgctcttgaacacaagtttctaataactttaggaccacatcacttggattgggtaaaaattagtggaactctaatgaagagactggctggtttataaaactactgagccaggcaggaaataaactaattgaataccaagaaaatattttgccagatgttcctgctaaatcagctagtactgaaattgttaagatatgcaatttaaatgaactccatggtgaaagtcaaattacctatgataatctattggttatcagtgctatgcacctaaattggagaaacaatcagtatttaagaggat

SEQ ID NO: 882516 - DNA, 661 bp, Homo sapiens
atttgacatgtgaaattacatgggaagcattgtctaacaagaaaggatggtttaaccttcttaagttatatcttaaagaatatgttattaatatatgttccaaagttatatgggatttctaaaatcctaatatgtctgggtatatgctatcggtcataattctggttattatgttgagttattgtaaaccacagaaataaccaaatttccttttcaattgtctttatgaccatttaaagtcatttccacagttaattccttaattctgatgcagtttctcaaaacttcacaagcacataaaatcctagaatatggtgtctttaaagagattcatgaaaggatgggaagarccctgacacatgctcttgaacacaagtttctaataactttaggaccacatcacttggattgggtaaaaattagtggaactctaatgaagagactggctggtttataaaactactgagccaggcaggaaataaactaattgaataccaagaaaatattttgccagatgttcctgctaaatcagctagtactgaaattgttaagatatgcaatttaaatgaactccatggtgaaagtcaaattacctatgataatctattggttatcagtgctatgcacctaaattggagaaacaatcagtatttaagaggat

SEQ ID NO: 882517 - DNA, 648 bp, Homo sapiens
ttaaaagctttgtattaccactatttaaaaacatatctggctgggcctggtggctcatgcctgtaatcccagcactgtggcagaccaaggcaggcagatcacgtgaggtcaggagttcgagaccagcctgaccaatatggtgaaaccctgtctctactaaaaatacaaaaattagccgggcttggtggtgggtacctgtaatcccatctacctgggaggctgaggcgggagaatcgcttgaccctgggaggcagaggttgcagtgagctkagatcatgccactgcactccagcctgggtgacagagtgagactccatctcaaaaaaaaaaaaagaaaaaaaatatatgtatatgtcagaacacagatattcctgagaagcagctacctcccatgactcactctgtttggcattgctaattattcagctgactcttgcaagaatgagttgttgagctgagggccaagaccttgagaatagagcagggaagaggctgggagagctgtgcagcagggatggaagcctgtttgagcagagctgtttcgcagcatctccacccatggtttttgtttttctccatttgaaaggtcttttaaagcacaggtctatggacacacaagggaggaatctaatttgatggcatcacatg

SEQ ID NO: 882518 - DNA, 609 bp, Homo sapiens
aagttatgtataacttattaaagaaaaaattaaaactgcaatgtccaatattaaagaaatgctgacttggcatggtggctcatacctataattccaacattttgggaggctgaggtgggcagatcgcttgaggtcaggaggtcgagaccagcctggccaacatggcgaaaccctgtctctactaaaaatagaaaaattttctgggtgtggtggcaggcacttgtaatcccagctactcagaggctgaggcaggagaatctctggaacccaggaggtgaaggttactgtgagccgacattgcaacattgcactgcagcctgggtgacagagcgagactctgtctccaaaaaaaaaaaaaaaaaaaagattaaatagtcaatcatataatcgtrtaaatgccgtatgagataatgttgagcaaaaaattaagaagacaatattattagtaattgtatctgtgcactcactgttcaacaatgaacagaagataatttggagtgaaggagttatgtaattttcattagtttttttaccatctgtgaaaggaaaataaatattggggcccccaagtcactaagctaaagggaaaagtcaagctgggaactgctt

SEQ ID NO: 882519 - DNA, 612 bp, Homo sapiens
tcaacccacatttctcctgaagaatgttcttataattagggcacttgagctgtgttaaagtgtttcgctcctccagcggtcatattctactttaatttccttcttgcagtatactctccctccagaccgtaaaagatgttgtggtaaggaagtgacaaagaatgtgaggaaaatgaagaggatactcaaaagcaagatgcagaaacgacgattagatttaccctgtgttgatttccctactccatcgtatggagccgagtgtgctgggaaaggtgctttgtttgttgcccgggtggtgtgtgcgggttatgtgaggytggtccatgtcgtgacttgttccctggaacctggtggcagcagtgttttcataagcaccaccggcatgttgacagttgcgtggagttcagagtccatggaccctggggaccatgacgcccccgtgtgcaggtgacaacacgcctgctgaaggccacgcagtcaactggagaagccagggccggctgctgtgtctatgcaggatgcttctgctcctctgtcccagtgtgaggtgccatgacaacggtcaggcctctctcagtgcctcagcagccagcccagggcttggaatgcttt

SEQ ID NO: 882520 - DNA, 612 bp, Homo sapiens
tcaacccacatttctcctgaagaatgttcttataattagggcacttgagctgtgttaaagtgtttcgctcctccagcggtcatattctactttaatttccttcttgcagtatactctccctccagaccgtaaaagatgttgtggtaaggaagtgacaaagaatgtgaggaaaatgaagaggatactcaaaagcaagatgcagaaacgacgattagatttaccctgtgttgatttccctactccatcgtatggagccgagtgtgctgggaaaggtgctttgtttgttgcccgggtggtgtgtgcgggttatgtgaggttggtccaygtcgtgacttgttccctggaacctggtggcagcagtgttttcataagcaccaccggcatgttgacagttgcgtggagttcagagtccatggaccctggggaccatgacgcccccgtgtgcaggtgacaacacgcctgctgaaggccacgcagtcaactggagaagccagggccggctgctgtgtctatgcaggatgcttctgctcctctgtcccagtgtgaggtgccatgacaacggtcaggcctctctcagtgcctcagcagccagcccagggcttggaatgcttt

SEQ ID NO: 882521 - DNA, 612 bp, Homo sapiens
tcaacccacatttctcctgaagaatgttcttataattagggcacttgagctgtgttaaagtgtttcgctcctccagcggtcatattctactttaatttccttcttgcagtatactctccctccagaccgtaaaagatgttgtggtaaggaagtgacaaagaatgtgaggaaaatgaagaggatactcaaaagcaagatgcagaaacgacgattagatttaccctgtgttgatttccctactccatcgtatggagccgagtgtgctgggaaaggtgctttgtttgttgcccgggtggtgtgtgcgggttatgtgaggttggtccatgtcgtgacttgttccctggaacctggtggcagcagtgttttcataagcaccaccggcatgttgacagttgcgtggagttcagagtccatggaccctggggaccatgacrcccccgtgtgcaggtgacaacacgcctgctgaaggccacgcagtcaactggagaagccagggccggctgctgtgtctatgcaggatgcttctgctcctctgtcccagtgtgaggtgccatgacaacggtcaggcctctctcagtgcctcagcagccagcccagggcttggaatgcttt

SEQ ID NO: 882522 - DNA, 551 bp, Homo sapiens
tctgaggaattactatctatggcagttacggatgtatgaaatatatttcttaaatgagactcaaaagtttagatgactccatgggctgaagaatggttgttgtttcagccggcatgagaacaacattcattctccatcagagctcttgggtgaccaggtgcattgtcgatgagcagtaatattttgaaaggaatattttttgggcagtaggtctcaacagtgggcttaaaatattcagtaaaccatgctgtaaacagatgtgttgtcatccaggctttgttgttccgtttatagagcacaggtagagtagayttagtataattcttaaaggccctagtatttttggaatagtaaatgagcattaacttcaacttcaagtcaccagtggcattagcccctcacaagagactcagcctgtccttcgaagctttgaagccaggcattggcttctcctctctagctatgaaggtcttaggtggcatcttcttccaaaagctggctgcttcacctacactgaaaatctgttgtctagtgtagcctccttcatcact

SEQ ID NO: 882523 - DNA, 648 bp, Homo sapiens
tttatcccagcaccatttattgaatggggaattctttctccattgcttgtttttgttaggtttgtcaaagatcatatagttgtaggtgtgcagtcttatttctgagttctctattctgttccattggtctatgtgtctgtttttgtaccagtatcatgctatgttggttactgtagccctgtaaaatattaatagttcagaggtgggtagcatgatgcctccagctttgttctttctgcttagcattgccttggctatttgggctcttttttggttccatttgaattttaaaatagttttttttttctagttctgtgaataatctcagtggtagtttaacaagaatagcattgaatctataagttgctttgggcagaatggccatgttaatgatcttcctattcatgagcatggaatgtttttatgtttctttgtgtcatctctgatttctttgagcagtggtttgtagttctccctgtagagatctttygccacccgagttagctgtatttcttggtattttattctttttgtggcagttgtggatgggagtttattcatgatttggctcttggcttgactgttgttagtgtacaggaatgctagtgatttttgcacattgattttgtatcctgagactttgctgaa

SEQ ID NO: 882524 - DNA, 648 bp, Homo sapiens
tttatcccagcaccatttattgaatggggaattctttctccattgcttgtttttgttaggtttgtcaaagatcatatagttgtaggtgtgcagtcttatttctgagttctctattctgttccattggtctatgtgtctgtttttgtaccagtatcatgctatgttggttactgtagccctgtaaaatattaatagttcagaggtgggtagcatgatgcctccagctttgttctttctgcttagcattgccttggctatttgggctcttttttggttccatttgaattttaaaatagttttttttttctagttctgtgaataatctcagtggtagtttaacaagaatagcattgaatctataagttgctttgggcagaatggccatgttaatgatcttcctattcatgagcatggaatgtttttatgtttctttgtgtcatctctgatttctttgagcagtggtttgtagttctccctgtagagatcttttgycacccgagttagctgtatttcttggtattttattctttttgtggcagttgtggatgggagtttattcatgatttggctcttggcttgactgttgttagtgtacaggaatgctagtgatttttgcacattgattttgtatcctgagactttgctgaa

SEQ ID NO: 882525 - DNA, 566 bp, Homo sapiens
atagaagcaatcccttttctcagcagcctcgtaaggatctgttattttttgacttttgataataaccattctgactggtgtgagatggtatctcattgtagttttgatttgcatttctctaatgattagtgatgttgagcatttttcatatgcgtgttgatcacatgtacaccttttgctgaaaagtgtctgttaatgccctttgcccactttttcatggagttatctgttttctgcttgtaagtttaagttccttatagattctggatattagacctttgatgcatacacagtctgcaaatattttctcccattctgtagatcatccatttactctgttratagtttcgtttgctgtgcagaagctctttaattcggtctcatttgtcaatttttgattttgttgaaattgcttttggtatcttcatcatgaaatctttgcgaagtcatatgactaggatgatataatatttcctaggttatcttccaggggctttatagctttaggtttatatttaagtctttaatccatcttgagttgatttttgtatatgatataaggaagg

SEQ ID NO: 882526 - DNA, 615 bp, Homo sapiens
gacagtgggtgtggcccatggagggtgagctgaaccagggcggggcatcacctcacccaggaagcacaaggggtcgggggagttccctttcctagccaagggaagccatgacagactatacctggaaaatcaggacactgtcattcaaatactgggctttttcaacggtcttaggaaacagcacaccaggagattacatcccacgcctggctcggtgggtcccatgcccacaaagccttgctcactgctagcgcagcagtccaagatcraactgtgaggtggcagcctggctgggggaggggcctccaccattgctgaggcttgaataggtaaacaaagtggctggggaagctcgaactgggtgaagcccaccgcagctcaacaaggcctgcctgcctctgtagattccaccaccgggggcaaggcatagctgaacaaaaggcagcagaaacctctgcagacttaaacatccctgtctgacagctccaaagagagcagtaattctcacagcacggtgtttgagctctgagaacagacagactgcctcctcaagtgggtccttgactcctgtgtagcctaacagggagacacctcccagtaggggccaactgacac

SEQ ID NO: 882527 - DNA, 575 bp, Homo sapiens
agtatattataggaattaggcctgacacaatttggagagaagatggataagtgaaagtttgaaaagggtcagaaaacacaactctaaccagctctggtgaaggtggatgaactggactttgcattaagttttgcattaagttgggtatatccatgcactacatggaaccctgaaggggctggtgtaggaatctatggaagatggctgactctatgtgccaacagccctgtgagttctcagacaagtttggtagygggactgtagtccctcctggtcagcagggctggcagtcggtataaagagctggatgtgaagcaggggaaagtcagcataaattggaactcactggcacttttgatgctactcctcactgcctggagccagtgatgacttcagaactcagtggcagctgttttactttccccttacaaacttcatgcatttcttccctcatgttcaactctaacccagaaccatactaggaaaaaaagttatctgaaacacattccttgcttagctaggttgacacagtgataaaacaccacaggaatatccagatgctccttgacttgcag

SEQ ID NO: 882528 - DNA, 641 bp, Homo sapiens
cacgcttttctttttacccttgttgtgaaaaatctgtctgaagtttctaaatccctcttccctacttagcgtgaatctcctagggaggacttctatacaaatacccaggggtgggcttcccttgggggtcttggaaatgggatctccacccaagtgatctgggcctcccaggctgagcttttggtttcaaacttacttgtgccaagctaagggcatcaggatcgccgttcgtgtcatctttacaacaatcctgtgggtttagtgctattattatccccacacacttagggaggggaagtgactggcccaaagtcccgcagtcaacaagccaggcctcccaaccactcctctctgacaagaggctggcacttcttgccctgcctaccccscctgggttgcaaggaattgggggtttaggggcttcaggcctcctggctgctgtcttcccggggctacgctcattcttactgtccaagtgaggccaggggactggtcagagccctggggcctggggaggtttctcttccctgctcacctggctgggtgccgttttatggctatgctctgtctagggggatagcaggtgtgacccctcaacacgaggtcacagcccacacctgtttgggcagagcaaggcaggg

SEQ ID NO: 882529 - DNA, 564 bp, Homo sapiens
tcccctgccctcctcgctccatcccccagcaccaaaaaccactctgaagcccccatcccatcagagatggggaaaaaaaaaacacattttttcaggaggagaaggcagacagcccagctgagcctagaaaaaccggaggtgggggggtgtaatggatggggggagggtggtctacccgcccagtgctccgaggagggccagcaccacagggggccctggctgggcttcctttgtctccmacgcccgtcctcagagaagcagcctgtgagggggagaggcaaccccctacctgtccctagtcccaatggaatgacagcccagtcttcaatgtccaaggccatcacttctgcatcaaaatcaggagcccctagaagccacacacagctccagcaatcccattttactgatagggaagtggaggcaccaagagacacagggcccggcccaggatagagtccagatctcccagagcccagtccagcactgcctggcaccaactcagctggtctgtttggacaccttgggaccataggaggagagctgaccaccaagagagttaaagac

SEQ ID NO: 882530 - DNA, 564 bp, Homo sapiens
tcccctgccctcctcgctccatcccccagcaccaaaaaccactctgaagcccccatcccatcagagatggggaaaaaaaaaacacattttttcaggaggagaaggcagacagcccagctgagcctagaaaaaccggaggtgggggggtgtaatggatggggggagggtggtctacccgcccagtgctccgaggagggccagcaccacagggggccctggctgggcttcctttgtctcccacgccmgtcctcagagaagcagcctgtgagggggagaggcaaccccctacctgtccctagtcccaatggaatgacagcccagtcttcaatgtccaaggccatcacttctgcatcaaaatcaggagcccctagaagccacacacagctccagcaatcccattttactgatagggaagtggaggcaccaagagacacagggcccggcccaggatagagtccagatctcccagagcccagtccagcactgcctggcaccaactcagctggtctgtttggacaccttgggaccataggaggagagctgaccaccaagagagttaaagac

SEQ ID NO: 882531 - DNA, 629 bp, Homo sapiens
tcatttcagcctcaacctccagggctcaagcaatcctcttgtctcagcctcctaagtagctgggactacaggcatgcaccaccacactcagctaattgttttatttgttgtagagatgggagtctcaccatgttgcccaggttggtcttgaactcctggcctcaagtggtccccctacctcagcctcccaaagtgttgggattacaaatgtgaggcactgcacccaaccagaaaagtttttgaacctctccatacctctgtttcttcatttgtaactgagaggtactcatgcttcatagtctcattgtgaggcttaagtgagatcatgcatgtaagcacttagcattttgcctggcacataggaagccctaattgttagaaccaagagattgaaaggagagcagggttataatctttttttttcatcaaaataactggtttktattacattaagttatacctgtatatgtatgcatacatacacctatttgagtgctataatcttagaatgttcttgatattagtctgagtgtcaagttcttctataaactaggtggaaccaaattgaaggccagccacccgtcttggtaacaacattagtgtccaactaaagcatattaaagataagg

SEQ ID NO: 882532 - DNA, 653 bp, Homo sapiens
tgcagaccgttatgcatattaaagaagggggggtcggcaaatacaaaagaaaaataagagagacgagagagagagagaaagagagagagagagagagagaacgaacaaatcaggatgcttgagggaatccacgtggtcgccaatctgtaactgatcagagcagctacactgaagcaaaaaccccagcgcccaacgctaaatatattgcaatggagaaaccgtccacaatggggtgtctctgtccttarcagagccttggggctgccgtttaagaccctcctgctactcccacccttttagcatctagtaaaccacgcgctgtaacaacggaatcttgttctgtgtattgcgttgtgcgagtgtgcgctttgcaaaccatctgggccccatcctgcgcggttggaacgaagatcgattcgggacgagttgggggagttgaggcttgcctgtgtctcctccctttcattgctcctctccagcccccatcccatcgtccgctctgcacaaatgtttcgccagtggagggacgtaggttttcagcaccaggaggctgtggaccttctctggaggcgtgaagtgcaccctccggagggccagagctgagtgcaacctgctcacaacgaccctctccctccttcccaaattcgccgccc

SEQ ID NO: 882533 - DNA, 612 bp, Homo sapiens
aagctctattctaagttattaatatatgttgattaatataatccttataacagacctgatagctaagtgatgttattattcctttgcagataaaatatggagacagagagaggtcaggtaacttgccaaagctcacacagctagaaaatagaagagttaggattgaaacccagaaagtttggttccagagtccatgctattaatcattatgatatattgcttttcctgagtttggttacttttaagtaagaatgaggcacatgtcaatttcttttacatacmtgaatatttacttacatatagtaacctctcaaccactgaattcttaatatctcagccacatagctgggtagaccatgttcagatgtggcaagtgcatttttcttataggacctggagaaataagaaatgtaattttatcctaccattttcccttttgaggtggaagtgcagaatttgtaacacagaacagggatggacatgtgaggccacaatcaatgatactttgtaggtgatgttgtggcttcctgttgcgttatgtcaggaggcaaggttgtctcagtatggctgatactgaattttatcacttgcttagggtgatgactgtcggga

SEQ ID NO: 882534 - DNA, 612 bp, Homo sapiens
aagctctattctaagttattaatatatgttgattaatataatccttataacagacctgatagctaagtgatgttattattcctttgcagataaaatatggagacagagagaggtcaggtaacttgccaaagctcacacagctagaaaatagaagagttaggattgaaacccagaaagtttggttccagagtccatgctattaatcattatgatatattgcttttcctgagtttggttacttttaagtaagaatgaggcacatgtcaatttcttttacatacctgaayatttacttacatatagtaacctctcaaccactgaattcttaatatctcagccacatagctgggtagaccatgttcagatgtggcaagtgcatttttcttataggacctggagaaataagaaatgtaattttatcctaccattttcccttttgaggtggaagtgcagaatttgtaacacagaacagggatggacatgtgaggccacaatcaatgatactttgtaggtgatgttgtggcttcctgttgcgttatgtcaggaggcaaggttgtctcagtatggctgatactgaattttatcacttgcttagggtgatgactgtcggga

SEQ ID NO: 882535 - DNA, 588 bp, Homo sapiens
gtctttgaaacaattccatgtaaaaccccctatcaaaagaagcaaacgtgttcatagaagtcaagaaaattgcccatgatgtcacagttgataagtggcagagctgggatgcacacccaggccagccttatgacgatggcagcaatgctgtggtgctttggagcctgggatgccaagttaaggagttgctactttatccaatgggagctactttgagcaggaccatgccaaggttcaaagattgtgcttgggaagacatatcagacagtaatggggagaatagattaggagtcaggtttgaagcctattgcaatagtcccaatggtgtatcattaaacttctgaactggagagtggcggtaggactggcaaggggattcagagctgaggaattccagaggaagagtggggacaattaaggatgatcccaagctatgcacctgaatgactggmaggatgcggatttggaagtggctctgcatatgtgcatgccatgggaaagagtaggaatgaatgggtgggagtaccgcagccttaagtcctcaggagctccaaaccagggggcagcctaaatcctccccactctctt

SEQ ID NO: 882536 - DNA, 664 bp, Homo sapiens
ttgaggtcaaaatggtcacagtatccatcttagcatggtgacatcagagtgattttattttttaaaatttactagttttttaaatttaaatatttttaaatttaatttttttatatttaaaaggtatctgctaccttttaataataaacatgtactaccaatgtattcaataatttataaaaagaatatgatacaaattaagacccctaattttttttttgtttttttttttttttttggtgagattgggtctcgctctgtcacccaggccggagtgcagtggcacgatctcggctcactgcaacctctgcctcccaggttcaagaagttcttctgcctcagcctcctgaatagctgggmgcacaccatcacgctcggcaaatttttgtattttcagtaaagacggggtttcaccatattggccgggctggtcccgaactcctgacctcatgatctgcccgcctcggcctcccaaagtgctgggattacagacgtgagccaccatgcctggccgagttaattttttattaatgtttagactctccaactggaacatgcccccttaatgaaggaaataatacaggatacatctgtgaaccttgtctctcttccccggtacatgtgttcatgtgtatgcatgtgtggatggacatgaaacaaaagc

SEQ ID NO: 882537 - DNA, 650 bp, Homo sapiens
gaaatttgcaactaagactatataaaacatgcttgatgttttttgaaagagaagcatattcttgttttctctaatgacttggattttacagttcacactgaatgcaaataataagactctattaccttcaatgcaaggatcttcaattagtctaggaaactggtttctgtattagaaaaataygtgcatatctgttaagatgaacacatggcttaatgagggatcaacttgcctgtatattagagtttcagtaaaatgctcttggttttggaaacaaaggtttaagaggatacgttagctttatattcttacgtgggaacttattacctgacagacatcaagaagtgatgtcaagaatacctaaaagctatttaagtttaaatagtaatttaggtttattaaaaccatattagttatttaggtctaataccactgtttacagtgttcctgaaagattattacatagtccaaataatggatactgatggtcattgcatgctgaaatgacctgctggcttgtctgcttgactttgtcatcaatcaaggcaactgtggactctgctaaggccatgtcatgtaatccaatggaaaggtccagtcctatggccactgggcacaaggaatgtcagcccatcttggatgttgtcagt

SEQ ID NO: 882538 - DNA, 577 bp, Homo sapiens
tttaactatagtattaggagtaaaatatctgtggaaattactgtacagaaatcaattgtaaatcatggcaatttagaattactgtaacaaaagtccataggacaaagaagatgagagataagggatagagggatgcctatacaggaatcaaatagattctttaatggtgataaatcaattaatcaagatataaatactggaaaaaccaataaaaatataaccaagttaatttggggagtggcatacttagaatactttataatttcatctctggccatagtgggaagttgacactgtatttggaaaaagaagaaggctggctgcgcatggtagctcacacctgtaacctcagcacttcggaaagccaaggcgggaggattgcttgagccyaggagttcgagaccagcctgggcagtatggtgaaactccatctctaccaaaatatacaaagttagtcaggtgtggtggcacatgcctgtggtcccagctactcaggaggctgaagcgggaggattgcttgagcccgggagtttgaggctgtagtgagccacagttgcaccacggcaccccagcctgg

SEQ ID NO: 882539 - DNA, 608 bp, Homo sapiens
attgcaatgaaccattaagatactgccatgttttaattctctgcatagtatggagtaccattaggtgttttctggtttattcacttgttttatttgtttattgtttgtctctcctgactgagaagagagtcaatgaaggaaaggaccttgcagacctttttcattgttgtattcctcagtgtctagagtagtgcctggcatgaagcagatgttctgtaaatgaggattaaataaataaacacaaccaccaaatgaacctttatgcagcctggtttaccaagaatatctagtgatttgaggaaattctcaagacatatggttattaaaaaccgatttataattatgtgcaggcatatctaatatacaatgcacaatacatattctataatatataatgtaatgcaatatrtatgccccgtaataatagtatacacatattattatttccatgtgtgtgtgtctgtatgcgttctcacaaaagtaaaactcacagggttggtgggaaaagaagcttggggaagaccacaggaaacctatgcaactttgtaacaagggcaactaaaagccacttattggttcctggagagagaacttggacacctcagaca

SEQ ID NO: 882540 - DNA, 616 bp, Homo sapiens
gtagtacagtgaatataacctcagaagcaatgtccacaactcagtgaaatttttcaaagcatgacacagcttggccagagctccttaggaagccacaaggtcaactgttaatcatgaaaaaaattttaacacattcaaaagatataataaaatttacaattcaacccccaaatcaagtactaaaaagatcaatgagctgatacacatgtacagaattattagtgcatgttagatatcaggcaaattttgcttccttgacatcaagtgtaagcccatatttaatgcacrcagctccaaaggctggttccctaatatcggctccaaattgagaccacaaagtcttcttggatgaaagatttagaatgccctcaaatctaaagagtgcagacttaaaggtatactgccaaagaaaggtaatgatttctcagtctctcccacttcaaagccatacccaaaggctctggcaccttccccttcatcatccaggaatctccagatccacgtgcatgacctctgatgcggagcagcactcaatccataacagctccacgaacagggaatacatggatgagtcttcattaagatttaaacatgaaaagacatgttcccagccctt

SEQ ID NO: 882541 - DNA, 616 bp, Homo sapiens
gtagtacagtgaatataacctcagaagcaatgtccacaactcagtgaaatttttcaaagcatgacacagcttggccagagctccttaggaagccacaaggtcaactgttaatcatgaaaaaaattttaacacattcaaaagatataataaaatttacaattcaacccccaaatcaagtactaaaaagatcaatgagctgatacacatgtacagaattattagtgcatgttagatatcaggcaaattttgcttccttgacatcaagtgtaagcccatatttaatgcacgcagctccaaaggctggttccctaatatcrgctccaaattgagaccacaaagtcttcttggatgaaagatttagaatgccctcaaatctaaagagtgcagacttaaaggtatactgccaaagaaaggtaatgatttctcagtctctcccacttcaaagccatacccaaaggctctggcaccttccccttcatcatccaggaatctccagatccacgtgcatgacctctgatgcggagcagcactcaatccataacagctccacgaacagggaatacatggatgagtcttcattaagatttaaacatgaaaagacatgttcccagccctt

SEQ ID NO: 882542 - DNA, 616 bp, Homo sapiens
gtagtacagtgaatataacctcagaagcaatgtccacaactcagtgaaatttttcaaagcatgacacagcttggccagagctccttaggaagccacaaggtcaactgttaatcatgaaaaaaattttaacacattcaaaagatataataaaatttacaattcaacccccaaatcaagtactaaaaagatcaatgagctgatacacatgtacagaattattagtgcatgttagatatcaggcaaattttgcttccttgacatcaagtgtaagcccatatttaatgcacgcagctccaaaggctggttccctaatatcggctccaaattgagaccacaaagtcttcttggatgaaagatttagaatgccctcaaatctaaagagtgcagacttaaaggtatactgccaaagraaggtaatgatttctcagtctctcccacttcaaagccatacccaaaggctctggcaccttccccttcatcatccaggaatctccagatccacgtgcatgacctctgatgcggagcagcactcaatccataacagctccacgaacagggaatacatggatgagtcttcattaagatttaaacatgaaaagacatgttcccagccctt

SEQ ID NO: 882543 - DNA, 655 bp, Homo sapiens
tatagcttacacttttcctgtcttctgtgaacacaagttcatgatactgcatttaacaattgcctcaataaaggttaacttcaaagggattcatctatggtacaaacaaaatgctgctacgaggcactttacatttgcaaaatgttctggaaatgtacataaatagcaaagtgaaacagttaagatactgtttcagattctgtgaaccaagaggcrgttggagatctcttagatcaaagattttagaggaattttggacaattttgcaagtgatttcctaagatccagtctcttgactagttataaacaattgtgtgttcactgggcctcttgagggcagaagagcaaacattaagcacaaggctaaaagggtttccttggaaacctggtgtttctttaatacagcacaagtcccttaacacgtcacagattttccaggctcctcctgtgtgtctctgaaaaacctgctctttgaattgcacttaaataaacacagggaataattccacttttagatatcctctccggaaagttctatcattgccaacactccatttaacacatagggcttgtcatacaccaggctccaggccaggggttggatatagaatagtgagtggaggaaggcgtggtccctccttgactggagctcact

SEQ ID NO: 882544 - DNA, 618 bp, Homo sapiens
aagttgatgtagagacagctgtgatggttaatactgagtgtcaacttgattggattgaaggatacaaagtattgatcctgggtgtgtctgtgagggtgttgacaaaggagattaacatttgaggcagtgggctgcggaaggcagacccacccttaatttgktgggcacaatctaatcagctgccagcaaatattaagcaggcagaaaaacatgaaaacaaggactggcctagcctctcagcttacatctttctccctggctggatgcttcctgctctcgaacattagactccaagctcttcagttttgggactcgaactggctctccttgctcctcagcttgcagacagcctcttgtgagatcctatgattgtgtaagttaatacgtaataaactcccctatatatatacacacatatctatcctattagttctgtcctctagagaaccccaattaatacaacagtgaagagtggttttcagggccctggctctaccgctggactcctgtctatcttcctcctgtgtagctttactgccggcttcgcctctttgggcctcattgtcacaatctgtaaacagaggttttgggaaagtcaaatgagataccgtgtgcgac

SEQ ID NO: 882545 - DNA, 618 bp, Homo sapiens
aagttgatgtagagacagctgtgatggttaatactgagtgtcaacttgattggattgaaggatacaaagtattgatcctgggtgtgtctgtgagggtgttgacaaaggagattaacatttgaggcagtgggctgcggaaggcagacccacccttaatttgttgggcacaatctaatcagctgccagcaaatattaagcaggcagaaaaacatgaaaacaaggactggcctagcctctcagcttacatctttctccctggctggatgcttcctgctctcgaacattagamtccaagctcttcagttttgggactcgaactggctctccttgctcctcagcttgcagacagcctcttgtgagatcctatgattgtgtaagttaatacgtaataaactcccctatatatatacacacatatctatcctattagttctgtcctctagagaaccccaattaatacaacagtgaagagtggttttcagggccctggctctaccgctggactcctgtctatcttcctcctgtgtagctttactgccggcttcgcctctttgggcctcattgtcacaatctgtaaacagaggttttgggaaagtcaaatgagataccgtgtgcgac

SEQ ID NO: 882546 - DNA, 618 bp, Homo sapiens
aagttgatgtagagacagctgtgatggttaatactgagtgtcaacttgattggattgaaggatacaaagtattgatcctgggtgtgtctgtgagggtgttgacaaaggagattaacatttgaggcagtgggctgcggaaggcagacccacccttaatttgttgggcacaatctaatcagctgccagcaaatattaagcaggcagaaaaacatgaaaacaaggactggcctagcctctcagcttacatctttctccctggctggatgcttcctgctctcgaacattagactccaagctcttcagttttgggactcgaactggctctccttgctcctcagcttgcagacagcctmttgtgagatcctatgattgtgtaagttaatacgtaataaactcccctatatatatacacacatatctatcctattagttctgtcctctagagaaccccaattaatacaacagtgaagagtggttttcagggccctggctctaccgctggactcctgtctatcttcctcctgtgtagctttactgccggcttcgcctctttgggcctcattgtcacaatctgtaaacagaggttttgggaaagtcaaatgagataccgtgtgcgac

SEQ ID NO: 882547 - DNA, 618 bp, Homo sapiens
aagttgatgtagagacagctgtgatggttaatactgagtgtcaacttgattggattgaaggatacaaagtattgatcctgggtgtgtctgtgagggtgttgacaaaggagattaacatttgaggcagtgggctgcggaaggcagacccacccttaatttgttgggcacaatctaatcagctgccagcaaatattaagcaggcagaaaaacatgaaaacaaggactggcctagcctctcagcttacatctttctccctggctggatgcttcctgctctcgaacattagactccaagctcttcagttttgggactcgaactggctctccttgctcctcagcttgcagacagcctcttgtgagatcctatgattgtgtaagttaatacgtaataaactccccyatatatatacacacatatctatcctattagttctgtcctctagagaaccccaattaatacaacagtgaagagtggttttcagggccctggctctaccgctggactcctgtctatcttcctcctgtgtagctttactgccggcttcgcctctttgggcctcattgtcacaatctgtaaacagaggttttgggaaagtcaaatgagataccgtgtgcgac

SEQ ID NO: 882548 - DNA, 605 bp, Homo sapiens
gcaatgaaccattaagatactgccatgttttaattctctgcatagtatggagtaccattaggtgttttctggtttattcacttgttttatttgtttattgtttgtctctcctgactgagaagagagtcaatgaaggaaaggaccttgcagacctttttcattgttgtattcctcagtgtctagagtagtgcctggcatgaagcagatgttctgtaaatgaggattaaataaataaacacaaccaccaaatgaacctttatgcagcctggtttaccaagaatatctagtgatttgaggaaattctcaagacatatggttattaaaaaccgatttataattatgtgcaggcatatctaatatacaatgcacaatacatattctataatatataatgtaatgcaatatrtatgccccgtaataatagtatacacatattattatttccatgtgtgtgtgtctgtatgcgttctcacaaaagtaaaactcacagggttggtgggaaaagaagcttggggaagaccacaggaaacctatgcaactttgtaacaagggcaactaaaagccacttattggttcctggagagagaacttggacacctcagaca

SEQ ID NO: 882549 - DNA, 551 bp, Homo sapiens
aaataaaagccaaaggagattttaaaaaacatcctcaagaagcctgttcagagagcctgagtgaacatgggcaagaatcccatactcacttcctatacgtccagaaagaagcagaaaagaggctctggcatggtggctcacacctgtaatcccagcactttgggaagccaaggcaggtgaatcaaatgaggtcaaaagttcaagaccagcctggccaacatgatgaaacccagtccgtactaaaaaaaaaaaaaaaaaaaaaaaaaaaaaaaaaaaaattagctaggtgtggtggtgcatgcctgtagtctcagctactcaagaggctgaggcaggaraactgttggaacctgggaggtggaggctgcactgagctgagatctcgccactgcactccagcctgggcaacagagagagactctatatcaaagaaaaaaaaaaagaggccccaggagagcaggatcttggggtgggtagatgtgcactactcatgactaacacggtgaagaagtatccaacagcaatgaaggtgaagtccatactactgtaaa

SEQ ID NO: 882550 - DNA, 676 bp, Homo sapiens
tacctccagctaagaccctcccacaacacatgggaattctgggagatacaattcaagttgagatttggtgggggggcacagccaaaccatatcattctacccttggcccctccaaaatctcatgtcctcacatttcaaaaacaatcatgccttcccaacagtcccccaaagtcttaactcatttcagtattaacccaaagttcacagtccaaagtctcatctgagacaaggcaagtcccttctgcctatgagcctgtgcaatcaaagcctagctacttcctagatacaatgggggtacaggcattggggaaatatagccattccaaatgggagaaattasccaaaacaaaggggctacaggccccatgaaagcccacaatccagcagggcagtcaaatcttaaagttccaaaatgatctcctttgactccatgtcttgcatccaggtcatgctgatgcaacagatgcattcccatggtcttgggcagttccacccctgaggctttccagggtacaaccttcattccagctgctttcatgggctggtgttgaatgtctgtgacttttgtaggcacatgatgcaaactgtcagtggatctaccattctggggtctggaggacagtagccctcttctcacagttccactaggtggtgccccagtagggactctgtgtgg

SEQ ID NO: 882551 - DNA, 674 bp, Homo sapiens
agatggcttcactgttgcctcctttcatccccgtcactaatctgtgaaaaggcagccctcacattaagacactttcctgaagtggcagcgacagctcagtgagggctgctgtgctgcactgggtcggggctgacgttcccaacctcactgctaatgagaagacttgaaagattactgacatgttcatgttcatggaggtggccggaagtaattaagcactcttcaataaagggctaccttggcaagttcaagatttgaatgggaaaagggtgatggctgggctgggtgcacatgttacctgcatctccaagaccctgtccttcttggcgtctttccctgcttatcagaccagttctgggcactgataacaccacagagcatttgctcaatctctaycacctgatatcctgaaaagggagtggaggcctttttgcagacttctgggctcccacagcccttgtgctgcagcatgctgcctgccttctcttctgtcatcaatgaaatatggtggagggagctatgctgctgatgcagcttggaggctgtaagggaccagagtcaaatgggccatcgagggctggctacacagttactgggctggccatgtgatagagagtgcagaccactaaaaggcacatagcagaagaatactgagtaacacagaaaaaaatcaa

SEQ ID NO: 882552 - DNA, 610 bp, Homo sapiens
ctgctcaacatcactaactattagggaaatgccaattaaaaccacaatgagatacgaccttcccctagccagaatggccattattaaaaagttaacaaacaatagatgttggcatggatgtattgaaaaaggaacacttacacactgctggtgggaatgtaaattagcacaatctctacagaaaacagtatggaggtttctcaaataactaaaagtagatctaccatttaatccagcaatcgcactactgggtatctatccaaaggaaaagaagtcactatatcaaaagacacctgcatgtctatgtttatcacagcacaattcacaattgcaaagatatggaatcaacctaagtgtccattaactgatgaatggacaaagatgttttatatatatatatatatatatatatatatatatawaatcttgaaattttatatatataaagatgttatatatagattaatcttgtatatcttgtgtgtatatatatatgttagatatatatcatcttgaaattttcacatgcatatatatatatatatatatatacacacacacacacccccacacacatcgtgaagtactactaagccataaaaataatgaa

SEQ ID NO: 882553 - DNA, 592 bp, Homo sapiens
tgggttttggagctgtgaaaggaaattaaattttgggaccccaaattcgtttagccaaagagaaaagtcaagctgggaactgggtcacgcaaatctgcctccaccttttggttcctaaacaagatggctacaagatgaaaagctacacgcttccctcatattttgcccacaaggaaattcctggtgagctgttaaagcttccccatggcaatgcaacttgatagcctatctttacaggtgcagtcgctctgcccaccagacacaaatgtataactgaacgttcccctcyccattttgtctgtggtatgtaaaatgcacattccccacagttttcctctgccccttttgtttatgtgaaagctgtgtgcttctcaatatctcatcctttcccctttaaatttggagccctcaaaatcaccttcggagaaaggaatagacctgtctcctgggagcatcctcaactttggcaaataaatatcctaaaatgattgagacttgtctcattattttcctcgattgacagagctattttttttttttttaacataaagtcattccctgggcctcaaacagttcctggttgggggaaggg

SEQ ID NO: 882554 - DNA, 588 bp, Homo sapiens
tcctcactgaatgcaatcatttctagcttttgatttaaagtgagagatgtgcaatgaatgattcctcctctcactgaaacaccggagactgttgtggggccattcattggcctaatttcaatattgttatgtcttaggaagtagggaagctgagaaatggtcaatattgttgtcttaggaaatagggaagctgagaaatggagactgggaaatggttggttagtagagtggtcagaacacacacaacatttatcgattaagtttgccatctcatatggctacwgaacaattataatagtaacattataatagtaacaccagagattactgattaccaatcaccataacagacataataataatgataaagtttcaaatgttgcaagaattaccaaaatgtgacatacagacacgaagtgggcacacactgttggaaaaaatggtccccatagacttgctcgatgcaggattgccacaaaccttcaacttgtaaaaaatgcgatatctgggaagcacaataaagcaaagtgtggccgggcatggtggctcactcctgtaatctcggcactttgggaggccaagtggggt

SEQ ID NO: 882555 - DNA, 558 bp, Homo sapiens
aatataaatctttaacttcagacagttacttttgcaatgtggatgaatattgtaatggtagattaatgtatagtactcttggagaatcataaacatcacagaatgtctgtgtttgatatacattagagaacactagcagcttatttcatagatgaagagtgtgagccttaatgggaatttggtgacttgaatagaagttcaaaataagactgaagcttacagtttagatgtaatgagattactgccagttttctrcaagttagcctaccctattttaatttttttgaataagtactaccatactctgcttaattttaaaacgttgcaatggcgtcccaaaataatgatagatttaatgctaaatagaatagatgggcaaagaaaaccacatttctaaaactaaaacaaacattatgaaaagctatttcatggctctttagaaaaactttgatacatagctttgagacatattttttaaaaaaccatttattgaaataagaaatactaaaaatattatatgaatacaataaagcaaaagctcacggacgttagtcctca

SEQ ID NO: 882556 - DNA, 674 bp, Homo sapiens
agtaattccttctgaattaatacaccttaaaaatagctgcagcttctcaaatctgtgagaatcgtatgtgctgcttgctacactttcctttttcctgaaggcctctttgaggtctttcaagaactcaattcaattcagcaacaattagggggtctaaggtatacagacgctgtgcaagatgctcctgagacacaaagaggaggtcaagcccctgccttcaggcacctctctataatataggaggagaaagagaagaaacactaatacacataggtaggtgccattaaaagggtgcatacattaaagccaggtggtaggtgyaagaagatttgtaacgtgagaattttctgcatgtttgaaatatcttataatttttaaaaattaaaatgggagatacatatatatgtatttatgtatgtatatatgtatgtacatatacacacatatatacataaatatatacataaatatgtatatatgtgtatatagacataaatatgtatatatgtgtatatatacataaatatgtatatatgtgtatatagacataaatatgtatatatgtgtatatagacataaatatgtatatatgtgtatatagacataaatatgtatatgtgtatatagacataaatatgtatatatgtgtatatagacataaatatgtatatatg

SEQ ID NO: 882557 - DNA, 674 bp, Homo sapiens
agtaattccttctgaattaatacaccttaaaaatagctgcagcttctcaaatctgtgagaatcgtatgtgctgcttgctacactttcctttttcctgaaggcctctttgaggtctttcaagaactcaattcaattcagcaacaattagggggtctaaggtatacagacgctgtgcaagatgctcctgagacacaaagaggaggtcaagcccctgccttcaggcacctctctataatataggaggagaaagagaagaaacactaatacacataggtaggtgccattaaaagggtgcatacattaaagccaggtggtaggtgcaagaagatttgtaacrtgagaattttctgcatgtttgaaatatcttataatttttaaaaattaaaatgggagatacatatatatgtatttatgtatgtatatatgtatgtacatatacacacatatatacataaatatatacataaatatgtatatatgtgtatatagacataaatatgtatatatgtgtatatatacataaatatgtatatatgtgtatatagacataaatatgtatatatgtgtatatagacataaatatgtatatatgtgtatatagacataaatatgtatatgtgtatatagacataaatatgtatatatgtgtatatagacataaatatgtatatatg

SEQ ID NO: 882558 - DNA, 704 bp, Homo sapiens
ctggagctagctgtaccagctcatgagggccaattgtttcatttttaggaattttgtttgctggttaaaaatagtcattatttaaaattaaattatgtaaacaataatattagataaaataagttaaaataaaaacaaaggaactaattatccccaaactcttccccacctaattattttactatctgtgccttgggattatttacattgattttatccatatggtgacaatactattcatatataaatggtgtgcttctcttcataactctacatagcctgatgtcaggctagtagcttgaaattggccacagtgggagtgtgagcatttgtaccatgaggcttggccaaggctacaaatccagacttttgtttttccctcctggagagctgtctgttaaaaatttaccaacacaccactggtcttacctttgttaatttaccacagtccaggttctgacctagacttagaaacctggatttgtcagcaagctgaggatagagccattatttytaagaaggactcacattacccaagtgcaaagcctgatatataccttcagaatatcaatttattaatttacagtgaagaaagccaccccagggcattccccaggggaaggcaaaaagagctagttgcacattttgaatgtttgatgacattagggtaaggtgacacagaatatccatttccacaactgaga

SEQ ID NO: 882559 - DNA, 588 bp, Homo sapiens
agaagaaagaagaaatgccttgtgtcagatatcctagttcatcattcttaagtttggccttccataaagcccttgggcagggacacgcttcaaccaaattatttgccaatttataggaagaatggcctttactcaaaatttcaataccttgtttttcagttctatctgagatctcatcagaatggcctttactggccatatctctattagcattctggtcaccaccatttaaccaattcctaaggagttacaaacttcccttagttttcttgccttctaagcyctcaccagaatccaggctttttctagcctgctccctcagcttccatcctctgcccattacccagttccaaagccacttccacattttcaggtgttcactatcatcaacaccccactcctggtaccaattttctgtcttagttcgtattgcttataacagaatgcctgaaactgggtaatttataaagaaaagtaatttatttcttacagttatggaggttgagaagtccaaggtcaaggggctgcattttgttgaaaggtccttttgctagtgagggactctgtaaagtcctgaggtggtgcagg

SEQ ID NO: 882560 - DNA, 693 bp, Homo sapiens
ttgctgctgtatcctaaagtgtcacgtaagtgtgctgaggtgtaggtctatattcttctgttgtgctagatatttgatgggccccttcagtttggaaaatcatgtcctttgaatctgagaaagcttcttggattctttgagcatgctcttccctccatgtgatctcacctccatctggatatcctttaagccagatgttagactccatgggctagtcctctaaattaaaaaatgtcttatatctccaattttctttctttaattattttctgcttacaaatatgtttartagtagcatttctttatgttaaagaaaaacaaagttcaaatgcccaaccataattatgttaaacacttggtatgcatatgaataaagacaaagggctgctgagcaaatctgaatttaaatagaggtgttgtaggtataattaaccgtaacttattttttgaataagtaagaataaagtcactggctgcaaaggattattagagatgtattttccaaaattcatttatctggactccctctccccacctctaccccctgccaactgagcagacctcccactattaaaccaaaatgactactcaccctcaccccccagcagttataatacacaacatcactgccccaccagatcaggggaacagggcatttggcctgtggctctgcaatctttatcctaatcttgt

SEQ ID NO: 882561 - DNA, 593 bp, Homo sapiens
gggggggggggagggggcgggggcctgtttctggtccagccctcaactttgaaagcctgaaatttaaatcttttatgtctgttcaagtcttggttttctcttccagaatgcagtgtaccaagtggcctccttcattgcctgcattttgaatgcagtcaggctgcacagtggaatggaaatccctggccaagatatacctcttaaaagaaaataatctcttcctctgtgtgtatgcctgcgtctacatatgtattgtggggaccagaatataccaccccaaaatataaatgactgttgaactgaaggcaattaagaagaagtagktacaggaaagagctctcctctccctttatttgcctaaaagtaggacacaggtttataaggacaaaaggaatcctgccctgccttcttctcctatgggagaacaaaggttaaccacggaagacaaccttgggcactgatgaccctggagatgataccagaggcatctccacgagcaagcttccctaactcgcctttatttaccattatgtgtcttcctgcaagctgctgccctggagaacccaagtccttttctttgtcttgttacttcc

SEQ ID NO: 882562 - DNA, 616 bp, Homo sapiens
gtatgtcttaatcagcagcatggaaacagactaatacaaggtctgtaggggaagtgctgagctctcctaccatttccttcttcctgtagttttgaagctttggtcaactgatatgcatagattaattcatagtattgggaataatacggaatgaacatagtagctgacatttattgaatgcttacaatgttgttggagctgttctgagcacgttctatgtacaaactttcttgattttctcagccaytctatgaagccaggtatcagttagggcttggtggggcttgcttaggataatgggaggtcacatattcttggagctccaaagtgcacaattctcagaaggttgcttggaaactgctgcaaatttccacatctgtctggtgctgatgctcaaacagctaccttccactgatctccaggccaactccagaaagcccatgacagcttctcattggcagaacttccctggaacccactggtatagaaagatggaatgtgagtctccaggccttaccctgtggattaggggagcattttgaaggcagataccccactgaatgtcaacacatagcatctggcacatggagaaactgctattatttccattgtacag

SEQ ID NO: 882563 - DNA, 624 bp, Homo sapiens
ttgggatcctggtggaggtcctgcctctatggctccattagatattaccctggtaaggactctgcagcagctctgaccctacagttacatacagcattgctctagtggaaactctttgtggtggcaaccccccctgtgacaagtccctgcctgggcccccaagcttttgatgacatccttagaaatctgggtggaggctgccaatcctctacaactcttgctttctgcaaacctgagaattagcaccacatgcatgctgccaagagcctgcagaattagcgctacatgtayactgacatgtgtattccttccagagctgtgccacaagccatacctagggtctcttgagcctaactagggcagttgtggagcaccgttctggagtgcaggaaacagagtcctctggtggccttgggcactgagcctatggagggtgcccttggtctagctcctgaaaccattctgccatcttaggcctctgggcctgtgatgagagaggcagcctcaagatctttaaaatgccttcaggatctcttttttctgctatcttgaggaaaagcacctggctcccttctattcatactaatatgtttagcaaatggtctctgagctacacccttgatt

SEQ ID NO: 882564 - DNA, 637 bp, Homo sapiens
tcccaggtcgacttcagactgctatgctggcagtgagaatttcaagccagtggttattagcttgctgggcgctgggggagtgggacccactgagcgagaccacttggctccctggcttcagccccctttccaggggagtgaatggttctgtcttgctggggttccaggtgccactggcctatgaaaaaaaaaattgcagctagctcggtgtctgcccaaacagccacccagttttgtgcttgaaacccagcaccctagtggtgtargcacacaagggaatctcctggtctgtgggttgcaaaaaccatgggaaaagcatagtatctggtccagatagcacagtccctggtccggatagcacagtccctcacggctccccttggctagaggagggaggtccccagctccttgcacttcccaggtgaaccaacaacccaccccacttctgctcaccctccatgagctgcacctactttctaaccagtcccaatgagatgaactgggtacctcagttggaaatgcagaaatcacccgccttctgcattggtctcactgggagctgcagaccagagctgttcctattcagccatctttcccaggaacttccagtattctttatttcaaatagtaatttctg

SEQ ID NO: 882565 - DNA, 660 bp, Homo sapiens
ttagaaggcatggggaatggtcaaggcaagtactgtttggtgggtcatatgtgtgtactgagtcatgaggtaaaaggaatttactgtggttccaaagagcttaaaagccactgactcagaaggagagctgtgtagtcagtcatgcacaaatattacagacgccracacccaatgcttagagctccatcatttaccccatccttgccatttgactttaatcagctttcttaaaccactaagcctccgtttcttcaaacagaaaataagttactcaataatgaagcccaggactgtccggagggcaaaataaaccaaatatatatgaaagcaattttcacaatagaaagaactttgccaatgttaatagctgtcaccttaaatccatgcctttgcacaatctgaacattggttctagaattaaaagcttcattctctgtggaaggaatttcaagcactgttagaaggagaaacctgagccactgaaaagctctggattcatccatggggatacaagggtttctggtaagtttacaaagaaagagtttaggagatgtctttgtagtcagtgctcttaagaaagcaaattataatatcgccccttagaaacccatttcacagtggccattcatgtataagtattgtgccggttacaaatattct

SEQ ID NO: 882566 - DNA, 551 bp, Homo sapiens
gaaggtgtcctggctaagccgctctccctaataccagagccaggcacagtacctgctattgttggtaggggactctgttctctgcaggaaccatctcctcctgcagaagccaaggggcaccccattctcttgataccacagagcctgcctcccttagccttttcttgttcactcagctcctgggtgaaacccctgtgtggcactgaatggtatatggtgtcctcctcccaacctgtcaatttyacctgttcagtgttggggtgtcctgtgtttgaccaggctcaaaatcctgggcagggaatccctcctttgcctacaaggtgaagaggtgatgatgttcagaacacagccccacgccaggttccagtctgttctcctggattctggctcctgcctgtggcctcactctctcccacttcaagtccctcccctcttcctcactgcctccccgtggactttaaatcccagcaccagacacaaagacgacagccttgcagagaccatttaactagcttccatcattatgtggcatcaaatccctataatcatat

SEQ ID NO: 882567 - DNA, 644 bp, Homo sapiens
gcctcccttagccttttcttgttcactcagctcctgggtgaaacccctgtgtggcactgaatggtatatggtgtcctcctcccaacctgtcaatttcacctgttcagtgttggggtgtcctgtgtttgaccaggctcaaaatcctgggcagggaatccctcctttgcctacaaggtgaagaggtgatgatgttcagaacacagccccacgccaggttccagtctgttctcctggattctggctcctgcctgtggcctcactctctcccamttcaagtccctcccctcttcctcactgcctccccgtggactttaaatcccagcaccagacacaaagacgacagccttgcagagaccatttaactagcttccatcattatgtggcatcaaatccctataatcatatcataaggtatcaaatcccatatcataagggatttattataagggaatgtgacctcacacagggatggaagctggttaaacagtcaaggatggaagccggttaaatagtctctctctgtctctcggtctctatcactctgatggttttgttgctcagatctaaccctgatttttatagactctaactggtcaatcaggctgaaggaataacaggatctgaaaaatctaaagatggtgtag

SEQ ID NO: 882568 - DNA, 551 bp, Homo sapiens
gaaggtgtcctggctaagccgctctccctaataccagagccaggcacagtacctgctattgttggtaggggactctgttctctgcaggaaccatctcctcctgcagaagccaaggggcaccccattctcttgataccacagagcctgcctcccttagccttttcttgttcactcagctcctgggtgaaacccctgtgtggcactgaatggtatatggtgtcctcctcccaacctgtcaatttcacctgttcagtgttggggtgtcctgtgtttgaccaggctcaaaatcctgggcagggaatccctcctttgcctacaaggtgaagaggtgatgatgttcagaacacagccccacgccaggttccagtctgttctcctggattctggctcctgcctgtggcctcactctctcccacttcaagtccctcccctcttcctcactgcctccccrtggactttaaatcccagcaccagacacaaagacgacagccttgcagagaccatttaactagcttccatcattatgtggcatcaaatccctataatcatat

SEQ ID NO: 882569 - DNA, 564 bp, Homo sapiens
ccctgaaatgtaaaactctgctgtttgtaggagtgccaagatgtttaaacatattttagatattttttggaaagttgtaaaacgtggctaatgtaggaaatggtagcagttcataaacactacttattgttcatcacttcagatgtcactaggcttatgtaaatgaaaccgagatatttttcttttttctgtgtgaagtcaagcccattttttcttctaacattatagacatcccagagtggttatcagcatttgaaagcagcagggcctctttcttcttcttggatttggttaaaacaaaagggctayggacagtcttgaaatgtgaaccaaaaccccatgtttttaaacacctcagcaaatccgaatgaagacaagtttcctccttcagggacaaagcagggttcagtctataaaacctgactttgaagcagatgacaacttttcccacaggtggtgcacaagtacttctaggaaacacaaacacctaattttgatcttatttattaggattttattttaatgtggatctggaaaaaaaactagcacatcatgctcataatt

SEQ ID NO: 882570 - DNA, 443 bp, Homo sapiens
aggggtgagaaagtgcccaaccatgtgagtgccagcacggctgtgctgtgggttcccggagtcacatggaatatgctgctgccgctcccaactaccatctaggctccctggaggaggcgtcacacatcgctgcccactgccacgtracttgtggtgtaacagcaacttccccctgggtgctttccctcctcagtgatgtcaggcatagccacacgaaatgctttggccaatggtatgtaagtgatggtgtcttatctgagcattaagatttaagagccagtgtgctccctccctctgctgcaaggaccttataggacctacttcctccactgagatcctagaatgaggaccacccacggggctggggcacagtcacagccagccctagtcaacatgacacatgaacaagaaatgatctttggttgccacaggccactgagatt

SEQ ID NO: 882571 - DNA, 664 bp, Homo sapiens
aaacatgctgcaggatattatccaggagaatttccccaacctaccaacgcaggccaacattcaaattcaggaaatacagagaaggctacaaagatactccctgagaagagcaactccaagacacataattgtcagattgactaaagttgaaatgaggaaaaaatgctaagggcagacagagagaaaggtcaggttacccacaaagggaagcccatcagactaacagtggatctctcagcagaaactacaagycagaagaaagtgggggccaatattcaacattcttaaagaaaataatttttaacctagaatttcatatccagccaaactaagcttcataagtgaaggagaaataaaatactttacagacaagcaaatgctgagattttgtcaccaccaggcctgccttacaagaactcctgaaggaagcactaaacatggaaaggaacaaccggtaccagccactgcaaaaacaggccaaattgtagagaccatcaatgctacaaaaaaactgcatcaactaacgagcaaaataaccagctgacatcataatgacaggatcaaattcacacataacaatattaaccttaaatgtaaatgggctaaatgctccaattaaaagacacagactggcaaattggataaagagtcaagacccatcagt

SEQ ID NO: 882572 - DNA, 664 bp, Homo sapiens
aaacatgctgcaggatattatccaggagaatttccccaacctaccaacgcaggccaacattcaaattcaggaaatacagagaaggctacaaagatactccctgagaagagcaactccaagacacataattgtcagattgactaaagttgaaatgaggaaaaaatgctaagggcagacagagagaaaggtcaggttacccacaaagggaagcccatcagactaacagtggatctctcagcagaaactacaagtcagaagaaagtgggggccaatattcaacattcttaaagaaaataatttttaacctagaatttcatatccagccaaactaagcttcataagtgaaggagaaataaaatactttacagacaagcaaatgctgagattttgtcaccaccaggcctgccttacaagarctcctgaaggaagcactaaacatggaaaggaacaaccggtaccagccactgcaaaaacaggccaaattgtagagaccatcaatgctacaaaaaaactgcatcaactaacgagcaaaataaccagctgacatcataatgacaggatcaaattcacacataacaatattaaccttaaatgtaaatgggctaaatgctccaattaaaagacacagactggcaaattggataaagagtcaagacccatcagt

SEQ ID NO: 882573 - DNA, 620 bp, Homo sapiens
acttttatagtgttcttcacagagattttatagtggtatagtttttttttaggttcatgtttaggaataatatagtttttattttttataggactatgaatagggctgttccattcaaacatctgattattgctaacgggatttactaattttgtgtactaatattgtaatttagtcatctactacgctttgttattgctaagttcttcatttggtgctctsaattttcttggatagataattatatcatttgcaaatcctgataatttgcttgcttgctttcctatatttacctctcttctttttcttgactcattgtgttgactggaaacttcagagcaatgtcaggtaatggaagtgacagcaaatattctcgttttctctttgacttgaatagaagtgccgcattttcaccattagagatgatgatgctttcttttttctgttagtctgaatcactttaaggaagctctattcataatacagggatagatatattttatgactttctatcatctatagaaacaaatgtatggttttaatctattgacatatcaatataacaaactaaagtattagatttcctaaattgtgtaatccttgttttcttggaataaagt

SEQ ID NO: 882574 - DNA, 620 bp, Homo sapiens
acttttatagtgttcttcacagagattttatagtggtatagtttttttttaggttcatgtttaggaataatatagtttttattttttataggactatgaatagggctgttccattcaaacatctgattattgctaacgggatttactaattttgtgtactaatattgtaatttagtcatctactacgctttgttattgctaagttcttcatttggtgctctcaattttcttggatagataattatatcatttgcaaatcctgataatttgcttgcttgctttcctatatttacctctcttctttttcttgactcattgtgttgactggaaacttcagagcaatgtcaggtaatggaagtgacagcaaatattctcgttttctctttgacttgaatagaagtgcckcattttcaccattagagatgatgatgctttcttttttctgttagtctgaatcactttaaggaagctctattcataatacagggatagatatattttatgactttctatcatctatagaaacaaatgtatggttttaatctattgacatatcaatataacaaactaaagtattagatttcctaaattgtgtaatccttgttttcttggaataaagt

SEQ ID NO: 882575 - DNA, 659 bp, Homo sapiens
agataaaagtcggtgttattgaacttgggggcatgaaaaatttagtgcatgtgggaagacaaggaagggatcaacactgagaatgtactgtaggggaggcgttctgcaaacatttgtaaaagcaatgtgtgttaattgtcgtagagagacaactactccttaaccagttgtttttgctgatgatgaatggagatgtttaaagaactatttcaaaagcaataacagatttatccaggagacaaaggcatgtgcattagtgctagggtttcagtccaaaatgggggaatttcctaatagatatcacagcccaaggaataaacagtataaaatgactgtrgacgtggagagtttcctgtggctatggaaacctctgctgacttcttacaactttggaagattcaaagaaagtcttaaccattattttacctaatacagtgagaaaaactgagatatttcacagaatggaacaaatgatgttaagtttatatttaaaagagaacagtagatttaaagctgagagcctctacaattaccaatactgcttaccaggtatgtatacatagaaattcagatgcaaaactgaagagagagaccatgcttttagatacagaacatagcccactgaatatagaaggggtggtgagaaagcaaaaataatg

SEQ ID NO: 882576 - DNA, 588 bp, Homo sapiens
tggggggcagggtgtttagactgataaccacttcagctctaattctggggaggggggcaattaattagtttacaggtaacgccagtgatatgctggcattggctggtactggcttgcatctttgcatttagtaacatcttgttagatgtgtggtcatagtgggagyatttacaccaaggaatttggcaaacgctattaatcagggcttttttttttttctcccagagaataatgtcacccacataccacttgataaatatcagatgtctagtaatattcacagtggagactggctttcatcttactttgactatgtgagaaatcttccttaatggataaagtgaggacatttatttatgtacatttagtattttgcccctgagaacagcagcaaatccaatatttactctaagtgaaagcatccctgtcactataaaccttcaggggagatttgcacaaaattctggcatcatgagtgtaacttgggtaggacaattgctggtggcagctattgttttggtttcctggtaaaccaaagacttcctttagattgttcaagtgcatggttagtggaaactttttcaggca

SEQ ID NO: 882577 - DNA, 588 bp, Homo sapiens
tggggggcagggtgtttagactgataaccacttcagctctaattctggggaggggggcaattaattagtttacaggtaacgccagtgatatgctggcattggctggtactggcttgcatctttgcatttagtaacatcttgttagatgtgtggtcatagtgggagtatttacaccaaggaatttggcaaaygctattaatcagggcttttttttttttctcccagagaataatgtcacccacataccacttgataaatatcagatgtctagtaatattcacagtggagactggctttcatcttactttgactatgtgagaaatcttccttaatggataaagtgaggacatttatttatgtacatttagtattttgcccctgagaacagcagcaaatccaatatttactctaagtgaaagcatccctgtcactataaaccttcaggggagatttgcacaaaattctggcatcatgagtgtaacttgggtaggacaattgctggtggcagctattgttttggtttcctggtaaaccaaagacttcctttagattgttcaagtgcatggttagtggaaactttttcaggca

SEQ ID NO: 882578 - DNA, 601 bp, Homo sapiens
tttcatgggaacgaatctattcttgagagatggaatccaatctcaggagagcaagagcttgctcactactgtgagaagagcaccaagccatttatcaggaatctgctcttgtgacctgaacaactcccactaggctccacctcccaacgctgccatactggggatcagacttccacatgagttttggtggagacaaaccaaccagatccaaacatagcaacatgytttttatttttatttttttcagagggtttgtataggataaatctcctaaaatttttatagaaggactatgcagctattacctttcctcattttaagagtttaaatatacttctgattgatacagggatattgattcatccttcagcattcctcttcctctgggttaccttcttcccataagctcagatcagcgcctacatttctgacatgcatttgcagattcttctcctgtaagcacttgcatctatttttcttaatttctcaggtagctattttacctgtatttggaaaggttcccttttccctgacacctctactatctgaatccataaaagcctgaattctgacatgggtggaagtcagtgtgtaggaaaat

SEQ ID NO: 882579 - DNA, 695 bp, Homo sapiens
tcagatccatctatggggtctaaatttggccacatcttatccaggtcagtccagtgcttactggccatgacaaactgattttttaaaaggaatgctatttgggatttgtggagccacctaaagatcaaaaccctacttaatctgtgaatgacacagggtaggtatcaacaatgtgacatgtcaaatttatgtctccttaatccttttctgtaagaatggtgtsaattattttccttctgtgttcgtgtgtgtcagatagccagtcagtcaacagcatttaatgagcgtccactgtgtactctggggagctataaaggaaacagctcctgtccttgaggagtttatgatgaaatgggagagataaggcaaacaaatgaaaaaatacgcaatggttgtcatagagtctagggctagccttctgataaaacaacaacaacaaaagacatttaggttctgtaatttcttttgtttgaaagttcagaggaaaatgtcacttattttcagaggttatttagaggactacctaaacaaatatgaagatttattttaagcatttgagaaaaactcctcagatttttaagtcaatatgcctttagtactattaagctctttagcaaggtatctttaaatacccactcatagatagaaaatcctggcttagctttctgaggttgaaactggaagaaggggcagtt

SEQ ID NO: 882580 - DNA, 575 bp, Homo sapiens
catgctctggagactccagaaattctcaaggccgagactttctaggcattcaggtcatcgtgtctaaatgaattccttcttacctcctccattatattttctttaaagcacttctatcttctggaataaatgaaattattgttactctgcttattttacattttcgaccactgaaatctcttgaaggctgagactttatttcatgattgctgtattttcagggtccagactatactaggcaaatagtagataataaatatttgattaaaaatgttgcctaaataatcatagctagtatacaaatcatagctgaatttaagttcaggctaagaaaagataaaatacttaaaatgattgcttccttattgacaacctgattttatattattgaaaaaaatactttatcacacttcaaktcttctcaaaatgttcgatatggtggaatatgaacacttctgctctttgaatatctttagttcttcatggaagaaacagtggaagactgactacaaattaggaaatgctaatagcatctgttgggaagaagagtgtgtggtggatcatagtgtaactgg

SEQ ID NO: 882581 - DNA, 575 bp, Homo sapiens
catgctctggagactccagaaattctcaaggccgagactttctaggcattcaggtcatcgtgtctaaatgaattccttcttacctcctccattatattttctttaaagcacttctatcttctggaataaatgaaattattgttactctgcttattttacattttcgaccactgaaatctcttgaaggctgagactttatttcatgattgctgtattttcagggtccagactatactaggcaaatagtagataataaatatttgattaaaaatgttgcctaaataatcatagctagtatacaaatcatagctgaatttaagttcaggctaagaaaagataaaatacttaaaatgattgcttccttattgacaacctgattttatattattgaaaaaaatactttatcacacttcaatycttctcaaaatgttcgatatggtggaatatgaacacttctgctctttgaatatctttagttcttcatggaagaaacagtggaagactgactacaaattaggaaatgctaatagcatctgttgggaagaagagtgtgtggtggatcatagtgtaactgg

SEQ ID NO: 882582 - DNA, 639 bp, Homo sapiens
catagggtatacatctggagatccatcttagcatttttttggtaactaagcatgtactctttgtaggtaatagaggtttttaaaaattgtgtgtatgtatgtatcaaaatgaatcaaaacaattaggataaaaatagcttatgtaaaggtccttggtaagatgatagcaaaataaacattctgaataaggcatgtcagagtaaactgtagttatttttgtccctcaaaagcaaattttctaatagtggtrtacatgtggcagatctatttctaggaaagcaataaattgtgttgaaaagagacaagacatatgcctcactcatgactactagtaagaaataataatttctgcatgaccagtcaatggtcaaaagatataaaaggttagaaagaaggtatttggataaacaatccaaggatgatatgttaatgcagattctttaatctatcatgtaggttaaatacatttaatgtatactattttggctatctcttgctatatgataagccactccaaaatttagcagcttaaagaacaataatgacattattgtgcagaagtctatggatggattgggatcagctgtgcagttcctctcattcgtgaagagttgttaggggctgaagacaactgagtac

SEQ ID NO: 882583 - DNA, 651 bp, Homo sapiens
ctgcattatctcctccatctgtccaggtcctacctgttatttctacacctttggcctgatatagctccatgcttcagcaaacatacagctggcaaattatcctttaaaacttagttcaggccaggcgtgggggctcacgcctgtaatcttggcactttgggaggctaaggctggtggatcacgaggtcaggagttagagaccagcctggccaacatggtgaaaccccatctctactaaaaatacaaaaattagctgggtgtggtggtgggcacctgtagtcccagatactcggggkgctgaggcaggagaattgcttgaaaccggaaggcggaggttgcagtgagccgagatcgcaccactgcactccagcctaggtgacagagtgagactctatctcaaaacaaaacaaaacaaaaaaacagaaaacaaaaacaaaaaatttagttctggcattatctgatttagaaagctttctctgatccctgtacttcaacaatgctcccctatctgtataattgccctaatattgtattgacatcacgttttatatatttatgtttcccagaataactgtgtgtaccattaagtcagggcataaataaactttatgtcctttgaaattaacagagtgcttggtagagagtagttct

SEQ ID NO: 882584 - DNA, 618 bp, Homo sapiens
taaattgattatctcttagctctgaaggctggaagactgagatcaaggtgtcagcagggaaggtttcttctgaagctgtaggctgaatcttgtgtgcctctctcctagactctggtggatttctggcaacctggcattactttggcttatgaagyatcacccagatatctgccttcatcttcacatggtgttctccctgtgtgcatgtctatgtttccattttttttctttttaaaaagacacggtcttgctttgtcacccaggttgaaatgccagtagcacaatcatggctcaatgcagccttgaccttctgggctcaagcaattctcccacctcagcctcctaagtaggtaggactacaggcatgtgccatcatgcccagataattttttgcatttttcgtagaatcagggtcttgcaatgttacccaggctggtcttgaactcttgggctcaagcagtctgcctaccttggcctcccaaagagctaggattacaggaaagagccactgcatccaccaaatttcctctttttataaggacatcagtcattttggcgtagatctaagccagtatgatctcatcttaactaattatatctgcaatgatcttatttcaa

SEQ ID NO: 882585 - DNA, 553 bp, Homo sapiens
attgacaaccacccattagtttacaagtgggaattttttcccaccctgtaacacccatcatttatgaagctaaatattagttaagggcctctgaaatttccaataaaactgctagaaagattcttttgatctctargcagctctgaggacagatacaacttcattcctcctggaaaatgctttgttctttggctccacttaaggaggcagtggaaaagcatataatacatcaggctttctttctttgtagaacaaagttaatccaggtccttatcataggaaactgcacagggatataatcttttagaagacataaataattctccataatacttttggaaatactttgatctttctgtatacttctccattgcaaaagggtactgcaaaccttattttccttgtttagagatttgttaaatgaagttagtcatattagacctttgaagttgtgttttaaatagaagctaccaaaaggatgaagataattttactatgtcctgaaaaattctgaaagacgtgccaggcagctgcctcctgtggttctagtaca

SEQ ID NO: 882586 - DNA, 586 bp, Homo sapiens
tttttctatgaatggagataaacctctgttaaagaccaaagtgaaagtgttcattctgccctattccttcttcctctctagccagccatcaaatgcctggcagtctccacctcagaggagctgagacttgagacttggaggtgggcccaacytaagtgaaaactccagcattcttgggtttgtttgttcattggacctcagaacaataattgatatataggacatactttttgtaaggcagattttagaaacatttaagttaaaatacttcaaagcaaaagagatttttctgctaagaatcaggctttagttattcaaacattatctaatctatagtaactttttctccaaaaattccagacatagaaaatgtcgttcttaatatgtcaattcccagtttgatttgtcatttttgaaataattagcacaatatttttacttttatgattatttgataatttacattttgggggctatcttccctatctttaactaattctggaacaatcaaagcaaaataaaatggcatacttaataagttagttatttttcttcttccaaacatgtttaagctcatgttggaaag

SEQ ID NO: 882587 - DNA, 689 bp, Homo sapiens
atgcacctggtagctattgctggcggttgactcgacctcagatgaggctatcagttggaagatttacacatggcccctccactgtgccctgggctcccttgcagtgtggtggtgggttccgagagcaagtctcacaggagacaaagcagaagtgcatgatgttttytgtggctcagcctcagaactgacttagccttgctctccatgtactctgtcgatcaaggcagactggaagtttcagctagggtcaaaggtatgggacgtgaactttgccactctgtgggaagagtgtcaacatcacacttaagaaagacatatgggatgcgatggaatatatcacagcagccatctttgaaacattttctcagccacagaaagtaataataattcctccaagtctttgcttgtttcaagtttttaatggtccctcttgatacacagacattttaattacaatagagtcagttgtatcaatcattttccttttggtttgtgcttcttttgttggttttctaagacatcattaccctatcctgcaattttagctatatatatatataatatatgatttacatacatagagatgtatgtgtttataaaaatatgctatgtgtgtgtatatatactgtatattatacttatatctttttatttttaggattttaatttatatgggacatatatctcca

SEQ ID NO: 882588 - DNA, 625 bp, Homo sapiens
ctctctatgttgcctaggcttgtcttgaactcctaggctcaagcaatgcccccaccttggccttccaaagggctgggattacaggcatgagccatggtgcctggccttatgtatttttaattttattagacagtgccagatcacctaatgatagcctttgaaagaaacttttaaaactataaattttatgtataagactgatacgagtgattatttaagtgatttctcaaacatgaaaagaaatacaaatatattcaaagtttgccttttggttttagtcctaaaaattacaatttttcctacaggaggaagtttggattaactgtttaattatcagatctttcaaatttcttgtttgtcaaaggttttgagtgtagacaycaattaaaatgaataaactgcaaaaattaaattctatgccaagagtgttacttttttctataatcaatttaccctgtattaagtatttcaagactagaaatgaaaatggaatgggggactggattaaagttgtcttaagtgatggaataatacaaatatgccttgtgagttaccttaggattgatgggtggctgaaaccctgcaacttaacctcaccctgcaagtcggcacagtctgagtaatg

SEQ ID NO: 882589 - DNA, 661 bp, Homo sapiens
cacacaaatagaaggtgatgtaaagacatggggagaatgtaacaaactgaagagctcctgaagcttccagaagctaggagggaggcctggaacagattcttcctcacatccgtcgggaggaaccaaccttaccaaccttgatcttggccttctgagttccagaactgtgagagaaatgatatatatttctgttgttgaagtcatccagtttgtggtacttgttatgacagctctagcaaaccaatataagttaattcccagtttagycattttggctgaaaattgtaccagtggtagttatcagtaagtttccaagtcaagcagttcagtcacttctctaaacagtcatctgagggaatagcattagactgtactgctgagttattcttaaatcagaactacgtgctaagaatgccatagacaaatgctcatagagctgaatatccatatctttgccttgtgctagtgctgatagggactgtttaaccaaggtttgctttctttcatctcttctgacacttccctttgttatggaccatgatttccctacataggtcattatgaaattgaagagaacctccattgccccacaaacacataatacactcttgaccttactatttctaattttccactagtgtttatgtatgatgtgtgaata

SEQ ID NO: 882590 - DNA, 661 bp, Homo sapiens
cacacaaatagaaggtgatgtaaagacatggggagaatgtaacaaactgaagagctcctgaagcttccagaagctaggagggaggcctggaacagattcttcctcacatccgtcgggaggaaccaaccttaccaaccttgatcttggccttctgagttccagaactgtgagagaaatgatatatatttctgttgttgaagtcatccagtttgtggtacttgttatgacagctctagcaaaccaatataagttaattcccagtttagtcattttggctgaaaattgtaccagtggtagttatcagtaagtttccaagtcaagcagttcagtcacttctctaaacagtcatctgagggaatagcattagactgtactgctgagttattcttaaatcagaactacgtrctaagaatgccatagacaaatgctcatagagctgaatatccatatctttgccttgtgctagtgctgatagggactgtttaaccaaggtttgctttctttcatctcttctgacacttccctttgttatggaccatgatttccctacataggtcattatgaaattgaagagaacctccattgccccacaaacacataatacactcttgaccttactatttctaattttccactagtgtttatgtatgatgtgtgaata

SEQ ID NO: 882591 - DNA, 620 bp, Homo sapiens
aatatgattcaacccaatactgagtgaagtgtcatcacttcccttttactgtctattggaaaattacagctatgttctaagaaatatgggtcattgtttctttatatattttggtccatttatttagccacatgtctcaagcatctactttatagttaaacaaaaattggtgtcctcttttagtaagtttattcttcctgtaaatggttttccaagctatcaagcaatatgatctcctatcctatgattttcaraaaagctgttgtttcattgttgaaatattatagctgtttagcaactttcctccccacattgtcagtacaaaatcactattatcaatttcaaaatatggttaacaaaatagtgctactgtcttagtctgctcgagctgccatggacaaaatattgtatattgggtagctgaaacaacaaaaattttctcacagttccagaggctgggatgttgaagatcaaggcactggcagaatcagttcctggtgagggctcttttcctgtcttgtagacagccaccttcttgctgtgtcctcatgttagaaagaaaaagagggagagcacatcctacagcgtctcttcttacaagggcattcatccctttatgg

SEQ ID NO: 882592 - DNA, 624 bp, Homo sapiens
atgaacaacttgacttgctttccaatggagcccagcatttgaagctgtgataattgtcagtttaaatgttagtaagtgaatgcttgtaatttacaagtgaagctgcttctcttatcaagggtcccatttcctgtgggctgtttggaagtataaactgttatcagaggatttgtgcttatttgaggcttggcttgcccatctggtcagagagagaaagtctggagagtatgctgagtctaattctgctgtaccccatgacgagcctgtcctgttcaacattccacttgcggtccatgaatcaagcgctattcatgggcacagaacagaatgaaccaacctaaaccatttcgcttgcttgacattctctaaatcccactcccccctttaaacgcacaagctcagggcctgtttcaaagggcaaatattgtgaaaatgaagaaattrttacagattatacttggaaagagttcaaatgttgttgaaataccgtgatctgtaggtggcatgtcttcaaagagattcatttgaatagatcaggctgaggaacagtcaatagcaaaatagttatttgtgtatcaagtatggacaaattctcacataccaggaggctgcgagacagcactt

SEQ ID NO: 882593 - DNA, 605 bp, Homo sapiens
tggcaccactgcactccagccttggcaacaaagcaagaccttgtctcaaaaatacatatatatactgcaccctgatgtgaggtttccctgtgtgttaggaacagacacctcttaaataagcttggtgtcagggcatagggcccaaacaactcccacggcccccttgggctgtatgtagccatacatacatgaattccttcgtgaatgcatttgaaacctctgtgcagttgctggggtcacagatgcatacaccacccagtcccaaccctgagggaatggcataggtcaggcaggccttcaaagtgaataacagatacacagaagtgcaaggacagacaaggaaagaattgcttttggagggggtggtgagggaaattgtcctagaggaagtggcccttgggaagstgcacagagagaagaatgaacatgagttctggtgtcagagatatttaaactcacattctttcttggtactagtttcctttggccattgtaacaaactgctacaaacgtagtggcctaggataacacacattaattctcttccagttctgaaagttagaagcccagaattggtctcactgggctaaaatcaatgcacgggc

SEQ ID NO: 882594 - DNA, 651 bp, Homo sapiens
ccaattctccttttcttcgtagtaagtagagactgcagttgttgttctcttccaccaaagagattgttgcttcctttgttaggcagagagggtaaggactaattggcttaatacagaggttgagctgagctgggtgttgagcttcagttttagtgagactcagtctacatctagttcacggctcttctagccttttgatctgagcccatccgggtttctatctcagtcctgaaagactgtgaaagatttcattctgccyttcagaggtttttagcttagctcttgaacttcacacctgtattggtgtctatttctgcataacaaattacctgaagtttagaagctcaaaacagcaaatacttattttgtcatggtttctgtgtgtcaagaatttgtgaacagcttagatgggtgaatttggctgcaggtctctcatgaggtttcactcaagctgttggctgcagatgccacagaatgaagactggactgggactggaagacctgcttccaagcttggtcctgtggctgtgggctggggccttttgtctttttttgctgctggccaaaggcctcatttcttcaccatgagcttctctgagagttcttatgtgtcttgatgacatggtgattcattatgagtgattcaagcat

SEQ ID NO: 882595 - DNA, 583 bp, Homo sapiens
catccagctgcttttactgttaaaattctccccctctggactttttttcagcatttcccttgatgtaacctttctgggtcttttccactttctcttctttttcctcttcttactggacattctctcctaatttcactaaaactcatgycttacacttccatttctatttgaatgacttccaaattttcacctgtagtctcttacctttctctcaggcaacaaaccagatttcaagtgcttatcagatgcctccatataattggctcattattaccctaaacacaatatgttgacctgaaatttaagttgcataacctccatttggccttcaaaactcaagtcatattgctctttcccctggcatcctctgggtcctcaggctgcatggagtggtttggagttggggcggggggaagtttttctctgggatccctgtgttcctccatcaggacagtcatcactgcattgcattttcgttagctgtctctcctgtttcttagagcagtaattcttgaccaggggagattttgctctctgaaggacatttgacaatatatggagacattttctgttgtgactattt

SEQ ID NO: 882596 - DNA, 583 bp, Homo sapiens
catccagctgcttttactgttaaaattctccccctctggactttttttcagcatttcccttgatgtaacctttctgggtcttttccactttctcttctttttcctcttcttactggacattctctcctaatttcactaaaactcatgccttacacttccatttctatttgaatgacttccaaattttcacctgtagtctcttacctttctctcwggcaacaaaccagatttcaagtgcttatcagatgcctccatataattggctcattattaccctaaacacaatatgttgacctgaaatttaagttgcataacctccatttggccttcaaaactcaagtcatattgctctttcccctggcatcctctgggtcctcaggctgcatggagtggtttggagttggggcggggggaagtttttctctgggatccctgtgttcctccatcaggacagtcatcactgcattgcattttcgttagctgtctctcctgtttcttagagcagtaattcttgaccaggggagattttgctctctgaaggacatttgacaatatatggagacattttctgttgtgactattt

SEQ ID NO: 882597 - DNA, 583 bp, Homo sapiens
catccagctgcttttactgttaaaattctccccctctggactttttttcagcatttcccttgatgtaacctttctgggtcttttccactttctcttctttttcctcttcttactggacattctctcctaatttcactaaaactcatgccttacacttccatttctatttgaatgacttccaaattttcacctgtagtctcttacctttctctcaggcaacaaaccagatttcaagtgcttatcagaygcctccatataattggctcattattaccctaaacacaatatgttgacctgaaatttaagttgcataacctccatttggccttcaaaactcaagtcatattgctctttcccctggcatcctctgggtcctcaggctgcatggagtggtttggagttggggcggggggaagtttttctctgggatccctgtgttcctccatcaggacagtcatcactgcattgcattttcgttagctgtctctcctgtttcttagagcagtaattcttgaccaggggagattttgctctctgaaggacatttgacaatatatggagacattttctgttgtgactattt

SEQ ID NO: 882598 - DNA, 650 bp, Homo sapiens
tgggcatagggttccttctcagcacacccactgacccctaactgtcagacttcctttcttgtactccttcacccaaaggccagggacatctgagagttctggcatggggcagaaaaacctggctctccctttatcctatgttcttccaaatctattgtttagggtgtaaaatgtattttccccagcccctccaaatcatggtttctgtgactcaaatagcttttcttgtaaactgtggcttctccaatgagtttcaaaggttatttataagctcaaaagttgagccttgctgccctggttctgcatgtcatcttttctccaggaggggaccctgcagtgccttagctgccacctgacacagggggcrcaccacaggcacaaagagtcactgggtatgaaacgctgagtcaattcattaatggctgtatgtctacaatagcaaacaattacagctttgcactgatgagattgcctgtgtgttctgttcactgggaccagaacttcctccatcactgtctctgcatcttagtcatcttgctttcactggtgtcttaatccatttgggctcctataacaaaataccatacactgggtggcttacaagcaacagtaattcatttctcatggtggttctggaggctggaaagtct

SEQ ID NO: 882599 - DNA, 650 bp, Homo sapiens
tgggcatagggttccttctcagcacacccactgacccctaactgtcagacttcctttcttgtactccttcacccaaaggccagggacatctgagagttctggcatggggcagaaaaacctggctctccctttatcctatgttcttccaaatctattgtttagggtgtaaaatgtattttccccagcccctccaaatcatggtttctgtgactcaaatagcttttcttgtaaactgtggcttctccaatgagtttcaaaggttatttataagctcaaaagttgagccttgctgccctggttctgcatgtcatcttttctccaggaggggaccctgcagtgccttagctgccacctgacacagggggcgcaccacaggcacaaagagtcactgggtatgaaacrctgagtcaattcattaatggctgtatgtctacaatagcaaacaattacagctttgcactgatgagattgcctgtgtgttctgttcactgggaccagaacttcctccatcactgtctctgcatcttagtcatcttgctttcactggtgtcttaatccatttgggctcctataacaaaataccatacactgggtggcttacaagcaacagtaattcatttctcatggtggttctggaggctggaaagtct

SEQ ID NO: 882600 - DNA, 646 bp, Homo sapiens
ccagccttgtccctaccatggctacttaaatcagagcatgcattttctatgcagaatacttacagaatgaatgatttattctaaaagcagagaggggacatgaacattgattttgcttttaagtggtggttcacattgtttgcagaatctctcagctgtctagaaccattgacaagtgcacttgagtggccactttccactcgctggctcacctggtgccccagcttctcaaaacagggggacacaggcatccccatgtggctgaaagacacacatttagggtaattatcattatgtattttgtttgtttgtttgttggtttttttttttaattggccagaaggtcattgtagagttggaatttccctttgtggagtcycagaagcatgatgcagaggaatgagcctggaaagaagagattgagcctagtttcaacttgctgtgtggccttgggcatgtcacctcactcatctgagcaacatgcttattggtaaaagacctggttcttctcccagtgtgcctatgggtccttgagtttcttaattattgatgggtgcttgtgaacttttagttggagggaggattcctggatgtcctacaatacataagaaaagcctgcaaaactttcaaatatccccagagacat

SEQ ID NO: 882601 - DNA, 686 bp, Homo sapiens
ttgggggaacaggcagtgtttggttacatgaataagttctttcatggtgagttctgagattttgatgcacacatcacccaagcagtgtacactgtgggcagtgcatagtcttttatcccttgtcatcccccattgttttccccaagtcccccaagtccaatgtatcattcttatgcacttgcatcctcataggttagctcccacatgagtcagaacatatgatgtttggttttccattcctgagtgacatcacttagaataatagtctcaaattccgtccaatttgctgcaaatgccattattttgttcacttttgcagttgagtattattccatagtgtgtgtgtgtatatatatatttatcatatatgtatgacatatatatataacattttctttatcctttttctatatatatatataagattttctttatccacttgttgattggtgggcatttgggcttgtttcatatttttgcaattgcaaattgtgatgctataaacgtgtgtgcaagtatcttttttrtataatgacttcttttcctctgggtagacacctagtagtggtactgctgaatcaaatggtagatgtacttttagttctttaaggaatcttcacactgttttccacagtggttgtactagtttacattcccaccaacagtgtgaaagtgttcccttttca

SEQ ID NO: 882602 - DNA, 608 bp, Homo sapiens
cttgcatgaggctaccatgctagtaagtaacatatgtgtaatctgagccttgagggtgtgatgctacatcctgtgtcttgaccactattttatctgtctttactcacccataatagtggcaagagaacacagcacagtgcagggcttgctgggggccacacctgcagaagatacaaagaatggagagaagaaaaggagcagaagaaggaggaagtgaggccatagcccataacattttttggcagcagtagcagagcccagtaacagaacaattggatgttgaataaaatgaagagtgagccattaactcctcagtacagccaaggttaagatatcaggtcatgatccagagaygagaagatcaggcctgcaaaaccaacctgctgtcccagctagaaaagtattatttatttcctagggaactaaaataagaataaaaacccaacttgtacttgtgtccatgattagtatcttattcctgatttaacaactcacttgatattctcagtaatttattgcagcatgagtgttattctcaagtaagtcctttagttcactattactattaaaataaccgcaatggatattggttgaaatagaaatatctg

SEQ ID NO: 882603 - DNA, 552 bp, Homo sapiens
ggggcggccctggacccagctcaagaaaccatttttccctcctaggcctctgggtctgtgatgggaggggctgctgtgagggtctctgatatgccctggagacattttccccattgtcttggcaattaacatttggcttctaattatttatgcaaatttmtgcagccagcttgaatttctctccagaaactgggtttttcttttctattacatcaccagtctgcaaattttccaaacttttttgctttgtttcttcttgaatgctttgccgcttagaatttttttctgccaaataccctaaatcatctctcaagttcgaagttccacagatctctagggtaggggtaaaatgctgccagtctctttgctaaagcatgacaagagttaccttaactccagttcccaacaagttcctcatctccatctgagaccctcagcctggacttcattgtccatatcgctaccagcattttggtcaaagccattcaacaagtctctaggaagttccaaatgttcccacattttcctatcttcttctgagcccttcaaact

SEQ ID NO: 882604 - DNA, 552 bp, Homo sapiens
ggggcggccctggacccagctcaagaaaccatttttccctcctaggcctctgggtctgtgatgggaggggctgctgtgagggtctctgatatgccctggagacattttccccattgtcttggcaattaacatttggcttctaattatttatgcaaatttctgcagccagcttgaatttctctccagaaactgggtttttcttttctattacatcaccagtctgcaaattttccaaacttttttgctttgtttcttcttgaatgctttgccgcttagaatttttttctgccaaataccctaaatcatctctcaagttcgaagttccacagatctctagggtaggggtaaartgctgccagtctctttgctaaagcatgacaagagttaccttaactccagttcccaacaagttcctcatctccatctgagaccctcagcctggacttcattgtccatatcgctaccagcattttggtcaaagccattcaacaagtctctaggaagttccaaatgttcccacattttcctatcttcttctgagcccttcaaact

SEQ ID NO: 882605 - DNA, 560 bp, Homo sapiens
accaggttctcaataacttcaagaaataaaaaaacatacacacctactatacagagtggctaattaagagtgaccagtagtgtggagaagatatggggtatgatgtagaggcataatgatgtttgtgcaatattagttgctaaaatcctggaagaccatagccaaatatttctgttaattattattttttcttcagaaaggcagtaaaacccaattatctaggtttaaaacaggtgtgttttgtgggaagattttttaacattttagaaaactggactaaaatttgacagcygattttaaaatacccttttttctcattttcaaaagagaaaattcttacctgttggcatgggaaagagaatttaatttcacagaacaaaagagctttctttcctacagcaacattcacacttagtgaccgctgggtatttatttattcagaagtggtttcaggtgccgactcagtgctgggcatcatgccaggcatggcaatgaaaaaataagcggggtgatgtggcctggcctctccctctctcaagaggcttaaagtccagaaggtg

SEQ ID NO: 882606 - DNA, 622 bp, Homo sapiens
aagtttcttaaaatagatgtagcaatttgtcaagcacctccaccaaatacctccttcaagttcatagttatttttcatccaggttccttctttgccgtctttaaaaatgattcatttcatttctcaggcactattctatgaatttccatgtcatcacttttttkctgagttcttgctaggagccagaattggctgaaattcctatgagagttcccccacagttgcattttggatgaggatttcgaatttcacatgacaaaatataaatgccgctaaatgtaactccagaggtacaagcagtggcgtcggaggccccttctctggctccttaatgcccccattagtattacaacaaggaaaagagacatgggctgaagagtcaggcagatactggcagaagtgagtccagttaaaaacacatcatggttctgtaacccgccctgctggccccctctgccttcaacctcttttgaggtaacgtagctcagagttcagacatccataaaagcctgtgacagggagtagggcaggaccagtgacataatttgtggccccaatgaaaaatcaatacgatgccccttgttaaacattgattagaatttgaagatggggacagcaacat

SEQ ID NO: 882607 - DNA, 615 bp, Homo sapiens
aagcctcacttccatcccagctttttcactgttccccacgagtaagtaagtgaacggcaaatgtgcaagggagttaaagtgtaaattcctcccggcccatataattgacttgctgaatttttgcagtaacaaaagactgctgttcaaaacatttccagtgacattttaagactacctataaagagaagttcgggccrggcgcagtgactcacgcctgtaatcccagcacttttggagccgaggcgggcggatcacgaggtcaggagatcgagaccatcctggctaacacggagaaagcccgtctctactaaaaatacaaaaaattagccgggcgtagtggtgagcgcctgtagtcccagctactcgggaggctgaggcaggagaatggcatgaacccgggaggcggagcttgcagtgagccgagatctggccactgcactccagcctgggcgacagaacaagactccgtctcaaaaaaaaaaaaaaaagaaaagaaaagttcgcgttggtcatttttgtgctgtttatgatgtataatcattggcactgtccccacagtgtcttaatcctgatattcagcaaatatttatccaacaggggtttacttatttattt

SEQ ID NO: 882608 - DNA, 680 bp, Homo sapiens
tccttttccctaaaatgtccaaatcttcacaaattttctaaaagctctgagataacaaggttatgaatttccattataacatgcaattatgatcatgtttgggcttgcaccatttctggtctatagaaaaccctttcaatgctaaaattcttgcatggcaataaatgcattgctcataggactaaatattaaatacaatgcagcacatggtaaactgggggcagtatattctccatattgctcatgatttctgtttactaatgtctatttaagtttcgtaaagcagtgtctacaaatggtttctaaaagttgaatagtacaaaaagttatatagtgaagtaagtctcgctccatccctaasctgttttcctcctcaagggcaaccactcccagtgtgtgcttccagagatggactgggaaggaaattattttctactccatttccaaatccaaactgtcaagctattcacagcaatatcagcaaacattttcacattagcaagatatcaaaagtttcacctgtcatgcaccttttctctggaaactccaaaagggtgtgctccattcacaaaagagtataaaccaaaagaaggtagacatggactccaggaaatgagatctgggatggcagctggggagcaacccagccagatccaactgtgggaggaagagcaagtgcc

SEQ ID NO: 882609 - DNA, 584 bp, Homo sapiens
ccctgaaatgtaaaactctgctgtttgtaggagtgccaagatgtttaaacatattttagatattttttggaaagttgtaaaacgtggctaatgtaggaaatggtagcagttcataaacactacttattgttcatcacttcagatgtcactaggcttatgtaaatgaaaccgagatatttttcttttttctgtgtgaagtcaagcccattttttcttctaacattatagacatcccagagtggttatcagcatttgaaagcagcagggcctctttcttcttcttggatttggttaaaacaaaagggctayggacagtcttgaaatgtgaaccaaaaccccatgtttttaaacacctcagcaaatccgaatgaagacaagtttcctccttcagggacaaagcagggttcagtctataaaacctgactttgaagcagatgacaacttttcccacaggtggtgcacaagtacttctaggaaacacaaacacctaattttgatcttatttattaggattttattttaatgtggatctggaaaaaaaactagcacatcatgctcataattatacggatcttactgcttag

SEQ ID NO: 882610 - DNA, 669 bp, Homo sapiens
atctgggtgagaatatttgtaaccggcacaatacttatacatgaatggccactgtgaaatgggtttctaaggggcgatattataatttgctttcttaagagcactgactacaaagacatctcctaaactctttctttgtaaacttaccagaaacccttgtatccccatggatgaatccagagcttttcagtggctcaggtttctccttctaacagtgcttgaaattccttccacagagaatgaagcttttaattctagaaccaatgttcagattgtgcaaaggcatggatttaaggtgacagctattaacattggcaaagttctttctattgtgaaaattgctttcatatatatttggtttattttgccctccggacagtcctgggcttcattattgagtaacttattttctgtttgaagaaacggaggcttagtggtttaagaaagctgattaaagtcaaatggcaaggatggggtaaatgatggarctctaagcattgggtgttggcgtctgtaatatttgtgcatgactgactacacagctctccttctgagtcagtggcttttaagctctttggaaccacagtaaattccttttacctcatgactcagtacacacatatgacccaccaaacagtacttgccttgaccattccccatgccttctaa

SEQ ID NO: 882611 - DNA, 669 bp, Homo sapiens
atctgggtgagaatatttgtaaccggcacaatacttatacatgaatggccactgtgaaatgggtttctaaggggcgatattataatttgctttcttaagagcactgactacaaagacatctcctaaactctttctttgtaaacttaccagaaacccttgtatccccatggatgaatccagagcttttcagtggctcaggtttctccttctaacagtgcttgaaattccttccacagagaatgaagcttttaattctagaaccaatgttcagattgtgcaaaggcatggatttaaggtgacagctattaacattggcaaagttctttctattgtgaaaattgctttcatatatatttggtttattttgccctccggacagtcctgggcttcattattgagtaacttattttctgtttgaagaaacggaggcttagtggtttaagaaagctgattaaagtcaaatggcaaggatggggtaaatgatggaactctaagcattgggtgtyggcgtctgtaatatttgtgcatgactgactacacagctctccttctgagtcagtggcttttaagctctttggaaccacagtaaattccttttacctcatgactcagtacacacatatgacccaccaaacagtacttgccttgaccattccccatgccttctaa

SEQ ID NO: 882612 - DNA, 552 bp, Homo sapiens
atgatatgattatagggatttgatgccacataatgatggaagctagttaaatggtctctgcaaggctgtcgtctttgtgtctggtgctgggatttaaagtccacggggaggcagtgaggaagaggggagggacttgaagtgggagagagtgaggccacaggcaggagccagaatccaggagaacagactggaacctggcgtggggctgtgttctgaacatcatcacctcttcaccttgtaggcaaaggagggattccctgcccaggattttgagcctggtcaaacacaggacaccccaacactgaacaggtraaattgacaggttgggaggaggacaccatataccattcagtgccacacaggggtttcacccaggagctgagtgaacaagaaaaggctaagggaggcaggctctgtggtatcaagagaatggggtgccccttggcttctgcaggaggagatggttcctgcagagaacagagtcccctaccaacaatagcaggtactgtgcctggctctggtattagggagagcggcttagccaggacacct

SEQ ID NO: 882613 - DNA, 646 bp, Homo sapiens
catacaaagacaaaacgcttgaaatgtgaacgctctggcttgggtgtcacaagatttatcccatttactgtattttccactctggatacggctttggggaggcaaacatgtcagaagtcttgtaaaaccttgctataaatattttttaaaacaaatatatgaagtttccatttattttttaggcawcttataaatattcatccatgtcttcaactatgacagggttggttttagagaaaggttcaaacgagtttatatctaaattttagtaggaattggtcagacttctatggtgcctcattttaaattaatctgtttgccaagctgtggtcacttcttgctccccgggggcaggaacttgccttataatctacacactgcaactgaactcagtaaatgaccattaattgaaactcagtaattatttacaagcccttcctattatgaggcatgaagctaagaacttttgcctagattttcttcccacagcccaaaggagagaacgatagtccaacaagcttctatgtctggctcatggggtcctataactctcgccaacatcccttatccacagacctccatactttgaaggcagcagtgtctgcctggacccccccccaccacctcccacagtaaaaaccatgac

SEQ ID NO: 882614 - DNA, 646 bp, Homo sapiens
catacaaagacaaaacgcttgaaatgtgaacgctctggcttgggtgtcacaagatttatcccatttactgtattttccactctggatacggctttggggaggcaaacatgtcagaagtcttgtaaaaccttgctataaatattttttaaaacaaatatatgaagtttccatttattttttaggcaacttataaatattcatccatgtcttcaactatgacagggttggttttagagaaaggttcaaacgagtttatatctaaattttagtaggaattggtcagacttctatggtgcctcattttaaattaatctgtttgccaagctgtggtcacttcttgctccccgggggcaggaacttgccttataatctacacactgcaactgaactcagtaaatgaccattaattgaaactcagtaattatttacaagcccttcctattaygaggcatgaagctaagaacttttgcctagattttcttcccacagcccaaaggagagaacgatagtccaacaagcttctatgtctggctcatggggtcctataactctcgccaacatcccttatccacagacctccatactttgaaggcagcagtgtctgcctggacccccccccaccacctcccacagtaaaaaccatgac

SEQ ID NO: 882615 - DNA, 643 bp, Homo sapiens
gaaaatgatgattaccaaggaaaatgttgtacataaggactgagctgtgggatttaccaaaaaaacaacaaaaacaaacaaacaaaaaaacactgcaacaaaacacataggattagcaataatgtttcttcctttcctttgtgctttcaaagttctatctctagacacagccagaaaggcctggctagtgcagtggggtatgacttactcagtgggggaacaattgaaaactctcayagaagcaggtcttgcctggggaaattcaatgtcctccagtcatttaataagtcattttgagtgcctgttgtatgtcagggtctatgctggggacacagaggatttggtcaagggaggctgactgctgaaataaatgttccctaaatctcagtggcttcacataataatatagtccaacagaggtatttttggtcagggctctcttgggtggcctgttccacatggtgattcaggcatccaggccccttccaccttatgatttacaaccctggatttctcctcatttacagctaaatagatgggggaagaagggagtatggagggtttgatgagaggttttcatgagccagatacggaagtgtatacattatttttactaatatcctattgtctagaataaaggcat

SEQ ID NO: 882616 - DNA, 643 bp, Homo sapiens
atggtggggtttgcaagctagtgggggagacagacgttgatagatcacccctgagtggactgtgtcaagtgcaatgatgaagaagagtctcaacagagacatgggagccctgacctgacctaagctggtgatcagggaagacttcctggaggaaatgacgtgtgctagaacctgagagatgagtaagagttgccaggaagaaggcagagggtgggaaaaactccagacagaggcatcccaaggccctggatcatggcatcccaagggcccggggtgggagaagcaaaccacgttcagggaactgaaacagagcycagtgttggggagcaccatcagatcagggggagagcccaactgctgacctgtcctgtccatgtggacctccaaagggcccatcaagtgacagcaggaagagaattccaggtcctggttcttgcaactgagaagatgatggggccatttcctgagatggggcaagagaagcacaggtttggatagaagatggtgagtgctgttgtgactatgtcggtctaaggtgcccgtgtgaaacatctcagccaattggacacatgagacacagaagcatctgcagctcagaagggatgtccaggtgcattggaggaatgtagaagagaggattctc

SEQ ID NO: 882617 - DNA, 687 bp, Homo sapiens
aatgagtgaatgaatgagcaaatacatgaatacatgagtggaggaacctggcaatagcagtagtggtgggtggggggatatttacttctcttcctagcagactttttttcaaagaaatgtggcatcagcccactgaatgttccagccaatgaaattattttcaaagcattctgtgtcacaaagcccatatggctctgaactaaagggagaattagaaataatctgaaactcagttaaagataagtttgctaaatccagtgcatgatgaattcaaattacttttgcataatgaataatgtgttgggtggtgagtagcrgtgtgaaaagctaaattgtgataaacgcaagcttgcaagagtcaatgaatgtctggagagtcttaaactacttaggtgcagttgaaggtcaaaagttcagcaatgtctggcagagtagatcacatgggattctcttgattatgttagtaagattttatgatattactttcagtgtcttgtcttctctggatgatggctggtaagcatgtttcaggccatggcattcttgttatgatgtctccagagagactccccagcatcactagccatctagggtggccgtttctgagcgtcaacagtgccaaagcttctgccctgtctcccaaagcacatgcttacagcaggctaaggagaaaaccctgaaacatga

SEQ ID NO: 882618 - DNA, 580 bp, Homo sapiens
ctgcaagctccaccccccgggtttacgctattcttctgcctcagcctccccagtagctgggactacaggcgcccgccaccgcgcccggctaattttttgtatttttagtagagacggggtttcaccgtgttgaccaggatggtctcaatctcctgccctcgtgatcctcccgcctcagcctcccaaaggtctgggattacaggcttgagccaccgtgcccggcctactttaactggagaattcattcttccaaatgtgctcattcatggttttattttattttattgcattggattgtatcattgcatctcctacctgtgcattttaagagtttccacttcaaactttktttcattatgaggtaaaccttaaaaaataaagcctgttttctggagtgccacagacattttgtcagaagaaaatgtgactgtcctttaatcgggcactgttttatgcacataatacaaatgatttctgcatgcttatcagatctacttgtgggcttataaattcacttcatcctggcatacgtagtgaaggacattcctctgtgccctgtcaagaataatcaagcttttaa

SEQ ID NO: 882619 - DNA, 500 bp, Homo sapiens
caagaagaaatgcttctcagcccccttgcccccaataactggggggtatcagcctttagaaaggatcctccaggctcccaccccagccccagcccctggagcaaaaccacattctcactaggcctctcctgaaaaggggaagtgtaagacgtgacttcccttagaaagacctgarcttctctttttctatgggttttggggtgaggccagcagtgacttaatcccaataaatattaaatgagacataaatccaactttagcaaatgtcacccacagatttttgctaaatcaaacttatttgtattttatttttttaaatggatgaacttcatctcgaaggaatataaaaaaactgacaaaccaaaggccactgaggtccatgcatggactagggaggaaaaccccatgtatttactgccagatccatgccaggagctgtgcttgggcgaagccatagctggtggcataggtattgtcaccccctactcctcacatggaaa

SEQ ID NO: 882620 - DNA, 601 bp, Homo sapiens
agagaggtggctcttctcctggggttggttgccagctatgtgttaggaagataaggagaactggatcattgtttcctgttgtccagcaggcaaccctagactacctcacatggtagctcagtaggtttcagagagagagtgtgcagaagcttagactcagtgctggtacacagcaacttctttcacattctrtgggccaatgtgaaatacaaagatgccccatgtggctagagtggagaagaagactatgggacttgataggaggagttgtgaagatcattgtaaaggctatgatacttggagacatggaggattatggctatttttggcatctaccatacatggggtagattttgtctgaaggcagtgtggctggaagcatttaggaagtgagagcttcacctgtatgtccatatagggacactatcaggaataggaaggtcagagaaaaatggagcttaacagagcaaatgccctaaagagacacagaggccagagccacctgcttggaaagatcagagggatggaacagcagggcagggactttaagccacaccaggcagtgcaaatgctgctaactttgcaggggctcaggaacaca

SEQ ID NO: 882621 - DNA, 601 bp, Homo sapiens
agagaggtggctcttctcctggggttggttgccagctatgtgttaggaagataaggagaactggatcattgtttcctgttgtccagcaggcaaccctagactacctcacatggtagctcagtaggtttcagagagagagtgtgcagaagcttagactcagtgctggtacacagcaacttctttcacattctgtgggccaatgtgaaatacaaagatgccccatgtggctagagtggagaagaagactatgggacttgataggaggagttgtgaagatcattgtaaagkctatgatacttggagacatggaggattatggctatttttggcatctaccatacatggggtagattttgtctgaaggcagtgtggctggaagcatttaggaagtgagagcttcacctgtatgtccatatagggacactatcaggaataggaaggtcagagaaaaatggagcttaacagagcaaatgccctaaagagacacagaggccagagccacctgcttggaaagatcagagggatggaacagcagggcagggactttaagccacaccaggcagtgcaaatgctgctaactttgcaggggctcaggaacaca

SEQ ID NO: 882622 - DNA, 601 bp, Homo sapiens
agagaggtggctcttctcctggggttggttgccagctatgtgttaggaagataaggagaactggatcattgtttcctgttgtccagcaggcaaccctagactacctcacatggtagctcagtaggtttcagagagagagtgtgcagaagcttagactcagtgctggtacacagcaacttctttcacattctgtgggccaatgtgaaatacaaagatgccccatgtggctagagtggagaagaagactatgggacttgataggaggagttgtgaagatcattgtaaaggctatgatacttggagacatggaggattatggctatttttggcatctaccatwcatggggtagattttgtctgaaggcagtgtggctggaagcatttaggaagtgagagcttcacctgtatgtccatatagggacactatcaggaataggaaggtcagagaaaaatggagcttaacagagcaaatgccctaaagagacacagaggccagagccacctgcttggaaagatcagagggatggaacagcagggcagggactttaagccacaccaggcagtgcaaatgctgctaactttgcaggggctcaggaacaca

SEQ ID NO: 882623 - DNA, 601 bp, Homo sapiens
agagaggtggctcttctcctggggttggttgccagctatgtgttaggaagataaggagaactggatcattgtttcctgttgtccagcaggcaaccctagactacctcacatggtagctcagtaggtttcagagagagagtgtgcagaagcttagactcagtgctggtacacagcaacttctttcacattctgtgggccaatgtgaaatacaaagatgccccatgtggctagagtggagaagaagactatgggacttgataggaggagttgtgaagatcattgtaaaggctatgatacttggagacatggaggattatggctatttttggcatctaccatacatggggtagattttktctgaaggcagtgtggctggaagcatttaggaagtgagagcttcacctgtatgtccatatagggacactatcaggaataggaaggtcagagaaaaatggagcttaacagagcaaatgccctaaagagacacagaggccagagccacctgcttggaaagatcagagggatggaacagcagggcagggactttaagccacaccaggcagtgcaaatgctgctaactttgcaggggctcaggaacaca

SEQ ID NO: 882624 - DNA, 637 bp, Homo sapiens
gggtattccccctttagatgttctgactaatgttgatattaaccatgtgacattcacaaagtaattttttcctgaatatatgacagtatatattaggttggtgcaaaagtaattgtgatgtttgccattaccttttaatgccaaaatccatgattttgagccaacctaatatcagaggggtaggtgatgcaattgtaagtgagtgttctttggagtcaggtagatcctgcctcttctcagagcagctgaggggcccgccaaggtctgtggctgtaatcctgagtcatgtggatcaggaacgcctttaagtccatgcctggcagctgaargcatctgcagtttagattctccttgtaccaattttgcaaatctctgcaatattggaagccatgcacccagctgaatggaagcaggtgaaaacaaggccgcatgaagtcatagcactgtgggcagcagtgcaccagtagtagctctttgtgctcaagaatcaaatgatgactgttggcagggattaaaactggggctgactgagtgctgggctttgatcttgccaaatccactgagacagctgaaatttcatgaaaaggtgacaaggatttcctaaaccaaatgcaaattgatgtttaactttcaactc

SEQ ID NO: 882625 - DNA, 602 bp, Homo sapiens
ggcggatcccggggacatcgtagatctcctcgcccgtggctaggtaccatctgagagtcacaggagggatgcctgctgcggggcagggcaccagagtccccgtggtgctggcaaacactacctcttgcagagatgcattgacaaagtagaggctggagtgtaggtcttcactgaaaactgcaagaagacaacacagggatccataggtgagtaaaacatgcctttgacatttgcagttcaatgtctggcctcagaaagttatcctgaaaattaatcatgaggcgcaggctcaaataaaaccaaataattcaaattttctsaaaatgctgtgagcagacaggctgatactaaaaaataaggcaccatcctaatttcacattttgtacacaaactgttaagttatcctggatgttaatttttaatagattgtttttttgcctcatgccccaaaccctgttctctccccacactgaccaccattggactgtatatattttatattcacttattgtctatcttctgccactagagataagcctcatgaggacaaggtcttaatttactcccactattacctggagcatagagcccagctctcactg

SEQ ID NO: 882626 - DNA, 601 bp, Homo sapiens
tatagccatgtgcctccatgctcagataattatttgtattttttgtagagacagggtttgtcatgttgcccaggctggtctggaaatcctgagctcaagcaatccgcccgctgcggcttctcaaagtgctgagatcatagtcatgagacataacgtcagctcagcttttatttttaggaagagattgcaaagaattggtatcattttttttctttaagagttggtagatttcactagtgcaaacactggtgcctgatgctatcttttttggaaggttattaattattgagtcaatttctttcattgatataggcccattcagaatatctgtttctccttatacaaatcttgatagtytgtgtccttcaagaaattagtttatttcatccaagtattcaaatttatggctacagggcttttcataaccctattatccctttaattattatccttttaacatctatgaaagcattcctgatgagttctcttttatttccaatattaataattcatgtcttctttttgcttgatagccaggttagaggtttaccaattttattgacatttttaaagaaccagattttagttttgctgattttct

SEQ ID NO: 882627 - DNA, 551 bp, Homo sapiens
accatgtgagcacacaatgagtatgcagctacctgcaagccaaggagaggccaaacttgccaacacttagtcttggacttccagcctccagaatgtgtgaaaatacatttatgttgtttttgttacccagtctgtggattttgttacggcagcctgaacagactaatccatgcttcattccatccacatttgttcaattgagaccagcaggctcaccatgcataaaaaccatggcagatcttgttaaactcccaacttcccaagccccagcccagacattctaattcagttggtccaagactgrgattcagaatgtgggtgacttcagaactccgcctagagaaacagatttcacagcttggcagagtgagcaaagccagcacacagcaggtgcttaataaatgctttctgaatggatgggttaatggatgaacacgctctttcaaataaaagagtacaaagccaaactcagataactttatgacatttctcacttcagcaagcagtgtttggtgagtcaagtggtttatctgtagttgggaccctcatca

SEQ ID NO: 882628 - DNA, 551 bp, Homo sapiens
accatgtgagcacacaatgagtatgcagctacctgcaagccaaggagaggccaaacttgccaacacttagtcttggacttccagcctccagaatgtgtgaaaatacatttatgttgtttttgttacccagtctgtggattttgttacggcagcctgaacagactaatccatgcttcattccatccacatttgttcaattgagaccagcaggctcaccatgcataaaaaccatggcagatcttgttaaactcccaacttcccaagccccagcccagacattctaattcagttggtccaagactgagattcagaatgtgggtgacttcagaactccgcctagagaaacagatttcacagcttggcagagtgagcaaagccagcacacagcaggtgcttaataaatgctttctraatggatgggttaatggatgaacacgctctttcaaataaaagagtacaaagccaaactcagataactttatgacatttctcacttcagcaagcagtgtttggtgagtcaagtggtttatctgtagttgggaccctcatca

SEQ ID NO: 882629 - DNA, 613 bp, Homo sapiens
ccttctgcaaggaaacttggagagagagagagacagagtagagtttgctccaggtacagacctggagattgcagaaggctggtggccttgagtctcacttccagggtgctccacactctctgtgagatgagcagcacagaggaggtcataaggctgtgaccgacaacaaagcttattgcaggggtgaaggagcaggggagaagtgagcaatcacttgcaattttaccaggtgctataaaatcactgacggggactttttttttctttttttaattgaactgcttcccaaggtcaaatgcccaaaacaaaaacctcttcatctggasaaggctttatttcatccaagcatctctaagcatttattccctatctgtcacattttgcatgatgtagaggcaacatttccacttatcattaactaagtggttagacaaggtagttatcaatttcacaagggtggaggtatttaggcaattttcatcaatgacattgtgatgggttaattttatgtgtcaacttgactgggttaagagatgcccagataactggttaaacattatttctgggtgtgtctgtgaaagtgttttcagaagagattaacatttgaatcagt

SEQ ID NO: 882630 - DNA, 597 bp, Homo sapiens
tctatgtatatgcctatctatttatctatgtatctatctttcatctatctgcctttctaccatctaattttcttctgcatatctaccaattatctatctatctatgtatatgcctatctatcgtctatctgcctatctgtctatctattatctatctatgtatctatcgatcgatccatccatccaccccattaggctgtacctgatgggggcagcatcatgttcctcacatggtcaagcatggctgtgtgccaggggccttcaagcaacatttaaagctaaagccaacgatagaaaccataattaataatattttcagacaggttgccaaataacatacatgtaagygaagaccagatgcatttcaaaaatgttcaagaaattgaatgtgaataaattcattgcttaaaagagaatagcaaatggtgcatgctgtgtgatatggtaacgacaacagcaatactagcagtggtcatctatcaagtgctagttatatgctaaagactgtgttaaatgttttgacatccatcaccttactgcatcttcccaaaaccacaggaggtagatatgattatctcaggaaactgaaactcctga

SEQ ID NO: 882631 - DNA, 668 bp, Homo sapiens
tcatacaactagtaaatggaagatctagaaggagaatccaggtcttctgattccaagtgcaaagcctctttcccttatagtagcggaggaggccaagggtgcagagtgtctgaccacaggggtatctgacagcctgactgtcttcaagcctgaacacccttggaagcccctcagtctggggcctgagtccatttacaggagactcctcataaagtccktgaaatttccactttctcagctgcaaggcaagacccaaacatctcccgcaagcctattgcatatttgtagaattaagcagacgagactggctacacaatttgcaggacccagagcaaaatgaaaatatggaggcttttgttcaaaaagcaggaaaaaggtgccattaaagttctaaaatataaagctttttccttccttctgtggtctccctctctccctctgtcatgatggcctttattttttatttaatatcccacttcctctggcatggtgatactggctggtcaagtgctgaccctccctaactcccagtaacagccctgtgacttggcatgcacactcatgtgccccaccacatgcctggatccccaccatcatcatacccaggccagggtggggacgtgtagtcaggcctctctcagtcgaataggtgaccttcagtgacctgg

SEQ ID NO: 882632 - DNA, 621 bp, Homo sapiens
taactggttgatcatcactcatgcatcattgaacaccaacactatttcagacaagatctggttaaattgcaaatgagaataaatctggtgataaatggatatcatatttaatatttaaatgtctctggtatttacacatctctggtagttttgttcttagtcaaytgtttaagtgaatgttgagaagaaatgaaagaaagatgtttgctcctctttgaaaacaattacggtttccttgcaggaatatgcttatctttcacatttcatcagaaacataagaagtctggctagaggcaatgacactgacgggaagagctctatgatggggaaagactgcttgggaaatgcagccttctactatatacactaaaattatcaataacgttgcaaaaagagaattcaattccataaactaatattgatgcacaaatgagcaaaaatcaacaattggcaataaatgacatcttaaatctgcatttgaagattttacaatagtcaaaaataaacataaaaatttgctttcatattttctaaaatgagtatcagagacattgcatcctctcaaatgacagctattgggacaaccatctctaaggctacatcttacgtttcatatttata

SEQ ID NO: 882633 - DNA, 621 bp, Homo sapiens
taactggttgatcatcactcatgcatcattgaacaccaacactatttcagacaagatctggttaaattgcaaatgagaataaatctggtgataaatggatatcatatttaatatttaaatgtctctggtatttacacatctctggtagttttgttcttagtcaactgtttaagtgaatgttgagaagaaatgaaagaaagatgtttgctcctctttgaaaacaattacggtttccttgcaggaatatgcttatctttcacatttcatcagaaacataagaagtctggctagaggcaatgacactgaygggaagagctctatgatggggaaagactgcttgggaaatgcagccttctactatatacactaaaattatcaataacgttgcaaaaagagaattcaattccataaactaatattgatgcacaaatgagcaaaaatcaacaattggcaataaatgacatcttaaatctgcatttgaagattttacaatagtcaaaaataaacataaaaatttgctttcatattttctaaaatgagtatcagagacattgcatcctctcaaatgacagctattgggacaaccatctctaaggctacatcttacgtttcatatttata

SEQ ID NO: 882634 - DNA, 626 bp, Homo sapiens
catgcctttattctagacaataggatattagtaaaaataatgtatacacttccgtatctggctcatgaaaacctctcatcaaaccctccatactcccttcttcccccatctatttagctgtaaatgaggagaaatccagggttgtaaatcataaggtggaaggggcctggatgcctgaatcaccatgtggaacaggccacccaagagagccctgaccaaaaatacctctgttggactatattattatgtgaagccactgagatttagggaacatttatttcagcagtcagcctcccttgaccaaatcctctgtgtccccagcatagaccctgacatacaacaggcactcaaaatgacttattaaatgactggaggacattgaatttccccaggcaagacctgcttctrtgagagttttcaattgttcccccactgagtaagtcataccccactgcactagccaggcctttctggctgtgtctagagatagaactttgaaagcacaaaggaaaggaagaaacattattgctaatcctatgtgttttgttgcagtgtttttttgtttgtttgtttttgttgtttttttggtaaatcccacagctcagtccttatgtccaacattttcc

SEQ ID NO: 882635 - DNA, 646 bp, Homo sapiens
tgatatccagagaaggcatgagaaaaactagtttcttgatgtaattgtttagaattagaagcaccatccaattagcccaggtggcattacagatacttatgttaacaggctctttccaaccgatataatctccctttgctacaatttttcctcatccccttttcattgtcataccacctgccatgaaaattatctatctgtcaaagttacattattaatttaacttgattgctgtcacctattcaacaaattctgtacaaaaaaactaatttgttatcatatagtttctcacatacaagaaattaatgagaaacacmattcttagtaataaaaataatatatgcagaatttacaaaattgaaaaaaatagctctttccactagtgttaattgaaaaatgatttaaagccaatttatttccttaaatagtacaatatgtctgtgtcaggccaagtcaaaaagataagatgttttcaaagctgcaatcttccaaaagctccaaaagctaattgataaaaagggcattttagcaaaactttggagacagtaaaaagatcagaggttaagagggtgggatgaataggaggagcacagagggttttcagggcagtgaaacttctgcatgatgctataatggtggatccatg

SEQ ID NO: 882636 - DNA, 647 bp, Homo sapiens
ttcttttgcatttgctgaggagtgttttacttctgattaatatgatcaattttacagtaagtgtcatgtagcaatgagaagaatgtatattctgttgtttgggggtggagagttctgtaaatatctttcagatccatttgagttctgtagatatttatcaaatccatctaattcaggacctgagctcaggtcctgaatatctttgttaattttttgtctcaatgatctgtctaatattgtcagtggggtgttaaagtctcccactgttattgggtgggagtctaagtctctttgatggtctctaagaacttgctttatgaacctgggtgctcccgtgttggatgtatatatatttaggatagttagatcttcttgaattgaaccctttaccattatgtaaaatataggatgatgtaaayttaggacagttagatctttgtcttttttgttctttgttggtttaaagtctgttttgtcagaaactaggattgcaacccctgcttttttctgtttttgatttgcttactggattttcctccatccctttattttgagccaatgtgattatctcaaatagatgcagaaaaggcttttggtaaaatccaacatccattcatgttaaaaactctcaataaactagttattga

SEQ ID NO: 882637 - DNA, 700 bp, Homo sapiens
cctttacatatacttaagatttcgtgtaatagtgtccaattcgattgaatcagtggtgtcctttaaaagctcattatataaacaggccgatgtgaaatgctaagctggtgacagggcagccccaacctcattagtcagttagatcaccggcaagtctgcctgctgacaggccatgccacaaaggcccactacagagayagattgcactcctccatgaacaatgtattcagtcgattcacaatctaatgagagccaggcttccttttaatagtcccacaacatttcaccctttggcactaaagagaaatttaactgcaatgcactgacttttgtggctgctttctacagagagagaaaggatacaatgccttttaaagcctcagaagtttccatttttagttataagagctagatcctctgtggacagacacctctctcatgcaggacccaaaagatccaaaaagcttttgaggccacagtaatacctggtctttttcagggcaaaacacgagagaatgtgtaaagctagtgggtaaaacttcacagtcttcaattcaagacagagtgagtcagcattccatttgtagagtggcgggaatgcgtgtggggttatggcttgctgagcgtctttattctacaatgtgtgtgatgctcgcagggggtggatgtgcttacaaagaccaatgacaccacctcccac

SEQ ID NO: 882638 - DNA, 578 bp, Homo sapiens
agaagatagacaataagtgaatataaaatatatacagtccaatggtggtcagtgtggggagagaacagggtttggggcatgaggcaaaaaaacaatctattaaaaattaacatccaggataacttaacagtttgtgtacaaaatgtgaaattaggatggtgccttattttttagtatcagcctgtctgctcacagcattttsagaaaatttgaattatttggttttatttgagcctgcgcctcatgattaattttcaggataactttctgaggccagacattgaactgcaaatgtcaaaggcatgttttactcacctatggatccctgtgttgtcttcttgcagttttcagtgaagacctacactccagcctctactttgtcaatgcatctctgcaagaggtagtgtttgccagcaccacggggactctggtgccctgccccgcagcaggcatccctcctgtgactctcagatggtacctagccacgggcgaggagatctacgatgtccccgggatccgccacgtccaccccaacggcactctccaaattttccccttccctccttcaagcttcagta

SEQ ID NO: 882639 - DNA, 578 bp, Homo sapiens
agaagatagacaataagtgaatataaaatatatacagtccaatggtggtcagtgtggggagagaacagggtttggggcatgaggcaaaaaaacaatctattaaaaattaacatccaggataacttaacagtttgtgtacaaaatgtgaaattaggatggtgccttattttttagtatcagcctgtctgctcacagcattttcagaaaatttgaattatttggttttatttgagcctgcgcctcatgattaattttcaggatarctttctgaggccagacattgaactgcaaatgtcaaaggcatgttttactcacctatggatccctgtgttgtcttcttgcagttttcagtgaagacctacactccagcctctactttgtcaatgcatctctgcaagaggtagtgtttgccagcaccacggggactctggtgccctgccccgcagcaggcatccctcctgtgactctcagatggtacctagccacgggcgaggagatctacgatgtccccgggatccgccacgtccaccccaacggcactctccaaattttccccttccctccttcaagcttcagta

SEQ ID NO: 882640 - DNA, 629 bp, Homo sapiens
tgggatcctggtggaggtcctgcctctatggctccattagatattaccctggtaaggactctgcagcagctctgaccctacagttacatacagcattgctctagtggaaactctttgtggtggcaaccccccctgtgacaagtccctgcctgggcccccaagcttttgatgacatccttagaaatctgggtggaggctgccaatcctctacaactcttgctttctgcaaacctgagaattagcaccacatgcatgctgccaagagcctgcagaattagcgctacatgtayactgacatgtgtattccttccagagctgtgccacaagccatacctagggtctcttgagcctaactagggcagttgtggagcaccgttctggagtgcaggaaacagagtcctctggtggccttgggcactgagcctatggagggtgcccttggtctagctcctgaaaccattctgccatcttaggcctctgggcctgtgatgagagaggcagcctcaagatctttaaaatgccttcaggatctcttttttctgctatcttgaggaaaagcacctggctcccttctattcatactaatatgtttagcaaatggtctctgagctacacccttgattttctct

SEQ ID NO: 882641 - DNA, 550 bp, Homo sapiens
ttcatttttttttttttttggcggcataaatatcttcttttgagaagtgtctgctaatatacttgacccactttttgatggagttgtttgtttttttcttgtaaatttgtttaagttccctgtagatcctggatattagccctttgtcggatgggtagattgcaaaaaatttctcccattctgtaggttgcctgttcactctgataatagtttcttttgctgagctgaagctctttagttaattagattccatttgtcaattttggcttttgttgccattgcttttggtgttttactcatgaagtctttgcccatgccaatgtcctgaatgatattgcctaggttttcttttagggtttttatggttttaggttttacatrtaagtctttaatccatcttgagttaatttttatataaggtttaaggaaggagtccagtttcagttttctgcatatggctagccagttttcccagcaccatttattaaatagggaatcctttccccattgcttgttcttgtcacgttttccaaagatcagatggttgtag

SEQ ID NO: 882642 - DNA, 620 bp, Homo sapiens
taacctcttgtattatgtcagagtggggaataagctcagaaaaatataatttatggagaacattttctcattttctgggaccttgtaaagaccttatttgttccaggtgacaggccccaagtggaataaaaggccattattgtgagaaatgacaactcagatatagcaaagttgttgccaggagttgatgatgcagaaacaatttattttgggcaagatggtattgaatggggagtctattagtggtattttaccatgtgaatttctatatgaaccatgtctgtgggagcactgctgcattcatttgtgggatgtactgctttttgctagttgccgtcaataaaatctgttctgtagctcttcaaagtggttgattcagccrctctgtattcaggccataaagatcatgaaatgaaagtcttctgagctccaattagagtggaatgttatatctcaatgcagaagtcttcttcagtaaagtaagtgtaagtataaatttgtttagtgaaaagtaccttttggaaattgtacttttgagacagaggcattcaaactctgactaccgcttgccaggtgggtaatttaggggatactgcttaacttttttgataattgtattt

SEQ ID NO: 882643 - DNA, 580 bp, Homo sapiens
ttaaacacacaggtgacttttcttactctgtcactctgagtttgggggctgagatattgcatttctagtaatcactcaggtaaggctgatgttgttggtatggggaaccatggtttgagaactgctattcaggaagacagcagagaagataagttcctttaktgtgcataggtggaaaacagttggtagagtgattctggaagagtgcatgcatgtgcattcacatgttttattaacatgtgaatatgaaagatattaagcacccatttgtccattttaaatatataattgtatcccttctgtccaacagcatttcactgtagacatttttaagtgtcagttttttagctgaaaaactagaaaaccaaggaagtaaatcattgcccaagctagacttgatcttttcagcatgtcagagtctcatgctttagaaaaccagagaccactctcactattttgtgttcatcctctttctccatttccagtcactttttctgcactgacttcaggttaatcttccataagagggccttggtgttctcatcttattcctatgcccccactaaattctgagtaagtg

SEQ ID NO: 882644 - DNA, 692 bp, Homo sapiens
acaggttggatggaagacctttctgtcctttgtgtatgcatggcttgactctaagctctggcccctttgtctcttaaagaggcctttctcaaggtggctcttgaatatttttaaaagtatttttcaaggctccctgcatccaagcatggcacccatgtgctgtgggtccttctctccctctggcccatgagtgacttatctgagagatgggtttgggaagaggaagcagcrtgccccttttcttatcttcctcctgctctcctcttgtagccccgtagcttgatctctgtagatgctgttaaagtggaaagcttcaggtgaaaatttccttggattggagactctcagtgtcatcttttgacaacatttagcgtttcttggggtgactccgatttctagatgaccccacatcgcatctaatgcacatctaagttaatcctcacagggcttactctgcttatcatttattaaggactgacatttgtataattaagttagggcccatcatctgtttaagattcaacagtaagtgatgtcggggtttacggatgccaagacaccccagctccctgcctatatttggaatcaattaacagaaagatatagagaggggtcaggtggagatcaaatatcatctgtttatgacaaagtctgagcttgacaatgtggtgctgacgggtggcagcaatggc

SEQ ID NO: 882645 - DNA, 749 bp, Homo sapiens
ctcaccctgcttatgggtgcttctcgtgctagccttttgcaagtgtcgggaagtgtaacctgcaggaggcatcagggctttgggcctgcatggtctgagtgctgccctgtgagtttcagaaggcgcagcaacctgtatacctgaaagccatctctgctggggcaggtacctagtgtccccrcctacctgggtcgtagtcaggccctgggcaagcctgctatgcttttccttccctaatccctcaggggtgggatagagagcacagtggcctcccagggaggtagaagctgctccagactaacaatcagagctgccagttcttaatccccaagaccgccagacttcacaaagacataccgaggtctgtgctgtcagtgccccactactacactcccttaagtagccccacattcttgtgcttgtttcttttttctgctctctttccttgcccaggtaagaggtctgcccataaggcatattttgcagcatgtgaagctttttaaaaagttaggcttattgaagtataatttacacacaaagtacaaaaaaaaaaagactgtgttctcaaatctgtgagtcattaatgggtttagatgtttatatattgaaattattggaagtaaggtatgtttatattagaaagatttgtagtctagattatccaagttttgggagtattacctctctgcttttgtttatctacttttttagtctctactttccaagtatctataggcaaattttcccat

SEQ ID NO: 882646 - DNA, 749 bp, Homo sapiens
ctcaccctgcttatgggtgcttctcgtgctagccttttgcaagtgtcgggaagtgtaacctgcaggaggcatcagggctttgggcctgcatggtctgagtgctgccctgtgagtttcagaaggcgcagcaacctgtatacctgaaagccatctctgctggggcaggtacctagtgtccccgcctacctgggtcgtagtcaggccctgggcaagcctgctatgcttttccttccctaatccctcaggggtgggatagagagcacagtggcctcccagggaggtagaagctgctccagactaacaatcagagctgccagttcttaatccccaagaccgccagacttcacaaagacataccgaggtctgtgctgtcagtgccccactactacactcccttaagtagccccacattcttgtgcttgtttcttttttctgctctctttccttgcccaggtaagaggtctgcccataaggsatattttgcagcatgtgaagctttttaaaaagttaggcttattgaagtataatttacacacaaagtacaaaaaaaaaaagactgtgttctcaaatctgtgagtcattaatgggtttagatgtttatatattgaaattattggaagtaaggtatgtttatattagaaagatttgtagtctagattatccaagttttgggagtattacctctctgcttttgtttatctacttttttagtctctactttccaagtatctataggcaaattttcccat

SEQ ID NO: 882647 - DNA, 665 bp, Homo sapiens
aaaggtaaaaatacaaaaaaagtttatagaacacatatatatagaaaaagtattttttgtacaacatacaatgtctttgtgttttaagctattatttccaaaaagtcaaaacgtttaaacaaattttgattttataaatttaaaaatttatacattaaggttactttattattgaagaaaaactttttaaaaataaatttagtgtagcctaagtgtacagtgtttataaagtctacagtagggtactgtaatgtgtgaggccttcacactcactcaccactcactcactcactcctgaaggcagcttctagtcctgaaagctcccttcatggcaagtgccctacacaggtgtaccctttaaagaaatcttttataccatacttttactgtatcttttctatgtttagatatgtttagatacacaaataccattgtgttacaattgtctgcagtattcaggaaagtaacatgctgttcacatttgtagcctaggagcaatagactwtaccatacagcctaggtatgtagtaggctacaccatctaggtttgtgtaagtccctctgttgatgttcacacgatggtgaaatcacctagcaaagcatttctgagaacatatccccatcattaaccaatgcatgatgacaggtaaaaaggttgattactg

SEQ ID NO: 882648 - DNA, 633 bp, Homo sapiens
tttgcctgacttatttcacttaatagaatgtcctccagttttgtccacattgttgcaaatgacagtaattatttttaatggcttaatagtattctgttgtgtgtatgtaccatttttctttattcaactgttaaaagacacttaggttgattgcatatcatggctgcagtaaatatgggagtgcaaatatctctctgatacactggtatcctttcctttgattatatacccagtagtgggattgttgggtcatatggtagttctgtttttagttcttgaaggaacctccacactgttctccatagtggctgtaccagcttacattccctcacaacattgtatgaaggctcctcccctctctccaaatctgtgctagcatttgttattgcctgtcttttgaattaawctctttctgctgttaataatgtaataatgtatttacttagctccatttttctctttgatattaatttccattttgcaaaagaagtcacattaagaaatgtttattaatttaaaatctctttactaattgggctttgccagtaggtaataaactatgggccatgaggttattcaatcttgcagtattttttccaggaaggtggtaaaatatgaccatagaacaaacta

SEQ ID NO: 882649 - DNA, 676 bp, Homo sapiens
tgactgttggcagtcgatcattggatttatacggtttggcattgatcttggagaaggccagtttggtgcccacgtcaaacatgcccaatattctattgtccatgtgactccctagaattaattagaaaacatttcaaaagggccactctaggatttaatactatcaataatagttgtttaacccaaaatatgatgaatctttgctttatttatttctaattgggcagttttgcattttgccgagtaggattaataagcaggttaagtctaattggcttgctttgactgaagggctgaatcatttcaatatagaaacctgtactttttataatttgaaaaaaatccacccaaatcaatcctgaacaatttttattttactttctcaatttttctttttaggtcatttaaacatcttgggtccttttacatgaacagcaagactgatgctttttgaagaaaagtctgtcttcagatagaaaaggcttctgtttgtatagaacaattagctaaaattagcatgtaaatttgaacaatatyatattgtgaagctgattgggcctggaggttgggatgcaagtaacttctcttgtttattgtatgcaaatatagccacttagctttaattggacattgaaacccagaacaattatcaacaattgctttagtattaatgcac

SEQ ID NO: 882650 - DNA, 630 bp, Homo sapiens
agaaaacacaatgaagggaaaccacaggcaattctgacaggcaatatgatcgggtttcaaaatacttcaaaaccccaatctttacattaagactttgcttgtaaatatttacattgattgcccagatggtggcagaattggagaatgtggatcactttttttttagaaatgtctcttaataaacttaaagattcataagccacaattgcaaactttagtaaacacagtactacatgttcatgtgaaaagttttgcagctataattattattagttttttaaatcagagcaatgggaagtgaaaagatacaagttttcttcagattttgaggacagcaccttcctgcactatccrtcactaagataagcctgggtcttggttgcttctaaaatagttcaattcaagacaatgaacttgtgttgactaccaacgatgtgaccttcattgtgccaatgatacaaaatcactctaaagtgtagccaggcaaagaattacacagttaaaggagaaaggatgtgactccttctaagtaggtataatcaggatcctcagcagctcttctcttacctggtcagctgcagttatctcctaaaagttcttcttgcttccacttttctttctctctaaacc

SEQ ID NO: 882651 - DNA, 608 bp, Homo sapiens
tcttcgactaaaggcattttgtagactgcttaccgtgtaaaacaaaagggtgcttgatctttttgagaacttatttcatgtttttccacaagcaacatcccagttaatgttctttgctattatgtctcaataaacatctttgtgcatatacctttgtcctattatttttgtaatatattttcagaaataaactgctaaattaaatagtatgtaatttggaaagatattgagatggctgtcctgaaagttattttcacactacatttccataaaaaatatatgtgtctgttttyttgcatccttgctagcactttaccttaaaatattttaaaacattttaaaactttttaaaactgcaaatttgtcaggttgaaagacaacagaattttgatatttttataataactaatgaaaaatttttcctgcagtcatttgtttttcttattcagtaaattgcttatttttaatctctgcctaatttcctaatagggtattatatattatgatcatattactaaataatataatattagggttttgttataggacatcattcattatatactatgaatgttgtttgtctattgtatatattgtgatatttttct

SEQ ID NO: 882652 - DNA, 630 bp, Homo sapiens
ccttcagtaaacttttatagtgttcttcacagagattttatagtggtatagtttttttttaggttcatgtttaggaataatatagtttttattttttataggactatgaatagggctgttccattcaaacatctgattattgctaacgggatttactaattttgtgtactaatattgtaatttagtcatctactacgctttgttattgctaagttcttcatttggtgctctsaattttcttggatagataattatatcatttgcaaatcctgataatttgcttgcttgctttcctatatttacctctcttctttttcttgactcattgtgttgactggaaacttcagagcaatgtcaggtaatggaagtgacagcaaatattctcgttttctctttgacttgaatagaagtgccgcattttcaccattagagatgatgatgctttcttttttctgttagtctgaatcactttaaggaagctctattcataatacagggatagatatattttatgactttctatcatctatagaaacaaatgtatggttttaatctattgacatatcaatataacaaactaaagtattagatttcctaaattgtgtaatccttgttttcttggaataaagt

SEQ ID NO: 882653 - DNA, 630 bp, Homo sapiens
ccttcagtaaacttttatagtgttcttcacagagattttatagtggtatagtttttttttaggttcatgtttaggaataatatagtttttattttttataggactatgaatagggctgttccattcaaacatctgattattgctaacgggatttactaattttgtgtactaatattgtaatttagtcatctactacgctttgttattgctaagttcttcatttggtgctctcaattttcttggatagataattatatcatttgcaaatcctgataatttgcttgcttgctttcctatatttacctctcttctttttcttgactcattgtgttgactggaaacttcagagcaatgtcaggtaatggaagtgacagcaaatattctcgttttctctttgacttgaatagaagtgcckcattttcaccattagagatgatgatgctttcttttttctgttagtctgaatcactttaaggaagctctattcataatacagggatagatatattttatgactttctatcatctatagaaacaaatgtatggttttaatctattgacatatcaatataacaaactaaagtattagatttcctaaattgtgtaatccttgttttcttggaataaagt

SEQ ID NO: 882654 - DNA, 663 bp, Homo sapiens
gctaagataaaagtcggtgttattgaacttgggggcatgaaaaatttagtgcatgtgggaagacaaggaagggatcaacactgagaatgtactgtaggggaggcgttctgcaaacatttgtaaaagcaatgtgtgttaattgtcgtagagagacaactactccttaaccagttgtttttgctgatgatgaatggagatgtttaaagaactatttcaaaagcaataacagatttatccaggagacaaaggcatgtgcattagtgctagggtttcagtccaaaatgggggaatttcctaatagatatcacagcccaaggaataaacagtataaaatgactgtrgacgtggagagtttcctgtggctatggaaacctctgctgacttcttacaactttggaagattcaaagaaagtcttaaccattattttacctaatacagtgagaaaaactgagatatttcacagaatggaacaaatgatgttaagtttatatttaaaagagaacagtagatttaaagctgagagcctctacaattaccaatactgcttaccaggtatgtatacatagaaattcagatgcaaaactgaagagagagaccatgcttttagatacagaacatagcccactgaatatagaaggggtggtgagaaagcaaaaataatg

SEQ ID NO: 882655 - DNA, 544 bp, Homo sapiens
actatgaactacataaactgacagtgtcttatctacttgtatttattagtttttaatatgtaagagctttgctgtggtttattgttatatgattggttttgtcatctatatatcaccaaatacctttccattcagagacaacttggagaacagtggtggggaggccatattttatgatacttttatgcttctccaatctgtattagtaatagactgcttctgaactcaaattaataaaaagtccttgctcaagcaaatttttaattatcactaarcttattagtttgtacttttcctgaggaagacagaccactgttttgacttacagaccataatgtcctaggtcttgcaaactaaataaggattctaattttatcataaaatattgactcaaattgactgggagatattatatatcacttatagaaacctatgaattagctatttcaatttaacaaaaatatttcttgtcaatcattgataaaagaatcaatataactgtggcaatattttttagatctcagttctcttattttctcattga

SEQ ID NO: 882656 - DNA, 544 bp, Homo sapiens
actatgaactacataaactgacagtgtcttatctacttgtatttattagtttttaatatgtaagagctttgctgtggtttattgttatatgattggttttgtcatctatatatcaccaaatacctttccattcagagacaacttggagaacagtggtggggaggccatattttatgatacttttatgcttctccaatctgtattagtaatagactgcttctgaactcaaattaataaaaagtccttgctcaagcaaatttttaattatcactaagcttattagtttgtacttttcctgaggaagacagaccactgttttgacttacagaccataatgtcctaggtcttgcaaactaaataaggattctaattttatcataaaatattgactcaaattgactgggagatattatatatcacttatagaaacctatgaattagctatttcaatttaacaaaaatatttcttgtcaatcattgataaaagaatcaatataactgtggcaatatkttttagatctcagttctcttattttctcattga

SEQ ID NO: 882657 - DNA, 641 bp, Homo sapiens
tacttttcctgaggaagacagaccactgttttgacttacagaccataatgtcctaggtcttgcaaactaaataaggattctaattttatcataaaatattgactcaaattgactgggagatattatatatcacttatagaaacctatgaattagctatttcaatttaacaaaaatatttcttgtcaatcattgataaaagaatcaatataactgtggcaatattttttagatctcagttctcttattttctcattgagcagagatcctcagaggctatttttctaagacagagacatgggagtgtggaggcctacaacaccacagggatgattcagtgctcaggagagcacgatccacagaggatagacagtaygtgttgcttttggtcataatctgagtaaagaggttcaatcatcgttgtctttggccaggagagcatatgcgtttctactcacttattccataaggaaagatcaaggtcaaggacaaggacattttatttaactccagttttgggaacagtgctttcattctgatgagcaagtcaatcagttaagttcagagtgcatgtagggtatcctgtgctctatttctttagattttctcttttatatgtagctggtgacaaggtgcagtgctc

SEQ ID NO: 882658 - DNA, 560 bp, Homo sapiens
tataaattaatacagtattgtagggaaaagttagcaataagtctcaggaggtttttttaaaatattgatggtcccatgcctaataattctatgtgtgggaaaacatctaatgtaactgaccaaaactttagatacagacttatgtgcaaagatgttcatcacagacayatgtaattgcataattgcaaagaaagaaaagaaaaaggaaatgaaatagttaaatagttctaattccccaaattataagtacataagtaaatcatggtatatgtatatgttggcatattatgtgattgtattaagtaataattgtgaagatttcttaacaacataaaaaattatgatatatgagctggattaaccaaagaatacaaagttgtaagtaccatacgtcaattccattgaaatgcatagattaaaaactgaaagactgtatgtgaagtattaatattggttaattctgggggctttacagttaacttattttccatataattttctgtatttcccaaagatgcaataatgaatacatattacattttaactaagcaaatacatca

SEQ ID NO: 882659 - DNA, 686 bp, Homo sapiens
aagaaaattaggccttggagaattagctgaagtccctcagaggataagacaataatctccctaccaagttcaaacggtcaaaaaatctgagaaaaacaagcaaagtactagaggcttcgggaagctgttgcagagtaaggactagtgtccacgttgatacacaaggaaaagatgacacaaataagcaggaatcaagtcaatctccagcttaaaacccaccaacttctccaatactatggtatggggccaaaaaagtagtaagcctacttttcaagatggcacctgtccaccttttctgcaacattttcaaaactctgcctttcaagcagatgcaccagcagtgtccaagaagtttagaacacttcacatgctatattgattttaaaaaacctgttggggawaaataactgtagactcatgggaagttgcaaaaataatacagagaggtcctgtgtacccattacccagtttcccccagcaatgacatcctatataactataatgcatcattgaaaccagaatgttaactctgctgtttgttacctcagtagccttgctcaagctgatccttctgtttgcaataatgctcattacctagtctcagtcagacatcacctcctttagtaattctttgttagccttaaattctattcacatagcaccctgtgtatatttgtatcacaaca

SEQ ID NO: 882660 - DNA, 562 bp, Homo sapiens
tttataggtttaattgtagggattttttttcacttctttggttaaatgtatgtccagttttttaaactttttatagctatcataaatgagattgctttctcaatttctttttcaggtcatttgctgttggtgtatagaaatgctactgattttttttaaattttttaaatttttttttttttgagacagggtctcactccaatgctcaggctggaatgcagtagtgtgatctcatctcactgcagccttgaactcccaggcttgggtcatcctcccacttcagcctttcaagtgtctggaaccacaggggtgtggcamcatgcctggctaatttttgaaattttttgtagaggtggcatttcaccatgttgcccaacctggcctccaattcctgggctcaagtgagctgcctaccttggcctctcaaagtgctgggattacaggcgtgagccatcaggcccatgctgatttttgtatgttgattttgtatctcacaaatttactaaatactttatcagtgctaacagtttttgtgtgtggaatctttagggttttctaaata

SEQ ID NO: 882661 - DNA, 562 bp, Homo sapiens
tttataggtttaattgtagggattttttttcacttctttggttaaatgtatgtccagttttttaaactttttatagctatcataaatgagattgctttctcaatttctttttcaggtcatttgctgttggtgtatagaaatgctactgattttttttaaattttttaaatttttttttttttgagacagggtctcactccaatgctcaggctggaatgcagtagtgtgatctcatctcactgcagccttgaactcccaggcttgggtcatcctcccacttcagcctttcaagtgtctggaaccacaggggtgtggcaacatgcctggctaatttttgaaattttttgtagaggtggcatttcaccatgttgcccaacctggcctccaattcctgggctcaagtgakctgcctaccttggcctctcaaagtgctgggattacaggcgtgagccatcaggcccatgctgatttttgtatgttgattttgtatctcacaaatttactaaatactttatcagtgctaacagtttttgtgtgtggaatctttagggttttctaaata

SEQ ID NO: 882662 - DNA, 635 bp, Homo sapiens
ttagggagtttaacaagagtgtggtttttcttgtagggatttagaaatttgccatgtcagcaaggccctaaacccctgacccataggtagcattttgtttctttaaccttaaagtccatcttagtttgtaaaggggcatctattttggtctctcagatcaggtggggaaggccttactgagaaggtgctgctgcaagacctgaaggaggtgaaggaggaagttgagygcagaagtatgactggtgggatgtgctgtgaacagcgagctagcccatgtagctggaacagagtcagcaagggtgggagaagtaggagatgaagggtagctgatggttatggaacttcctggaccagtgtaatgactttggcttttattctggagtgagagctcatctttaaaatagagaagcgcatagatctgatttacagtttaaaagaatcgctctggctgatgtattgaaagtagattctaaaacaccaaaatctttgtgtgtttgttaggattagtctaggttgcagtcataagaggtcctaaacagcaatggcttagaaaagacagattattatttcccaaagcagtttaggttgtgatcaggactggtaaaatgataacacagcgtcaggactctgttatt

SEQ ID NO: 882663 - DNA, 617 bp, Homo sapiens
caggtcagtgcccaggggtataatgtggcagtaatgggagcactatgcagaatgttccagtctgcttgttctttcctgaactggatgggctttttgggcagtaaaagaggtcatgaaaagtttgttgtagacaaaacacagacgagcacagtgggtaaagttgtgggctttggatatagagagctcactccaagtgcctctcctgccattcactagcactatgtatttgccatgctctttaatctctgcacatcagtttttttttttaagtggaaatgctaaaaatagtacttaactcattgatatgtaagaattaaataagattatycatttcagagtttagcttagtgggacacagtaagaattcaataaatataagctcattgagctttctaatgcttttgtgcaaaagccatatttaggaaacaaggctcaagggctgcgtcagctcctgcctacggagttgacatttgttgactctggacacaagaatggaaatgtgaaagtacaatttacgcaaagatctgattgagtttgtggacaagcaacccatgacataattttgatagctgattattgctcagtaagtgatttgactcttgaaaaagaatgctttt

SEQ ID NO: 882664 - DNA, 617 bp, Homo sapiens
caggtcagtgcccaggggtataatgtggcagtaatgggagcactatgcagaatgttccagtctgcttgttctttcctgaactggatgggctttttgggcagtaaaagaggtcatgaaaagtttgttgtagacaaaacacagacgagcacagtgggtaaagttgtgggctttggatatagagagctcactccaagtgcctctcctgccattcactagcactatgtatttgccatgctctttaatctctgcacatcagtttttttttttaagtggaaatgctaaaaatagtacttaactcattgatatgtaagaattaaataagattatccatttcagagtttagcttagtgggacacagtaagaattcaataaatataagctcattgagctttctaatgcttttgtgcaaaagccatatttaggaaacaaggctcaagggctgcgtcagctcctgcctayggagttgacatttgttgactctggacacaagaatggaaatgtgaaagtacaatttacgcaaagatctgattgagtttgtggacaagcaacccatgacataattttgatagctgattattgctcagtaagtgatttgactcttgaaaaagaatgctttt

SEQ ID NO: 882665 - DNA, 628 bp, Homo sapiens
atggctattcctaaagcctgcatttgctttcttaaggttaattcctctagttcctggagatcacctttaatttgacctatgatttggggttggccaactgaacaaaacctcatagggtaaatactcagtttgtttggtgggggtgcacctgtctcggaggaggaccataggcaaaacctgaacttatctcagatgagcttcctggcaatatttcttcagtagctgcttgagtgtccacttcatgcgttccacttttcctcaactatgcagccaataggctgtgtgtaacttccattttatttttaacagtcttgttaaatctcgtactatttcagctacaaatgccggcccattgtctgactgtaaagatagaggcagtccaaacctggggataatatcttttaacagtactttagtcatttgtcrtgctttttctgtcctggtggggaaagcttcaacctatcctgaaaaagttgcaaataaacactagaatataccgatagcttctggcacggggcatttcgtttaagtctataaggaagttttcacaaggcatggctccttctcctgttctgtttcccagaggaggggttccttttctcctctttttgtaacttcatataatagc

SEQ ID NO: 882666 - DNA, 628 bp, Homo sapiens
atggctattcctaaagcctgcatttgctttcttaaggttaattcctctagttcctggagatcacctttaatttgacctatgatttggggttggccaactgaacaaaacctcatagggtaaatactcagtttgtttggtgggggtgcacctgtctcggaggaggaccataggcaaaacctgaacttatctcagatgagcttcctggcaatatttcttcagtagctgcttgagtgtccacttcatgcgttccacttttcctcaactatgcagccaataggctgtgtgtaacttccattttatttttaacagtcttgttaaatctcgtactatttcagctacaaatgccggcccattgtctgactgtaaagatagaggcagtccaaacctggggataatatcttttaacagtactttagtcatttgtcatgctttttctgtcctggtggggaaagcttcaacctatcctgaaaaagwtgcaaataaacactagaatataccgatagcttctggcacggggcatttcgtttaagtctataaggaagttttcacaaggcatggctccttctcctgttctgtttcccagaggaggggttccttttctcctctttttgtaacttcatataatagc

SEQ ID NO: 882667 - DNA, 648 bp, Homo sapiens
ttaggaaacttacaatcatgacagaaggtgaagcagaaacaagcaccttgttaacatggtggcaggagaaagagagagaaagagtgaaggaggaagtgctacacatttttaaaccatcagatctcatgagaactcactcaatatcatgagaacagcaaggggaaaatctgctcccatgatccartcacctcccaccaggcctctcctccaattcgacatgagatttgggaggggacacaaagccaaaccatatcacaagcttttaaaaagtaacttataaatgatataaatgtatgtgtagaaaacaaaagaatttacagacaaagtgttagaatcagtaattttaaaagctaaggtcctgaaattattgtgacagaggaagcagatagcctaacatgtatattttattatgttttattgtatttttaattgacagataataattctatttatggggtataatatgttttgatacacgtatacattatggaatgatcaaatcaggctagttagcatatctcacttccaatatttatcatttctttgtgatgaaaacatttaaaattctcttttagctattttgaaacatacaatatgctattattaattatggtccatgctggtcaatggattgccagaacttattcc

SEQ ID NO: 882668 - DNA, 648 bp, Homo sapiens
ttaggaaacttacaatcatgacagaaggtgaagcagaaacaagcaccttgttaacatggtggcaggagaaagagagagaaagagtgaaggaggaagtgctacacatttttaaaccatcagatctcatgagaactcactcaatatcatgagaacagcaaggggaaaatctgctcccatgatccaatcacctcccaccaggcctctcctccaattcgacatgagatttgggaggggacacaaagccaaaccatatcacaagcttttaaaaartaacttataaatgatataaatgtatgtgtagaaaacaaaagaatttacagacaaagtgttagaatcagtaattttaaaagctaaggtcctgaaattattgtgacagaggaagcagatagcctaacatgtatattttattatgttttattgtatttttaattgacagataataattctatttatggggtataatatgttttgatacacgtatacattatggaatgatcaaatcaggctagttagcatatctcacttccaatatttatcatttctttgtgatgaaaacatttaaaattctcttttagctattttgaaacatacaatatgctattattaattatggtccatgctggtcaatggattgccagaacttattcc

SEQ ID NO: 882669 - DNA, 554 bp, Homo sapiens
tcttgcataggacccaaggatgagtaggaatgggatgacaagaatgagccctcccatgataaatatcacccattcattaactcgagtgtcagagaaggccagcttcagcagagcagacatatcacagaaaaagtgggggatcacattgtctgcacaaaaacacaacctggccatgagtaaagtgtgtaacatggcatggaaggtggtcagcacccaggacagcgccaccagggygagacagagcatggggctcatgatggcggtgtagtgcagggggaagcagatggccacatagcggtcataggccatggccacaaggaggaagctctccaggtctccaaataacaggaagaagtacatttgggtcaggcagtccgcataggggatggatgggtcctggttctgcatgttctgtaacaacttgggaatggtcacggaagagaagcagaggtcagagaaggacaagttgctgagaaacaaatacataggcgtgtggagatgggaatccagtcgaatgaggacaatgatgaggaggttccccaggagggtggtaa

SEQ ID NO: 882670 - DNA, 621 bp, Homo sapiens
ttcctatcaaatagaaatgatattctttcatgaaatagaaaaaaaaaatcctgaaatttatatggaaccacgaaacaccccaaatagccaaaccaatcctgagcaaaaagaaaaaaactcactgtatcacactacgtgacttcaaactacactacacaactatagtaatcaaaacagcacggtacaggtataataacagacagaccaatggaacacaatagagaatccagaaataaatccatgtatttacagccaaccaattttcaacaaaaacaccaagaacatacactgggaaagtcagtctcttcaataaattgtgctgtgaaaactgaatatctacatgcagaagaataaaactaggcccctacctctcaccatatacaaatattaactcaaaattgattaaagacttaaatgtaatacccaacactatgcaactactagaagacaacatagggwaaatgtttcagcaacttactctgggcaaatattttatggataatacctcaaaagcacagccaacaaaagaaaaaatagaccacttggattatatcaaactaaaaagcttctgcacagcaagaaaaccatcaacaggatgaacagaaaacctgtaaaatggga

SEQ ID NO: 882671 - DNA, 579 bp, Homo sapiens
ataaaatatagaaagctatagaatttgaataaaataaaattgcttaaaaacaataaaatcaaaaaaacaaaaattcacagtaaatattatcctaaagagtgaaacagtgatctattaaaatcaagaataagattggtctgacttgtgtacaatgttattaaatgttgacttgggggagtcyagtaaatgtaataagataaggaaatgaaataattgatataagcattcaagaggagcatatatttctttattttcataatatatttgcattttaaaaatactaatattaagagatgaatttgggaagattgatgaatacaaaatcaataattttccaattatataaatatagatgagtacaaatgaagggaatgtttttgtagataatttgaaaaaatatgtatattcaagcttaggaaaaaagatggagggtctaaactgtatgatttttgatgggttaaaaataagatctaaacaaatgggaacttaatgttctttaataaattaacaaaatatcaaaagagtaaatgtttccgaacttaatgcatacatattttattttattttgcaaatgaaaaa

SEQ ID NO: 882672 - DNA, 613 bp, Homo sapiens
aacaatgtagtacatttttggtgaagtcactttttttttagtttatgggatatgcccttttattttggggatgtgaaaagaccttttctttttaagagaatatgatgatataaagtgtcagtttttagtttttgttctttcttggtagtagagaaatacagttagccaatgttagtttccaaaattgctttaratatattagaggtaaataaactctgttaatctgaagatgactgttgcagatgttagcttcgtttcctttaggagtaaagtatttgtatgattttatccactttttattctgatcatttatcagaaaaaattgcaaatagtagctctgagaccatataatttatttttattcagcattaatcaagatactttgattgtacagttttgaccctgaggccctttacctctatgttggcataatcggaattagacaaagactgcagcatttttatcaatggagtatttttcagaagcaaacagtacgggggtcatataattcctcgattcattttttcttcagcacagttaaaccattccttattttttcaattcagttttatcttactgaattatttttaacaagatcaattctgctccatat

SEQ ID NO: 882673 - DNA, 641 bp, Homo sapiens
tcaaggaaatcactggggtcaagtaatgcaataattgtgattgccagcctcaatgactacttcttttgtgccagacaccttgctaagtgcttttgcgtatgttagttctttataatgcttacatcagtcctaccaggcaagtagactgtccccattttacagatggggaggttagggctsgaagagattggctaacatgcctgagctcatgtgtgcaagagccaggattgtcatccaagtctacctgactctagaacctgcctcttaacctctatcctatctatggtgggggcagagaaattggagatgtctgtgtctagagtgttttccaacataggaattgacagatttctctctcctcctgtgacacacttttctctctcctaccagatgatgggacatctcatttaggccagtttctgttttgatttcctggtgtcctctgagatgcagatgtgtattcctttccctggtgggtcgtgctgcagtgtgagaaggacagcttccatttctttccctaggaagttgatatatgcatcctgtttcctggcagtgcccatctgctatgaggactttcccaaggccctcaccctgccgtgtgggagactactgcaggtgccaacctcatggcctaaagctgg

SEQ ID NO: 882674 - DNA, 659 bp, Homo sapiens
cttgaatgctccattcagagttgggctcttcctccatgtacctctctaacaatttatatggaagttaattgggacttggaccactcccctctactagattgcacgtacgttgaagacaaatgtattcatttgttaacatccagatgtgtctagcatagtgtgttccatgcagaaaggactcaaaatctctaatcctcttatcttgctgtcatttatcttcctaaaagtgaaaataaagcaaaattaaaattaaatcgggtcatgtagctcatctgttccaaagttttgggtagattcttcttgtataattgtcaaggtgccttccctgctttattttcagtgggcataccccctctgcccacctatcacccctgccagctcccccatctccaaaagtcccaaagtcactctgcttgcatccacactgcattctcctgcctttggacttttgctaaagctctattytctttcttaaatgtccttgaacatgcttctccctcttatccttgaagatccaagcctcctaagtctgccagactttgtgctgtgttataaggtacctatgccaaactgccttgagtcacgtttactcatgtatttcaatccactccccaacacctgtcccacaaaggaccaagacttgtgtctttgccctctct

SEQ ID NO: 882675 - DNA, 650 bp, Homo sapiens
ttccctgctttattttcagtgggcataccccctctgcccacctatcacccctgccagctcccccatctccaaaagtcccaaagtcactctgcttgcatccacactgcattctcctgcctttggacttttgctaaagctctattctctttcttaaatgtccttgaacatgcttctccctcttatccttgaagatccaagcctcctaagtctgccagactttgtgctgtgttataaggtacctatgccaaactgccttgagtcacgtttactcatgtatttcaatccactccccaacacctgtcccacaaaggaccaagacttgtgtctttgccctctctgtcactcattctacacaagctcagtactagggccagagtcgtacytaatgaatgcttacaaaattaagtaatggtttaactgaactaaacaactgattttagatatggggggaggggagatagacaggattagattttcaacactgatgttagtaatgaaatctctctacttactaacatgtaccccttttcacaaccctcatgaccccaaatcactgagcaaaggagtcccaatgggtcatgaagtaagaccacgtgttctggctccacttccctcctcactaaggccttctcttggccctgtgtgtgcaa

SEQ ID NO: 882676 - DNA, 587 bp, Homo sapiens
ctgggggcctacatgattcacagactgcccattgtaagttgcttgtaattatcaataggaaactcatgtgacccgtgagccccaagtcccacccccttgcccaaatttatcagggcttgccttacacactggtggttgctatgggcttgggtgactcccaacagcgatgacaatatacattctcagtaacctggagctggcactgaggctgcagccctggacatggggtgtcctctgggtataatctcacttaactttactctgcaaatgcaatgttggtcttgccatccctgtgttgtgttcagtcttrtttgatctcactctccctgttacccatctgtataatcccctgggaagaatgagatctaaacaaaaacaaaggagaaaatgcttaagaaatataatctgactgtctaacaaagcagatagttaagtctctggtggactcctttgttttatttggactagagggaggaagaaaaaagcttgggactgctgctggaggaacagaagtgcattaggaggctcatatttcacaactggttgccagtgtctatattggctgatggctctggtttccagctggc

SEQ ID NO: 882677 - DNA, 619 bp, Homo sapiens
agggcataagtgggtgttttggggggaattggtccccagaatttgtagtccaagacatgggtaatttgaaaaagcctcctagggcaatgcttttcagactctcatgtgtgcaggaatcacctggagattctggtttakaagtttggggtagggcccaagattttccctttctaacaagctcccaggtgatgcccatgctggtccatggaatacaatatgagtaacaagaagctaggtctgtaaaggcccagataggaaatatttttggctttgtgggctgtagagcctcctttgcaactactcagctggtgttttatcaggaaagcagccatagacaatatgtaaaaaatgagcgtgactgtgttccagtgaaattttatttccaaaagttgagagtggataggatttggcctgtggctggctgtcatttgctgaccctgagttaggtgattctcatgtgctcccttctgtaaagataatctctggtgcaaggaagggaaggcttgtactagaagtctacgatttcaggagttcagaaaggattgcactaaatcccttactgccaaacacagatttctctctgctcgtaattattcagatcttcaactaatatttggtt

SEQ ID NO: 882678 - DNA, 580 bp, Homo sapiens
taagctccctggcagttctattaggcagtgatgcttgatgcttgctgcacattagaatcatctgaggaaccctaaaaaaatacctgtgcctggcctcatccccctgggttgcaacgtctgcagtgggtggctattgtggctattgttattttgaactttcttgatgattccactagatatccagggtcgagaagcacagcatgtctttggctccaagcaggcttgctagccctcggaatgaagcccacctctctacttctggctttatcacttggcaaaaaagcacttgttaaaaatgcacacacatgtgggtttgccctcttcatggttcagcaccagaatttaagcagctggyggacaagacttatccttggaacaacatccaacattcctaccctagggcatattggagtctctcaaccaatgagggcccacaaataaagcagtcagcatttacctccagcaactgcatttaggattctctcacatgacaacatttcctaaacaggtagtcaaagccagagaaagagatgctgactttattaaaattcctctgggcatgcccactgactcacaacac

SEQ ID NO: 882679 - DNA, 553 bp, Homo sapiens
aaagtgctgcttttctgtagcatcaggtccctggggacaggccctgagtgttgtacctactctagctctgaagggcctggggcagatgtgtcagggacttctgagaagatggggttgttttcaaatgggaaggccattaaaggctttgggacacttgggaggctragaggggatgctcaggagagggaaaggccatgggtgctggctcagcaacagggatctgaaactgctgatgctctattgagacctgaagcacgggtgatggggaaaagcaggcatcttctgatgcatgattctcccagcaaccagaaggccccacaacctctggctgatctctgactacagtcttgactgcggctcttgcccatcctagggtcactggaatcagatgtccatcttcccaactccagaaggttggcctaagtctcatgtcctttgtatttgctcctaaaatcaggccccactcttacctggggcctggtctcctccctacctggtctcctggtctgcctcagtaattctcataatcacttgctatttccactggggaaaa

SEQ ID NO: 882680 - DNA, 553 bp, Homo sapiens
aaagtgctgcttttctgtagcatcaggtccctggggacaggccctgagtgttgtacctactctagctctgaagggcctggggcagatgtgtcagggacttctgagaagatggggttgttttcaaatgggaaggccattaaaggctttgggacacttgggaggctgagaggggatgctcaggagagggaaaggccatgggtgctggctcagcaacagggatctgaaactgctgatgctctattgagacctgaagcacgggtgatggggaaaagcaggcatcttctgatgcatgattctcccagcaaccagaaggcccyacaacctctggctgatctctgactacagtcttgactgcggctcttgcccatcctagggtcactggaatcagatgtccatcttcccaactccagaaggttggcctaagtctcatgtcctttgtatttgctcctaaaatcaggccccactcttacctggggcctggtctcctccctacctggtctcctggtctgcctcagtaattctcataatcacttgctatttccactggggaaaa

SEQ ID NO: 882681 - DNA, 585 bp, Homo sapiens
tgtacttagtatatcagaagctcgtgatttcctcaccattgaaagggagataaaattgcccaacctccctggctcaaaaggttggataataagaagtgagagaagggaaatacaaagaagagtggagtcgttgcagaagggtttgtggagggggcgagagggtactaggatgctatgtggtttccatgtattacctcatttagctcataagtatatggagtaggtattcccattttgtagatgaggaaactgatgttctgagagattaactgaatcactctaggaaaaacgtgtcggaagtcagttgagcccaggtgtgcatggcatcaaagctcatgtttttcaccacaccaggtcctctgtgttttytcagatacagaactattcattaccgtcacctgggaacagcttggaaatgctaattcttggctcagcctacacctatgcattcagaggctacggttaacaagattcccaggggattcctatacacattctaagttgagaagcataaaacttggggacaaaagcctcccctatttgaatctgacccctccatttgttggccagttgacactgaataag

SEQ ID NO: 882682 - DNA, 570 bp, Homo sapiens
acttgttcatgttgacatttagtcttgccttttcggtggtgatttaaaaattatgtatatcttgtttggaatatagtggagctatggtgtggcattttcatctggctttttgtttagctcagcccgtcctgttatgggcagccttgaagctcagtagctaatgaagaggtatcctcactccctccagagagcggtcccctcacggctcattgagagtttgtcagcaccttgaaatgagtttaaacttgtttatttttaaaacattcttggttatgaatgtgcctrtattgaattactgaacaaccttatggttgtgaagaattgatttggtgctaaggtgtataaatttcaggaccagtgtctctgaagagttcatttagcatgaagtcagcctgtggcaggttgggtggagccagggaacaatggagaagctttcatgggtggatctctactccaaatctacctatgtcacatatcactcatgccatcacattttacgttgattcagtagagggaaaaggttctagtctactgacaaagaaaaagttgattacttgtcttctgtcttct

SEQ ID NO: 882683 - DNA, 604 bp, Homo sapiens
ggaagagtaaagcaaacactggagagaagcaactgaagaatgagatgggtgagagtcagtaagaaatgtccaacctgatttaggtgagggtatctgctgacccaggaaaattgtatccagggaactgagaaaatttgcagggtgcttaattggtgagttctctagatgcctctagttaggcattcatctttatttattggcttaaagatgggtaacagaagactgttaaccctggctggcagtcttctctctaagacagttcctagacctcaaagaaagcataccctactgcagaagaggaagctggaaggtcacargtctgatgacattgacgtgcagatgtgcttgcctaaatacattcatacaccttatatatgtagatgtatatgcacaggcatacacacacacacacacactctctcttttacacacacacacacatatatgtaggtaaaagccaacagatatcctagcccaagtaggataaacttgattttaatctccccaactatagcctctccattgtccttcccgaccagtttcctgattggttcccccaccatgctcacctctatccaggaggagctaaatacccacctagcag

SEQ ID NO: 882684 - DNA, 604 bp, Homo sapiens
ggaagagtaaagcaaacactggagagaagcaactgaagaatgagatgggtgagagtcagtaagaaatgtccaacctgatttaggtgagggtatctgctgacccaggaaaattgtatccagggaactgagaaaatttgcagggtgcttaattggtgagttctctagatgcctctagttaggcattcatctttatttattggcttaaagatgggtaacagaagactgttaaccctggctggcagtcttctctctaagacagttcctagacctcaaagaaagcataccctactgcagaagaggaagctggaaggtcacaagtctgatgacattracgtgcagatgtgcttgcctaaatacattcatacaccttatatatgtagatgtatatgcacaggcatacacacacacacacacactctctcttttacacacacacacacatatatgtaggtaaaagccaacagatatcctagcccaagtaggataaacttgattttaatctccccaactatagcctctccattgtccttcccgaccagtttcctgattggttcccccaccatgctcacctctatccaggaggagctaaatacccacctagcag

SEQ ID NO: 882685 - DNA, 669 bp, Homo sapiens
atggatctggcattgactctccatggtgcacgtagaagtgcttgactctcaatgtgacacagacctggccctgtgagtcctcacctggagaggaaatgtggtttgtctctctgattctggacactcccatctgccctacaataaaccaattgatacacacactatttgccgtgcttgatcwtgtaaagcaatactttctttgtcaacagttttaatcagagtggtgaagccagattgaaactgtttagctaggataatgggctgacaggagattaaacaggtcccttgacaagtgactgtccctcaaatgccagcactctcgcctggcacagctgcacgtaatcagcacccaaattcccacctgccgggaatacatcacccgatctttgctcctgagcctgtgacacctggagaatgatcacacattccttgcatgttatctctccttggccactgaggtggttttgggggctgcactgagaattattaccttgttgatctatctgttcccagcccattttcccagcctagcaacagattacactccacagggaaaagccatgtaatactcttaagacaattccttaccacgtaagagcagccatgtaattgctcttagtgaccaatttctcatattccaggttcatttgaaacgcacaagaattaaag

SEQ ID NO: 882686 - DNA, 653 bp, Homo sapiens
tcataggttcagtatcattttcttccaccttcatgtatttcatagttggagtcctttcattaatatttaccaatccaattgtgtagtatattttgttttgatgataatgtgctttgttgaattgggggatatttcattttgattgctaagctttgtactgcagcagctaagrtctatgcttaagtttctcaggcattgagatttataagctttctcttatatttcatatttctgggcattgtccagaatcccaatcttttcctttaagcatttttttcttccctttatgtttgttctctttttcattccctccagcttgaccatctgtctccctcttattgcttccgcagaaccatgcactaagtacctaggggtgaaatggcacatgccatcaaaagattcagtttacagaagtcatcactgatctatgataagtacagaaggacttctccaaagtactctacgtcttgtcaccatctgggcctgttccctcacctagttagaacacagcaaatgaggccaaggtcacagattcagaccccatacgattcagttcactttacacaaggaagaactttgttttgtttccatagtctgcaaccgcatatgctggtggacccaacttgaaaatgaattcatgctggaggacctag

SEQ ID NO: 882687 - DNA, 627 bp, Homo sapiens
cattcattcattcatgacatactttctgagtacctattatgggccagataccatctttaggcccttgggatgcagcatttacaatactaattttctgttttcacagtggcagatgattttttaaaaaatatatgcwggcaacataatgataccccatctctaaaaaaattcaaaaaatgggccaggtgtaatattgcatgcctgtgtgatcccagctactcaagaggctgagttgggaggatcactggagctggggaggtcgaggctgcagtgagctatgattgcaccactgcactccagtctaggtaacagagtgagaccctgtctcaagtacacacacacacacacaaacacacacacacacacacacgcatatgctatgttaggtgatatgggctatgggttataatgaaaaatgaagtttggtaaatgggattgagttggcaggaaggttcaattatgccttggttggtcagggaagctttctgtgttgacatttggacagagacctggaacaagggaggaggaaagctgtgcagacaatgggttaagtccagcccggggactctgaagtgggagcatgcttaatgtgccggaataagaatgaagagactggtgtggccagaa

SEQ ID NO: 882688 - DNA, 616 bp, Homo sapiens
aaattctagacaattcagcaaaaaaggcacagaaacttctataaaaatggacagttgaagaccaggaatttcaaagaagaacaaatattaatttgctaacaagtgtagaaagaaagatctacctcctttgtaatcattttatagcaaattgaaatggtaagatactattcaacatatataagtcaggcaaaaatggacaaattgcacaatacaaagagtggataaggatgtagggaaacaggaatcacttctggttggaatggataagtgtatccattagtaggwattgatacagtcatttacaagatgcttggggcaggacttactgaacgtaagttaatatataatttaagattcagaaatcccacttctgggtatttgccacggagaaactcacaggtttctatatgtgaatccatataagactgtttatgtaggtgggacaacctaatcatccatcactagcgatatggtttgactctgtgtccctaatgacaccttaaattgtactaatccccatgtgtcaagggagggacctggtgggaggtaattgaatcacgggagtggatttttcccatgctgttcttacggtagtgactaagtctcatgagatctg

SEQ ID NO: 882689 - DNA, 673 bp, Homo sapiens
tgattgttttaattctcatttgcctaataacatatgatgtggagcatattttcatatgtgctatggtctaaatgcttgtggcccccccaggattcaaatgctgaaacctaatcatcaagttggtaagattaggaggttgggcctttgggaaggtgattaggtcatgagagtggagtcctcatgaatgaaattagtacccttataaaataggccccagggagcttgtttgccccttccaccatgtgaasacataacaagaaggcaccgtctatgaaccagaaagcagccctcaccaggtattgaatctgccagcatcttaatcttggacttcctagcctccagaattgtaagaaaaaatttctgtttataagccatgcagtccaagatattttgttatagcaacacaaatagtctgagacaatatgcttatgtgctatttttatatgttttttggtgaggtgtcttgtattttaaaaatatctcatcctgcctttttttcttattaaatttgaaatctttgttatatacaaggaatacagaatgccacatagaagttcatgattcatagtggcctgcctagagccacgtctttggggacaagcccctctcctaatttggtgaccacctcctccaagtggaaactcaccagcctcccacagcctcaaccctagta

SEQ ID NO: 882690 - DNA, 624 bp, Homo sapiens
cacttctaaagatgtctcactcattttcacatcagtagatggaaactccatcctttttcttctccagcacacacattctggttcacctttgtttggtttctcttttctcttactctctacacatcaccagtaaatctcatggccctcactttcaaaatrtgctcaaaacgctgcctagtagttctcttaatcgccaattggtcctagacaccaaaatctcttacctagattattgccatagcttcataactaaccctatcatcctcaactcttcctgtcccccagtagacactcaacagagtaactagagtgcttcttcccaaatttatcagtgtcacttttttgctaagaaccctccaaagccttgtatgtactgtggcctacaaggttctccatgactgagcccctcttatcactggcctggcttccctcttgttcatttccttcctacgaacctggcctagatgttattctataacttgccaatagaatttttgccttagggcttttgtacttactctttctgactggaatagattctctcatatatatccatgtatctttcatagacatctgcatatatatggttcataaataatctatatgtttattagagcttaactc

SEQ ID NO: 882691 - DNA, 608 bp, Homo sapiens
caggacacaaaaatcagagggagaaagaagaaaggaggaaaaaaataaggcttttaatataaaattatccatgtagtcaatattttatcccaaagatcttgaggtcacagaaaaggtcaaaatggaggcacagctgaatcaatccacttattcaacccaagttctccattttcctccaatttctggacctaattttttaattttactttcacctttccatatccaagattatccctttacccacaatatcaccctacttctgctcactttattmttttcaaagctctgtccttcctccctgccagcttgagatcaaaatcctcagagctcttgagtagaccagaaatctggcctctgtgtacctttgtcatattcatatatagacacagtgggagtggggggtgagtagaaaatcacttagccacagcgatggtgtacaggaaagagaggacagcagtcttatggataaattgcttacacgcagatgctcagctgaatctgtaatgaaaaggaaatctgaatgcttggccaaggagaagtaaattccctgaggtcaatcctttgttgttctctttgatcttcagtaatgggtcaatcagaccacctgc

SEQ ID NO: 882692 - DNA, 608 bp, Homo sapiens
caggacacaaaaatcagagggagaaagaagaaaggaggaaaaaaataaggcttttaatataaaattatccatgtagtcaatattttatcccaaagatcttgaggtcacagaaaaggtcaaaatggaggcacagctgaatcaatccacttattcaacccaagttctccattttcctccaatttctggacctaattttttaattttactttcacctttccatatccaagattatccctttacccacaatatcaccctacttctgctcactttattattttcaaagmtctgtccttcctccctgccagcttgagatcaaaatcctcagagctcttgagtagaccagaaatctggcctctgtgtacctttgtcatattcatatatagacacagtgggagtggggggtgagtagaaaatcacttagccacagcgatggtgtacaggaaagagaggacagcagtcttatggataaattgcttacacgcagatgctcagctgaatctgtaatgaaaaggaaatctgaatgcttggccaaggagaagtaaattccctgaggtcaatcctttgttgttctctttgatcttcagtaatgggtcaatcagaccacctgc

SEQ ID NO: 882693 - DNA, 608 bp, Homo sapiens
caggacacaaaaatcagagggagaaagaagaaaggaggaaaaaaataaggcttttaatataaaattatccatgtagtcaatattttatcccaaagatcttgaggtcacagaaaaggtcaaaatggaggcacagctgaatcaatccacttattcaacccaagttctccattttcctccaatttctggacctaattttttaattttactttcacctttccatatccaagattatccctttacccacaatatcaccctacttctgctcactttattattttcaaagctctgtccttcctccctgccagcttgagatmaaaatcctcagagctcttgagtagaccagaaatctggcctctgtgtacctttgtcatattcatatatagacacagtgggagtggggggtgagtagaaaatcacttagccacagcgatggtgtacaggaaagagaggacagcagtcttatggataaattgcttacacgcagatgctcagctgaatctgtaatgaaaaggaaatctgaatgcttggccaaggagaagtaaattccctgaggtcaatcctttgttgttctctttgatcttcagtaatgggtcaatcagaccacctgc

SEQ ID NO: 882694 - DNA, 608 bp, Homo sapiens
caggacacaaaaatcagagggagaaagaagaaaggaggaaaaaaataaggcttttaatataaaattatccatgtagtcaatattttatcccaaagatcttgaggtcacagaaaaggtcaaaatggaggcacagctgaatcaatccacttattcaacccaagttctccattttcctccaatttctggacctaattttttaattttactttcacctttccatatccaagattatccctttacccacaatatcaccctacttctgctcactttattattttcaaagctctgtccttcctccctgccagcttgagatcaaaatcctcagagctcttgagtagaccagaaatctggcctctgtgtacctttgtcatattcatatatagacacagtgggagtggggggtgagtagaaaatcacttagccacagygatggtgtacaggaaagagaggacagcagtcttatggataaattgcttacacgcagatgctcagctgaatctgtaatgaaaaggaaatctgaatgcttggccaaggagaagtaaattccctgaggtcaatcctttgttgttctctttgatcttcagtaatgggtcaatcagaccacctgc

SEQ ID NO: 882695 - DNA, 661 bp, Homo sapiens
aatagacttttattttgcctttctttctcttaaccacatttggaattagaagagtgatgagaaccagcaggaaggtagaacaaaaagccaatgacattagagaagtgttcaaacagccagctaaattcactgcacttctcaaccacagaaatattttcaggtgattctgtttttgagaaaacgtgggaaccacaggatctacaacacttccaggcaaaactcaacagctytaataatagtgacagaagtgaaagccaatttggataaaataagacattgactcaaagtcctctgagagatttttcaaaacaaagtttacaaagctccttttgccttttgggaaatcacattcttctttgcaccttgactctttttctgaatttctttctgtctgggaggatctccctacagtgtttcttctccatctgacatcatgaaatgtgatactcaagcaggagaatcgcttgagtcctggaggcagagattgcagtgagccaagatcgcgccactgcacttcagcctggatgacagagcgatactctgtctcaaaaaaaaaaaaaaaaaaagaaaaaaaaagaaaaagaaacaaggatataatgagatgtctttgttctatgcctttgtatccctccagacaaatcttttttgttgaactgttgtg

SEQ ID NO: 882696 - DNA, 661 bp, Homo sapiens
aatagacttttattttgcctttctttctcttaaccacatttggaattagaagagtgatgagaaccagcaggaaggtagaacaaaaagccaatgacattagagaagtgttcaaacagccagctaaattcactgcacttctcaaccacagaaatattttcaggtgattctgtttttgagaaaacgtgggaaccacaggatctacaacacttccaggcaaaactcaacagctctaataatagtgacagaagtgaaagccaatttggataaaataagacattgactcaaagtcctctgagagatttttcaaaacaaagtttacaaagctccttttgccttttgggaaatcacattcttctttgcaccttgactctttttctgaatttctttctgtctgggaggatctccctacagtgtttcttctccatctgacatcatgaaatgtgatactcaagcaggagaatcgcttgagtcctggaggcagagattgcagtgagccaagatcgcgccmctgcacttcagcctggatgacagagcgatactctgtctcaaaaaaaaaaaaaaaaaaagaaaaaaaaagaaaaagaaacaaggatataatgagatgtctttgttctatgcctttgtatccctccagacaaatcttttttgttgaactgttgtg

SEQ ID NO: 882697 - DNA, 643 bp, Homo sapiens
aattccatacatattatatccttattctgctaatcaaagtttattagtctttgtattcccaatacccaccctatggtttgactaggtcaggtgccgaaaaagtattttttgtaagtaaagctgtgaaggtatcaatgaatgaatgtctgttctcgtgtttaggtttgtgtttgcgaactgttgtttctctctatattttcttgctctctataaaacacgtctgtttctgattgttcatcttatactaacccagtttgattttgcttgacagcagggaccttttttttcttagtttgtattcgtttattacatgtcctgtttttacattttactttttgctaatgccaattgcttaaaatatactaattgaatgaagacttgcaatcacagtcctgtgggatatccagtctgttatcctcacaatgacatcctcaagtttaaaaagtgggcactcataagaaattgaacaaamtttgtgatatcctagcaacaaagaaggggcaaaaactactgaaaagtttcctgatggtgtttatccccatgtgatattgcaccttctgagaacatgtttgaaatttagtacctgttcacagggaatttttaaaacattaacacttagttgcactaacctgtgttgtgtgtg

SEQ ID NO: 882698 - DNA, 583 bp, Homo sapiens
tttcatgattacaactctttaaatatggttcacggtggaggaatgtaataaactattttatgtttttgcgcagccctgtgttttttaaggcaggtaatacttttactcatttgtttagtttagtacagatagctaycacacattcttccccttcagtcacctacagaattgcatacttcttctcaataaggccaagcacattaaataatttattagttcggttttttcccttggagtcctcatgtttacatcccttcatcctcctgttccaataggaattcgttgttgtctaggtctgccatatcgtgaaacctccctttaatcattattttggagattctctggccactctctgttatttggatcctccctcattccagtgaagtatatttaacagattttttttttttccaagacaagatgccttggaggtatattgtgaagactgtgtttgtgatcaggtcttaattttgccttcatgcttgattgataaccaggcttattagaaatgtttagttaaatatcattttctgtcaaaatttcaaagacataatttcattattttttacttttcttggccaca

SEQ ID NO: 882699 - DNA, 583 bp, Homo sapiens
tttcatgattacaactctttaaatatggttcacggtggaggaatgtaataaactattttatgtttttgcgcagccctgtgttttttaaggcaggtaatacttttactcatttgtttagtttagtacagatagctaccacacattcttccccttcagtcacctacagaattrcatacttcttctcaataaggccaagcacattaaataatttattagttcggttttttcccttggagtcctcatgtttacatcccttcatcctcctgttccaataggaattcgttgttgtctaggtctgccatatcgtgaaacctccctttaatcattattttggagattctctggccactctctgttatttggatcctccctcattccagtgaagtatatttaacagattttttttttttccaagacaagatgccttggaggtatattgtgaagactgtgtttgtgatcaggtcttaattttgccttcatgcttgattgataaccaggcttattagaaatgtttagttaaatatcattttctgtcaaaatttcaaagacataatttcattattttttacttttcttggccaca

SEQ ID NO: 882700 - DNA, 551 bp, Homo sapiens
ctcattatcatgagaacagcatgggaagacccacccccatcactcaattaccccccactgggtcccttccatgacacatggtgattacaggagctacaatttgagatttgggtggggatgcagccaaaccatatcaaacccaatatatttgtggccagttaggaaagrcttcagagaggagatggaaggtaccaataagattgagacgaaagtggacagcttctgaggatgagaaatgaggttagagctaaagtatgtttagggacttgtaactaactatttacataaattgaaagtcattgaggagagaatttggaagtacaggaaaaaaggaattaaagaatctttgaggtaaaaagagccttagaaatctcatagtttgtttcctgaaatggactatttggaaacccaggtttgtggagatattaaaaggcatctcatgatgtacatttcctataatgaagtcgtttaattagtttaaatagcattccaaaagcttttgcacatcaggacttctcagggattttaatatgttaaaatctcctggaacc

SEQ ID NO: 882701 - DNA, 654 bp, Homo sapiens
gtttcatctaatatgttctttggagttcattttggactcagatttggaaagtcttgtaagcgtgctttatttttttacagaatctagaacattttggagaattcttaacttttaccacatacataaactgaataactaaagttaggcaattcrtttggcttttgggaaataattagggttcatcagctatgcttcctagaagaatcactgaaccaaaaatatactctacctgataaattacaatctacttaataacctgcaaattagcaagcattagctcaaaggatgtaaataaaatgagttccaaaaataagaggcttaaacacaaaatgacagctcaaaagatgtatggtgaaaagtatactttcaactatatttagaataaaagtttgctaaaatatttctaaggctgatcttttagaaatctgtatctccatatgccatgacaaagatcaatatttatttatgcttttacaataaaaagcagtattgtctttctcctctagggcctgcagtaataaaatattttacagctcctttatattttataactttaaattttcattgatgctaggcaaggaatagtgtagagatgtagtcttctttgtgaaggacttttaatccttaattaatcatttatataaatctattgca

SEQ ID NO: 882702 - DNA, 679 bp, Homo sapiens
atgggaattcagagcactatttttgtgacatttttgtaaattaagttatatttattctaaagccctggatatagagagtgtgataaaaaatatttatccagaattttaatacatctcaatatgatttttcattgtagactcacagggtatatttgttccaggggttgagacctggttgaaaaccattagcaaaaggagagatgatgatgatgatacattttcttagagagggtatgtgaagagttcattcccgaaggttttattttaggcaatatcaagtaatagctacttatctatacatttacattyaaaatatacttacttgtttaaaataattagtatcaagttcacttagccaatggcacaagaatccagaaataacattcttcattacaagacatacttaataataacatattcattacatgacgtacttaatacatgccatgggtgtttaataagatatttttatgccagaaagacaccatatatggaggttactttatgaaagcaatttttcctgtcctttcaacattgaattccagtccaaagcacctgtgttgccctggcagtttggcaagaacatggacttgagagaaagatgggttcgagccccagctctgccactaactagctgtatgactgtggaagctgacttcaccattcaagttttcatcac

SEQ ID NO: 882703 - DNA, 706 bp, Homo sapiens
ttgtaagaactctgtctccacttcagaaagccaaagtggattatgatttcaagtcttaaatatcactgggtttaatacacataaacccaatgttcctggtttgcagccttgtaaaataaatagatataattgcaggcagttgcatactaaaaggaggataacacttctgtattcacagagatttgtttactgatgacatgaaacatayatgaatatatcttttatgtaacattatagatacatacacacacagattctacaaactaagctggtattagacatcacagtctcaattctctccagaaaaagtaatgacgtttatgtgtttttctcgaaatcaacatgcttctgatgtttttctcattatgttcaaactcatcaagacttaagacatttcgttttcagtatatcacttggcttgcttgcacttgcacacctaaatactttccaaatgaagactggattttaacataagataggaagaaattctttttggtgatttgccatttatttttcacaaaagacaggcaccgcaaaacagacaaacgttaaaatatgctttttactctaatttgatgaggtatgaagccctgtgactgaaattgagagaaatgaataattaagcatgtctcacttcttggtcaggtttgcacattggtatttactgtttctgctgccattttactacggcattagggagaaagga

SEQ ID NO: 882704 - DNA, 706 bp, Homo sapiens
ttgtaagaactctgtctccacttcagaaagccaaagtggattatgatttcaagtcttaaatatcactgggtttaatacacataaacccaatgttcctggtttgcagccttgtaaaataaatagatataattgcaggcagttgcatactaaaaggaggataacacttctgtattcacagagatttgtttactgatgacatgaaacatatatgaatatatcttttatgtaacattatagatacatacacacacagattctacaaactaagctggtattagacatcacagtctcaattctctccagaaaaagtaatgacgtttatgtgtttttctcgaaatcaacatgcttctgatgtttttctcattatgttcaaactcatcaagacttaagacatttcgttttcagtatatcacttggcttgcttgcrcttgcacacctaaatactttccaaatgaagactggattttaacataagataggaagaaattctttttggtgatttgccatttatttttcacaaaagacaggcaccgcaaaacagacaaacgttaaaatatgctttttactctaatttgatgaggtatgaagccctgtgactgaaattgagagaaatgaataattaagcatgtctcacttcttggtcaggtttgcacattggtatttactgtttctgctgccattttactacggcattagggagaaagga

SEQ ID NO: 882705 - DNA, 673 bp, Homo sapiens
ctcagaaagaagcaatcttagaaaaaaattatgatctatattggaagcaacctaaatgaacttttcatttttctttactttcaactaattttcttaattcttgtatggcaaaaggtacacttacttaaatgatcatttaaaaataaatgaaaacagttacttygcttaaaaatgactaaagttcaaacttacagcttttgctgttgtattcctcggcccttttacacttcattttctttattgggtcatgcatttgtatgcttctaaataagttactttttttagcagacttttgagataagatacagacagaattgcagaacctgttttatttcctcaggaagaatctcagatgggagtggtgcataagaccagactgcagaacataaaatggttttctcaagtctacactagctagaaagcaatcacccttcttctttctttttatttgacccgaaaggacttgtgtactgatttacacaattctatgccatttgtgtgtgtttatgtgtatgtgtatgtgttatgcaaaaatgagtctttccacagggaattttgctgtatttccttttgactgagtatgaattatgctgtagatagatttatgaaatataatgctaatttggatggtctcatattgacttgtagggtgatactgtcctccttcaaaagg

SEQ ID NO: 882706 - DNA, 544 bp, Homo sapiens
tctagcaatgcatcagaagggacaatttaagtttcatagtctataaatagctttgtctttcatatttttttttacacataatttttgagaatctttgaaatcaaggggaggatgaggcacaactgtagctatttatcccactggaatccctgaaataccctttctaagagggtgcctattgcaggcttgagaaatcaatacttaacctatagaaacaattattttaaaacagcctttcagagggtggatcaagtttgactaagggctaaaagtggtgagacaatggtttcctgcaaaataaattcaataattgttttggctcataatatttttttacactgtgtctgaacaattaatgactttttctggtagtctcttgctgaaatatcaacataactctcaatrcagaacaagaaagcttaaggctgaatccaaaaataatacactatagaaaatagcaaccaaacccacctacctgatagacacaattttacaaaatacacacaacagctgggaaaaaaacataaacatggagccaaaacat

SEQ ID NO: 882707 - DNA, 549 bp, Homo sapiens
ctcattatcatgagaacagcatgggaagacccacccccatcactcaattaccccccactgggtcccttccatgacacatggtgattacaggagctacaatttgagatttgggtggggatgcagccaaaccatatcaaacccaatatatttgtggccagttaggaaagrcttcagagaggagatggaaggtaccaataagattgagacgaaagtggacagcttctgaggatgagaaatgaggttagagctaaagtatgtttagggacttgtaactaactatttacataaattgaaagtcattgaggagagaatttggaagtacaggaaaaaaggaattaaagaatctttgaggtaaaaagagccttagaaatctcatagtttgtttcctgaaatggactatttggaaacccaggtttgtggagatattaaaaggcatctcatgatgtacatttcctataatgaagtcgtttaattagtttaaatagcattccaaaagcttttgcacatcaggacttctcagggattttaatatgttaaaatctcctggaa

SEQ ID NO: 882708 - DNA, 655 bp, Homo sapiens
gccctgaaatctgattcaccatgaacttccagtgttattagccaataaatctcctttaggggttaagctaattttcaaatcaaatgcagtgtaatttacctgccttttaaattttgaagactaagaagaaattgttttcttctagtggataaacaactccactagagtgagtggggtgagaattaggtactttataaagctaaattaattccagtcaataaagcaatcaccaacacacatatttgcttattgtgtgttggttagtgtatataggagagtactaatgcacagggtgccaattctccccacctgacacctatagcagacattgctagtcagccattatggtgctcctactgagccagctttccttctcatcagtgtttgaggtaaccacagtcaagagaccagagttggcaagggaaacctgtgatcactgatataggtagtcactgattgttgctaaaatatatacctggaaatttggtgaaatctctgcatcataaatcagcattkctccacagggacactattaataactaggagttgtgttgccatataagaaaccaaacatgctataaatcacagagtaataaaaaacatgacatgaaaacacaagtcgactataaaattttataataatctagagtaaata

SEQ ID NO: 882709 - DNA, 588 bp, Homo sapiens
attagcaggtttatgataatcattttggcattattttcccactgaaaatgattttaaaacgtaatgtcatttgaccctctcttgccttatcaactctaaatgtaggtaattccatattatttaaatatcaatactaagggagtatcatccatattgatcaatcactaggtaggggccttttaagacatttgtttaggcaaccatcccatagccctctattaagttattgtagagtctagcattaattaattcatatactgagtacttaccttgcgctgggcactgaagatatgtaacaataaacaaaccacacaggatctttgtttatatagggcttattataataattcttcagtgaaataaaagttaagaacaatgamgacattcataattatgtctatccatagttttgtctattcttagttatgtctatccataaaggtttttagaagttttacaaaaaatatctgctattattgttggacatgaccaatgaaagcaaatgtgttttaatatactgaactttatataggtagcccttgtcttttctcattaagccccatcttcaatcccttttccatacgactt

SEQ ID NO: 882710 - DNA, 613 bp, Homo sapiens
ttcatgctttggctctttccagaagcactaaagggaattgtgtgcttgtaatacataccacttatgcataattccttttgaaaatctgtctttctgattctcagctttcagagagttggccagcccttccaatgccccctgcagttcaaaatgtagtttataattttccttagccccccatgtttgtgagggaacaaaaatatggcaragaaatatacttgaaacacacaaagaaaatcaaggcttttccaggctcaaggaggctgatacactttttgaatctcagatgattggctaaggattgcattctcagttgtgtttctatttaataattggcttttctctccatccttgacaattttttccctcaagtcaaacttttcttaattatcctagtttatcaaatatgtgttgtttttcctttaagtatttccctttcaatgcactttacagaagcgtcatgaaaagtgggaagaagcaattataatgaaaagcattgtaattttatctaatatttaaaagcaatgatgctgctccaggttaagactgtaatcagacataattacttaagacatgtataccttggaaatattgtggggtcggttcagaccac

SEQ ID NO: 882711 - DNA, 613 bp, Homo sapiens
ttcatgctttggctctttccagaagcactaaagggaattgtgtgcttgtaatacataccacttatgcataattccttttgaaaatctgtctttctgattctcagctttcagagagttggccagcccttccaatgccccctgcagttcaaaatgtagtttataattttccttagccccccatgtttgtgagggaacaaaaatatggcaaagaaatatacttgaaacacacaaagaaaatcaaggcttttccaggctcaaggaggctgatacactttttgaatctcagatgattggctaaggattgcattctcagttgtgtttctatttaataattggcttttctctccatccttgacaattttttccctcaagtcaaacttttcttaattatcctagtttatcaaatatgtgttgtttttcctttaagtatttccctttcaatgcactttacagaagcrtcatgaaaagtgggaagaagcaattataatgaaaagcattgtaattttatctaatatttaaaagcaatgatgctgctccaggttaagactgtaatcagacataattacttaagacatgtataccttggaaatattgtggggtcggttcagaccac

SEQ ID NO: 882712 - DNA, 575 bp, Homo sapiens
ctgacccagatgacagggaccgcctgcaacattctcccacccccactgcactttcaccccatcaagccctcaaactggattgctgatctttgttcaaatagtagcttacacactgagactaagatgagtctgaagcagaggctagscgttctgttttttaacattaaatatataaagactttgaaagatgtgaccaaagaaagctgtcttttcctggagcttttgaaaaaaaaaaattaacagcaactgcaactgccatacagagtgcttgccatgtgacagatagaagatcattaactatgtagtaatcaatcatttgcacacatatgtgggtccccatgggacacaacatttattatccagttaatccttgaaaaagtgtctactctcactgtttccatttttttcttcctgctctcacttccaaaccaattagattttcaccctcatcatttctctgttactgtttttatcaagatcaccatgggcacctgtggtagtaaatccagtggtcatttctcagtatttatctttcttgacctatcagcagcatttgatgtactattcttttcaat

SEQ ID NO: 882713 - DNA, 582 bp, Homo sapiens
ctcccaccaacagtgtgaaagcatccctttttctcggcaacctcgccagcatctgttgaaaaggaatttaaatatgtaaaagaatgtaaatcctcccttcctagaattttccttgacatagccattgtcctttgccatactgaataaattgtttcctattgagagagacttcttattcttcacttatatattggaaactatgttttcttctgagaacattgtgtatggaaggctcatggcaaactcaaggttaactttccttgctagatcaaggtgaaraaaaaaattgtttttaagtgactattctattttttaataaaacttataaaaacttgaaaatgaagcaaaaaaaaaaaaaaaagattgtgtgaccttctttgtcatggtggccatagtacaatagcctcatccaagggtgatttgattctctaaagaggtgtctctttatttttaaatttactgttgtttaagatgcagattctgtgaaattacatgttaatttataggatttgtatgtggcagaaatgtaaatgatttccatctaatagaaaagataacctgaaaaattataattgtattgac

SEQ ID NO: 882714 - DNA, 662 bp, Homo sapiens
gattggacaagtacactgatgtgtattcaatgcataagttgttccctctacttggatctttcatcttcttaatatttgcatgctttgctccctattttctttcagagatttattcaagttccatgttatctgtgagaagttttataatatagcaatgcccatttccctcttaagggcattgtatggtatgcccttccctcttctgagctttgttttttcaatgatccttgtctgatttccctgactagagtataagtttcatgagagtgaggacttttctttgctcctgattgcattcttggtgtctaaaagagtgtctgccacatactaggtattcagtaaatacttttggaatggattaattatagaatactagattttagtgaaaaatgaatgaactggataaataatatgtaccaacttagatataattcaaaccttgagataattgsgaaagcacactgttaaagaaatagatacagacacaaatacacacacacacacacacacacacggtctcacaaaacatgtatatcctcacttccctccataaatatgtatatatatatgtgtaaaatgatattcatctaagtaaattaaacatgtgtgcacctgtgtacacatacatacacacatatatcacagactgtataaaaagcaaa

SEQ ID NO: 882715 - DNA, 579 bp, Homo sapiens
cttaaaacaagtttcagcagggtagagtggaaagcacccaggaaacccaggatctgaaatcagaaggctttgctcctaggtttatgtcagccacttcatcaccttcctaggcctcagtttcctcctttgtaaaatgacagcagtctcagtttctgtccattattgtgagaatcaaaggaagccacattaaatgagatctaaaagtgcttatattaatgctgttttttttaaacaaagtaagcaaaagtataaatatttcagcacccaagagtctgactaaataaagttttgtttatgtgctgggaagccttagaggcagagtctccaccggagggcyttgggaaacacctgcaaatgattcatttgatggccaagaattttgaagtgctctgatttccaaagataatgtctcaaaattcttgtactagatttcccttaatgtctgtaaaggcaaacccagttactgtacatatcagagcaaatgctgttttccatttaccatggaatttaggaattctttccaaaagcctgtttgataatgattttcatgccaagctgcagatttgaaattaagccttc

SEQ ID NO: 882716 - DNA, 582 bp, Homo sapiens
tagggaaaaacataaagcctttcacatgagttcaaaaattcaagtgtaaagaagactttaagggtttaggttgactttaaatataatagaatttaacaatagaaggacaggtgcagtggctcatgcctgtaatcccagcactttgggaggctgcggtgagtccaggagttcaagaccagcctgggcaacgtagtgagacctcatctctacaagaaataaaaaattagccaggtgtgttagcacacacctgtagtcctagctactcagraggcggaggtggcggagggattgcttgagcctgggacttagaggttgcagtgagccacgattgtaccactgtactcggcctgagtgacagagtgagaccttgtctcaaaaaaaaaaaaaaaaaaaaaagttaatggaataagaactgccaaaagcacatattatcttgtgggaaaatgttcataacattatcagatgaaaaagcaggttataaagcatagagtatggactcattctgtttgtgcaagggaaatacacacagaggaagaatatacgtcaacatggtgacaaaatgtagcagacgtctttggttgt

SEQ ID NO: 882717 - DNA, 580 bp, Homo sapiens
acaacgggaattgctacaatcgaggtgtttttaccaccaagactaaaaaaagtgagtaatttccctaaatttgagtaggcactaatgtccagttagtgatgaggtcaaataaattgttgttgtttggaaagttacaatccaaagtcagaattcttttaagtgactttacatattgaacaatttatcagcttgaaagtcaatgttacaaattcttaaactggaacattcccaaggtaggcttttagagaccctcttgggcttctaaaatgccacagagctgtatgtcacattctgatcctttctagcgtgtgaacgttgagaaataatggggaataaaggattcccaagtttcctagaagcctgtgcaggaggayacagcacagaaggcttcatccttttcctgttccagtagaggtcagagggcagtccgctgagtgctctcaagcagggccgaggagatctgggtggggtcacctcctctcattgccatggccaggtagtttgcatctagaaatgtcactgtggcaaggcacccagagcctcttgggactgatcggtgccagcactctcagaagaaata

SEQ ID NO: 882718 - DNA, 620 bp, Homo sapiens
gcccaataaggccggggaccaggagcagcagtcccaggttgagcccactacgtgatttgctggtgtcagggtcaccaagaaagacacaactcacacaggcactggatggaacagcattttgctcacatagggaaaagacagagcaagatcagctttgatagtcagtattggtcccccgaggcctgcaagtctcaccccacagcctgagcaggagctggtcggcatgcaccacacccatctcgtgcaacaggcacaagacccgtcccccgtcccccacccgcaacgctgtatgacacatgcatgtttaaacagagcaaagtgcacatcgctcgtggaacagggaaagtcattcccaaacaargccatgtgcacagcatgggctgaggcctcttgctctccacgtaaggaaatgttccaggtccacggcacaccctcatgcagctgtgtcgggtctgcaggctgtgcacgactgtctttctcaacaggtactttacattctatgatgcccaggtattaggagccaaaggttagctgttgggaaatgttaagcagaaagaagctctgtagtattgaattatgtctccctcttgaagtaactgagtcgttaatgtaaccactcc

SEQ ID NO: 882719 - DNA, 620 bp, Homo sapiens
gcccaataaggccggggaccaggagcagcagtcccaggttgagcccactacgtgatttgctggtgtcagggtcaccaagaaagacacaactcacacaggcactggatggaacagcattttgctcacatagggaaaagacagagcaagatcagctttgatagtcagtattggtcccccgaggcctgcaagtctcaccccacagcctgagcaggagctggtcggcatgcaccacacccatctcgtgcaacaggcacaagacccgtcccccgtcccccacccgcaacgctgtatgacacatgcatgtttaaacagagcaaagtgcacatcgctcgtggaacagggaaagtcattcccaaacaaggccatgtgcacagcatgggctgargcctcttgctctccacgtaaggaaatgttccaggtccacggcacaccctcatgcagctgtgtcgggtctgcaggctgtgcacgactgtctttctcaacaggtactttacattctatgatgcccaggtattaggagccaaaggttagctgttgggaaatgttaagcagaaagaagctctgtagtattgaattatgtctccctcttgaagtaactgagtcgttaatgtaaccactcc

SEQ ID NO: 882720 - DNA, 620 bp, Homo sapiens
gcccaataaggccggggaccaggagcagcagtcccaggttgagcccactacgtgatttgctggtgtcagggtcaccaagaaagacacaactcacacaggcactggatggaacagcattttgctcacatagggaaaagacagagcaagatcagctttgatagtcagtattggtcccccgaggcctgcaagtctcaccccacagcctgagcaggagctggtcggcatgcaccacacccatctcgtgcaacaggcacaagacccgtcccccgtcccccacccgcaacgctgtatgacacatgcatgtttaaacagagcaaagtgcacatcgctcgtggaacagggaaagtcattcccaaacaaggccatgtgcacagcatgggctgaggcctcttgctctccacgtaargaaatgttccaggtccacggcacaccctcatgcagctgtgtcgggtctgcaggctgtgcacgactgtctttctcaacaggtactttacattctatgatgcccaggtattaggagccaaaggttagctgttgggaaatgttaagcagaaagaagctctgtagtattgaattatgtctccctcttgaagtaactgagtcgttaatgtaaccactcc

SEQ ID NO: 882721 - DNA, 608 bp, Homo sapiens
tgtaaactgaagggagacagcttggtctggaaggaaaacgggtattaaaatgtcaaccagtatccagtgtccaatgggcaggggctgggccttgcctgcttttgtgtcatgcatgggtaaagtcgtatctaaatatttaatctcttttggcttttactccttycccctccaatcccacttcctttaatttaatttttatttatttagtttttagcttttaggatcccagggtaaataagttccataccttgggaaattgcataacagaaagaacacacttagcgtgatcactgtttcattgtgttcagttgtatttaggaccaagacatctgacagcatcactgggccttctttcagagaacaattggcacacttgaatgcaacggagtggataggtgacagctccttcccacggcagctgtggcagctccagctttctgtctaatcaaattagttcctctctgcactcaaacaagtcagaagcaatcatctccgaatccacgcgcagtgagcaaatgcaaacactgtcatggtgtgacgctagtaggacaagaggtgaaggctgctaataaatacagacataccatgtggctataataagccactta

SEQ ID NO: 882722 - DNA, 608 bp, Homo sapiens
tgtaaactgaagggagacagcttggtctggaaggaaaacgggtattaaaatgtcaaccagtatccagtgtccaatgggcaggggctgggccttgcctgcttttgtgtcatgcatgggtaaagtcgtatctaaatatttaatctcttttggcttttactccttccccctccaatcccacttcctttaatttaatttttatttatttagtttttagcttttaggatcccagggtaaataagttccataccttgggaaattgcataacagaaagaacacacttagcgtgatcactgtttcattgtgttcagttgtatttaggaccragacatctgacagcatcactgggccttctttcagagaacaattggcacacttgaatgcaacggagtggataggtgacagctccttcccacggcagctgtggcagctccagctttctgtctaatcaaattagttcctctctgcactcaaacaagtcagaagcaatcatctccgaatccacgcgcagtgagcaaatgcaaacactgtcatggtgtgacgctagtaggacaagaggtgaaggctgctaataaatacagacataccatgtggctataataagccactta

SEQ ID NO: 882723 - DNA, 647 bp, Homo sapiens
caataacaggctgtgaaattgaggcaataattaatagcctaccaaccaaaaaaagttcaggaccagatggattcacagccgaattctaccagaggtacaaagaggagctggtaccattccttctgcaactattccaatgaatagaaaaagagggaatcctccctaactcattttatgaggtcagcatcatcctgatacccaagcctggcagagacacaataaaaaaagagaattttagaccaatatccctgatgaacatggatgcaaaaatcctcaataaaatactggcaaaccaaatctagyagcacatcgaaaagcttgtctaccacgatcaagtcggcttcatccctgggatgcaagggtggttcaaggatacgcaaatcaataaatgtaatccatcacataaacagatccaatgacaaaaccacatgattatctcgatgcagaaaaggccttcagcaaaattcaacagcccttcatgctaaaaactcttaataaactaagtattgatggaatatataaaaaaataataagagctatttatgacaaacccacagccaatatcatactgaatgggcaaaaactggaagcattccctttgaaaactggcacaagacaagggcgccctctctcaccactcctattca

SEQ ID NO: 882724 - DNA, 567 bp, Homo sapiens
aagagaggaaaggtgcaagtgttcctagctccttcttcctctgtgagacagaagacagtgtcctctgctcagcaggagaaagctgcagtggagatgggctccaggatggtgataaatatcaggaatctgcctgggaaaagttgtgctatgtagcatggaggactttgaggagaaccaacggagtgttcagtgagagtggcaatgagggaacgccgtcagagtggaattgtaaaatcccagtttgcaattttcagctggacctatactctcaaattccagagagttggccttactggaccttacttgctggatcaaagtcaagtccaggctatgtccgaggcccgagtgaatagtgsaagtctcagaaggggatgttactgaacaacggctgtcagaggaagaagaaaaatgggcattatttacttatcaacctacttatttttaatttttgacctctcctactgaattgcctactgatcatctctggggtatacttctggatcattgtctcctaaataaatatatcttctgcagcccccataatttactctccttcctcctttaaaa

SEQ ID NO: 882725 - DNA, 598 bp, Homo sapiens
attggcccctattatctacagagatagtggctgcgctgaggctagactccagacctccccctccacattcagagatccttttccttacaccagccatggcctttctttctggaaatgtgcagccttcaataaaaggacaaaaggaaggcagcaattagctccacagagccaactgatgatggygcagcttaaaacaaagtgatcagcctgtaggtcaggggccatcctggtgtgatggctaatattgagtgtcaacttgattggtttgaaggatgcaaagtattgttcccggtgtgtctgtgagggtgttgccaaaggagattaacagttgagtcagtggactgggagaggcagacccaccctcaatctgggtgggcaccatctaatcaactgccagcgtggctagaataaagtaggcagaagaaaagagcagacttgtggagtcttctggccttcatctttctcccatgctggatactttctgccctcaaatgtctaagttctttagcttttggactttggaacttataccagtggttttccaggagctcacgggcttgggacttggactaactttcttgctcttcagcttacagac

SEQ ID NO: 882726 - DNA, 598 bp, Homo sapiens
attggcccctattatctacagagatagtggctgcgctgaggctagactccagacctccccctccacattcagagatccttttccttacaccagccatggcctttctttctggaaatgtgcagccttcaataaaaggacaaaaggaaggcagcaattagctccacagagccaactgatgatggcgcagcttaaaacaaagtgatcagcctgtaggtcaggggccatcctggtgtgatggctaatattgagtgtcaacttgattggtttgaaggatgcaaagtattgttcccggtgtgtytgtgagggtgttgccaaaggagattaacagttgagtcagtggactgggagaggcagacccaccctcaatctgggtgggcaccatctaatcaactgccagcgtggctagaataaagtaggcagaagaaaagagcagacttgtggagtcttctggccttcatctttctcccatgctggatactttctgccctcaaatgtctaagttctttagcttttggactttggaacttataccagtggttttccaggagctcacgggcttgggacttggactaactttcttgctcttcagcttacagac

SEQ ID NO: 882727 - DNA, 659 bp, Homo sapiens
acttacttttatctgacatttttgttttcttattaattcattactggactataagcttcatgttggtaggaagcttgcctgtttactgtggagtctagtgactggtacatagtaggtgctcaataaaagtgatgaatgagtagcaaggaataggataattgactttgtacaatttgagttaagaagggattaactttgcagcgtccatacaaagtaactgtaggtaattggtttttttctgacccttatacaaggtaataatattttgaggtatgtgaaagtcatttctttcctggaaagaattctgaaaccaatggaaaaatagaaagcaggctagagatatctgataagaatacgactgaattaatctcaaactagatgtgtgawataaatgcctcagggctgctcttatctaaatgtaaatctaaaacatcttaatctgaaattcctcagctttctgcattattctctggtcattttaccatatgggccagaaatgggtaagaagtatagaaattatgacctggggcttggagctgttgtttggtgaaaccgttgatttcgtgggccaatgagtagagtgctagttgaagaactttttttttttttcttccatttccccagcctatttcataacctcttacttccttcttttccaa

SEQ ID NO: 882728 - DNA, 603 bp, Homo sapiens
gatgtttttggccattatttcttcaaataagctctttgcaccttgctctgcctctcttctccttctgacattcccataaggcatatattgacccacttgatagtatcctgtaagtcctctagattttcttcacttttcttttctttttgctcttctgatttcataatttcaaataactggtcttcaaatttgctgattctttcttctgtgtgatcaagtctaatgttgaaccactctagtgagttgtttcaattcaattattgtgctctccagctccaaattttggttcttagtttctctttatgatattattttattcatgtattgttttcctgatttcatcagtttttttttgtkttgttttgttttttcagagacagggtctcactatgttgcccaggctggtctcaaactcctgggctcaaataatcctcccacctcagcatcccaaactgctgggattacaggcctgtaatttgtaatttgtaatttgtaattacaaattacaggcctgtaatctgtaatctgtaaactttgcccagcctagttgtttttctgtgttttgtagctcattgagcctctttaagattattactttgaatt

SEQ ID NO: 882729 - DNA, 510 bp, Homo sapiens
agaaagtaaaataagaagcttccagattaaaaaagaagtgaaatgatctctactcacagatgacgtaatcttttacatggactatcccaaagaatctactgaaagaatgattagaactaataaacaatttaaacaggttaaaggatacaagattaatatacaaaaaggagttatatttatatttatattttttatttttattttattttagtttttgagatggagttttactcttgttgcccaggctggagtgcaatggcatgatctcagctcactgcaacctccgcctcccrggtccaagcaattctcctgcctcagcctctgagtagctgggattacacgtgcacaccaccacacccagaaaatttttgtatttttagtagagacgggggtttcaccatgttggccaggctggtcttgaactcctaatctcaggtgatccacccgccttggcctccaaaagtgctaggattataggcatgagccacagtgcccagccaagagttatat

SEQ ID NO: 882730 - DNA, 510 bp, Homo sapiens
agaaagtaaaataagaagcttccagattaaaaaagaagtgaaatgatctctactcacagatgacgtaatcttttacatggactatcccaaagaatctactgaaagaatgattagaactaataaacaatttaaacaggttaaaggatacaagattaatatacaaaaaggagttatatttatatttatattttttatttttattttattttagtttttgagatggagttttactcttgttgcccaggctggagtgcaatggcatgatctcagctcactgcaacctccgcctcccgggtycaagcaattctcctgcctcagcctctgagtagctgggattacacgtgcacaccaccacacccagaaaatttttgtatttttagtagagacgggggtttcaccatgttggccaggctggtcttgaactcctaatctcaggtgatccacccgccttggcctccaaaagtgctaggattataggcatgagccacagtgcccagccaagagttatat

SEQ ID NO: 882731 - DNA, 588 bp, Homo sapiens
cttgagaaactggggagacaggaacagcttagcgaaggaataaaaggaatagccaagaacagcattcactgattaagtgggtggaacaggcacctttgggagttttgattgatcttaccagacaccattgtagattagcaaggcaggaactttcttgtgcccctctgcagccccatgtagtgcttggcacatagtagatgctcaataaacacctgtgaaatgaacgagcacattcaccrgtgattgtttggggtaagtggtggaaagttgggaaagtttagggggcgagggaaggctgatatttggtaacccacgctttggcgcagcagcgaagggtctaggaaccaagtcactatctcttgtgtttcacttggcttcaccaagggtggaggtgaacaccaagacccctctgcacatgcagcggaattattggaaataatttatgtccccactcatgtgccgtattccccccctttctcttccttattaaaatcttagcctttatgaggtttagggccaggatagaagtttctagcaagactcatccctccctagtacacatttcccccagcctaagctcactggtga

SEQ ID NO: 882732 - DNA, 669 bp, Homo sapiens
taagaacatgttgtaccagaaaagtaaatcctcataagaaatgacaatctacaatttaatgagctcagaattactctaatcttttaatctccaaatattcctcaatattaaaagccattatatgaaggtacatacatgaatcagaygaaataattcacaaaggcactcagagaatcttggactcttattagcttccttaagtctataatattattcagaaaaggaactaggtggaagtctacatattattttctgaacttgattgttaagactaaactggttatacatgtctagcttctctaactggcctgacattcaaataaagactacataaatacactatttatttatgcacacttgtacacggttgtaacaatttttatataaatataataaatatttttagaataatatagaaatatacatgatcacgctgtaaaacaatcccagttaccaagttctattctctcttatgtctaagtcactgtcttagactatagtttatgctatgtgaagtcaactctttgcagccacaagacagcctttagttctgtgctctactatactaaattcatggtatttagttatgaaattctggacttttgacaatcctctagcagaaaagccatgggtttccatatgccctcgaatatagcacttctgaaactt

SEQ ID NO: 882733 - DNA, 688 bp, Homo sapiens
aggtaatagactaattaagggagggaaacaaaggcctttttttaggggcaaacatttgagctgacatttgaagcttgaaaaagagccagtcattcaaatgctgaagaaagagtattcagccaaacaaaacagcaagcataaaggctctgagcctagaagaggaaaaagttttatattctcaagaaacagtgagaaggcctgtgtggctggaatayagtgagcaaggaaaggaattagatgatattggagagttaagagagaggctattggccatcataaaaaggttagatttttattccaagtgcaatggaaagccattaaagtatcttttgcagggaagtgacatgatctgatagaagtttaggtgaaattcttactgctgtgtggaaagttgattggagaaagacaaaagtggaagcaaagaggctagaaaagacactttcaggaatattctaattaaggtggaaattctgaagacagaagagttacagaattaagatagtatttcagaggtagaatggatcagacatccaaatgtaaatgtaggagaaaatcttcatgacctagggttaggcagaatctttaaatatgacatcaaaaataaataggattcattaaaaaatttataatcagactttgcaaacattggaaacttttccacttcgaaaggtactattgagaaaagaga

SEQ ID NO: 882734 - DNA, 633 bp, Homo sapiens
tgtttcttgatcagttttgtttgttggtttgttttattggcaaagagaactcatcagatagggtgtgtgtgtgtgtgtgtgtgtgtgtgtgtgtgtgtgtgtgtgtgtgataaccctttctctgctggagttggtttactttactactgaaatttttaaaatatttgattaaatattttatattaatatttatttttgctttattttaacatgaaaattcaaccagtataatttgggtgggggggaggtgcatacttaatattaaaagcactcgcttatgatcttaatgagttcattaaaggaaagttattaagtaatattaccatagtaaaagtaaagtaagtaaatgaaagttcagctctatcttccagtggttattgcttttattagctcacaatgaaccaacattagcttcttttgctagtgtctctgaatactaacartaaagcagttctgctggtttccacttcactgatctactcttgatttacatcaacggtgaacctttcacttagttacctctttagacttgctttccacacatcctgtttatgtgcagtcagcaggaagaaaacaagaatgtggatatgagcaggaagagaaagatgaagaaataaaatgctttcagaaaag

SEQ ID NO: 882735 - DNA, 645 bp, Homo sapiens
atcatttatcgtgtagctactatgtgacagacactgtaataagcaccttttataggacacatcttatttaatgtaatccttaaaaccatcatgtaagaatatatattggtatccccatttatagatgagaaaaatggcacctacagaaggtaagaaatgttcacaaagccatacacttagtcactggcaatgctgggatttgatagcacatctgtgtgaacaagtaagtgtaactgctgatacttatcatttgttcaaactacgcaatatccagacatttcttcagagttcctcaactgctttggtgtttacttgaagctaagaaaatcctttcagactttttctttcaagtcctcccacccacgatactagcacaactaaggaacaaactcctggcctgaawttgcccatgttctctcagaacattaagtcttgataaggatgacaatggaaagaggaaagaaagagagttcattcttaccagcaatggttcttgtgcaacattgccctgtagttttctccaatcaaaaacttctggcactgccttttctcttctaaacctggttctccaatcctgtcttccttacagtcagttcccaacatcctttcaataaattgtttttgttattaaattggcaagtttct

SEQ ID NO: 882736 - DNA, 645 bp, Homo sapiens
atcatttatcgtgtagctactatgtgacagacactgtaataagcaccttttataggacacatcttatttaatgtaatccttaaaaccatcatgtaagaatatatattggtatccccatttatagatgagaaaaatggcacctacagaaggtaagaaatgttcacaaagccatacacttagtcactggcaatgctgggatttgatagcacatctgtgtgaacaagtaagtgtaactgctgatacttatcatttgttcaaactacgcaatatccagacatttcttcagagttcctcaactgctttggtgtttacttgaagctaagaaaatcctttcagactttttctttcaagtcctcccacccacgatactagcacaactaaggaacaaactcctggcctgaaattgsccatgttctctcagaacattaagtcttgataaggatgacaatggaaagaggaaagaaagagagttcattcttaccagcaatggttcttgtgcaacattgccctgtagttttctccaatcaaaaacttctggcactgccttttctcttctaaacctggttctccaatcctgtcttccttacagtcagttcccaacatcctttcaataaattgtttttgttattaaattggcaagtttct

SEQ ID NO: 882737 - DNA, 677 bp, Homo sapiens
catctacgaactggtaaacttaaacatcttagggttattaatcaacactaggactgtcacatacacttccatccataaaaaatgatgatgaatttaaataacatgaaagttggatttgtctggcacaaatacattgattgacagagagaaaaaaagacaaagaagaaagcctgagcaactagtgttaggagaaccagttttatatttaatattcataattaaaactatttgcttcaaaattactttaagactcttgattgctttttaaaaaactaaaattttagtacttagattaaaaaaaacagaaatggccaggtttaaaatgatacataaggagtatctgtaataaaatacaaaaatttccaggtaaagctattttgtagtaatagtggttatagttttctagtgtgttttttttkttgttgttgttgttgagtggatttgaaacactgagttatctggccactaaagtttttggccatattattaacaaaaaaatatatatttcaaagaaagaaagggatggacagtttctgctgtgagtttgctgaatctggggggctatagacagcatctttcatggagatgcacccatgaaggcagaagtagcagaaggaaaggtggagaaaagtcctgcaatctgcagtgtggtctgaatattccttagttaactccct

SEQ ID NO: 882738 - DNA, 681 bp, Homo sapiens
cctctttcatgagatggcatccatcttccccattacatttggctagaatggcagaacagctcaggtgagcttaatttatagcagaaaaaaaattcacactggtttaatagttttcaacaccagtcaatttctatgtgtgcacagagctgtacataagaaacagtggctatggtgctgaaatgcactaagctatgtcatagtaaaattgattctgaaggaataaacaaagattcccattcctagaagaatctctataatattatcaagtttacttactgcttaagagaaagaaacccagtatcttaaaacattgtcaagattctgggcagtctgattctgaaatctcctatcaattttgcctttcaattagcaggttttgaacaatatcatgccctcgcctattgctttactgatctaataactcctatgcatatttcgctgttctttatatattaaacrgtgatgtgaaacaatcatttttagaatatatgttttcaggttttgttgtttatctatggctggtctccttagagcctttaatttgttactatgcaccagaagcttccaacaaaggactacagtgtcaaatactattttaaaaacatggctgactacatagtcattttcttttttgacaagaattagagggaggaaaactaggtcccataaggaagtatcaaa

SEQ ID NO: 882739 - DNA, 521 bp, Homo sapiens
ctttgccaggaatgtctgaataaggattaaacctatgggaattgagccccagagtaagcacatgaatgaaaaggtatcaggacatgaagagaaagagtattaataaatataaacttccttattttgtgtcattcttctttgtcttctaccttctcctgtttttccttcttcttcttctggtggggattttctgatgtgttttagaaaagcaaaattttctcaattatcagtttatttttgccaatgtatcctgaaccttttccctaaacytttccagtaatagtagagtcctccatccttcatgtgtcagaagctatcatgggggtgaactctggttattaaattgagctgccattggtgtataagtcatagtttctcttaagttactcaccttccttcttaactctatttgtgtttttgtgagagacacttcccttctctctatacccctctcctccctttcctctaagtctaaatgtaactgttccatagaaaataaaaaaaattgaaagattagaagc

SEQ ID NO: 882740 - DNA, 626 bp, Homo sapiens
actagaaataccatttgacccggccatcccattactgggtatacacccaaaggattataaatcatgctgctataaatacacaggcacacgtaggtttattgtggcactattcacaatagcaaagacttgaaaccaacccaaatgtccaacaatgatggactggatwaagaaaatgtggcacatatacaccatggaatactatgcagccataaaaaatgatgagttcatgtcctttgtagggacatggatgaagctggaaaccatcattctcagcaaactatcgaaaggacagaaaaccaaacaccacatgttctcactcataggtgggaattgaacaatgagaacacatggacacaggaaggggaacatcacacaccggggcctgttgtgggtggggggagtggggagggacagcattagtatatatacctaatgttaaatgtcgagttaatgggtgcagcacaccaacatggcacgtgtatacatatgtaacaaagctgcatgttgtgcacatgtaccctaaaacttaaagtataataaaaaaaataaataaataaacagaattcatgagacatcttgtttctaatgaaattttgaatttcttttgaatttcattttatttttga

SEQ ID NO: 882741 - DNA, 626 bp, Homo sapiens
actagaaataccatttgacccggccatcccattactgggtatacacccaaaggattataaatcatgctgctataaatacacaggcacacgtaggtttattgtggcactattcacaatagcaaagacttgaaaccaacccaaatgtccaacaatgatggactggattaagaaaatgtggcacatatacaccatggaatactatgcagccataaaaaatgatgagttcatgtcctttgtagggacatggatgaagctggaaaccatcattctcagcaaactatcgaaaggacagaaaaccaaacaccacatgttctcactcataggtgggaattgaacaatgagaacacatggacacaggaaggggaacatcacacaccggggcctgttgtgggtggggggagtggggagggacagcattagtatatatacctaatgttaaatgtcragttaatgggtgcagcacaccaacatggcacgtgtatacatatgtaacaaagctgcatgttgtgcacatgtaccctaaaacttaaagtataataaaaaaaataaataaataaacagaattcatgagacatcttgtttctaatgaaattttgaatttcttttgaatttcattttatttttga

SEQ ID NO: 882742 - DNA, 669 bp, Homo sapiens
atgatgctacctaaattatattcctccttactttactgacatcttagttaagtgttttttattaaaagagtataaacttcatcttatcactgtgaatggaaaatcagtatgactgccatgaaatacttgttaaaaaattaataaacataatgaaaacaacaactgttatcatttaagattattgatataattagaatgatccaccatatttgtaactgttttctgttcatcatatttgtttgttagtttgtttcaagaatagtcttattgagatgtaattcatatactgcacaatttcaacatgttaagagcttggaattcattattcatattcttaaaagaaaaaactgaaaaactgatattaaacaacttttgctggacttatcagagaactggggttgcatgacaaaccgccaccctggaatgcatatagacaggtaaatttaaagagggatacctgagatttgcttacctagaacagaagatgctggagccataagctgtttaaaaaaacacttaaayagtaattttgaagaattgctgatgtccaagtttagacaattgtgacaatgagaaattattgagggttactgactcaggaagatcaccacacttttgtaagttctgacaacaggaatgcagccaggttctcatagtgaagaagccaaa

SEQ ID NO: 882743 - DNA, 611 bp, Homo sapiens
tgctcagggtggtgatgtacttcctatttgtgcattctttattattttggtaaatgatacgtcttccaggctcttctgtggaacataatcatctgttaggggtcagggagcaatggtggttccaatattacacaatacatgttcttaatgatgcctacttrtatcatcctttttatcctatctagaaccatctgcaatgcaattcaggcatttcaagatacttatatgagccaccaattttaccatgcatctagaactacccttgtagcatgtttgcactatctgctggggactttgccaagatattaaactctatgacttggaagagtcttcccaaactggtaaattcccctctatttaatcttaaattctgcaccctatctttttatagcaccctcagaatccaaacccatgtgacctttgccaactgctgtcagcgggtgttcgttaggtcctacagtttatttgatgcatagcccctttcttcctttacaaggaccaatttgtcccatcagaatatgttgtgacttaaccctagttattggcctaacatccaggagaggagttgagggaagatctacatggaggacatgttgtccttctaggaagaa

SEQ ID NO: 882744 - DNA, 611 bp, Homo sapiens
tgctcagggtggtgatgtacttcctatttgtgcattctttattattttggtaaatgatacgtcttccaggctcttctgtggaacataatcatctgttaggggtcagggagcaatggtggttccaatattacacaatacatgttcttaatgatgcctacttgtatcatcctttttatcctatctagaaccatctgcaatgcaattcaggcatttcaagatacttatatgagccaccaattttaccatgcatctagaactacccttgtagcatgtttgcactatctgctggggactttgccaagatattaaactctatgacttggaagagtcttcccaaaytggtaaattcccctctatttaatcttaaattctgcaccctatctttttatagcaccctcagaatccaaacccatgtgacctttgccaactgctgtcagcgggtgttcgttaggtcctacagtttatttgatgcatagcccctttcttcctttacaaggaccaatttgtcccatcagaatatgttgtgacttaaccctagttattggcctaacatccaggagaggagttgagggaagatctacatggaggacatgttgtccttctaggaagaa

SEQ ID NO: 882745 - DNA, 648 bp, Homo sapiens
attttgtacctgattcgctaacattttaaaatgaagattttaaaaaatgtatcaaataggtcaatttatttggcttactgagcgtacatatttaacacaactgattcctaagcctttgggatacaattctttatttttaaccctcttttattgaggtatcaaagaaaattagtaagagtaccatttgataagattagaaatgtgtatccccatgaaactatcaccacaatcaagacagtgaacacaaccacataatctcccaaagcctcccagcaccccattgtaattcctctcatccttccctgcgcctcactcccaacccaggcaaaccctgtttttttgtcactatcaattattttgcattttatagagttttatataaatggaataatccagtatgtatttttatttggttggcttctttcactcakcattattattatgagattcatccatgttactatgtgcatcaatatcagtagttcatttgttttgtttttaagttgctgagtagtttccaattgtatgtataaaccataatttgtttattcatctgttcacagacatttcagctatttccagttttgggctattacaaataaaattgctgtgaatattctggatataaatcctttatcagatatatgc

SEQ ID NO: 882746 - DNA, 648 bp, Homo sapiens
attttgtacctgattcgctaacattttaaaatgaagattttaaaaaatgtatcaaataggtcaatttatttggcttactgagcgtacatatttaacacaactgattcctaagcctttgggatacaattctttatttttaaccctcttttattgaggtatcaaagaaaattagtaagagtaccatttgataagattagaaatgtgtatccccatgaaactatcaccacaatcaagacagtgaacacaaccacataatctcccaaagcctcccagcaccccattgtaattcctctcatccttccctgcgcctcactcccaacccaggcaaaccctgtttttttgtcactatcaattattttgcattttatagagttttatataaatggaataatccagtatgtatttttatttggttggcttctttcactcagyattattattatgagattcatccatgttactatgtgcatcaatatcagtagttcatttgttttgtttttaagttgctgagtagtttccaattgtatgtataaaccataatttgtttattcatctgttcacagacatttcagctatttccagttttgggctattacaaataaaattgctgtgaatattctggatataaatcctttatcagatatatgc

SEQ ID NO: 882747 - DNA, 653 bp, Homo sapiens
cacattttgttcttatatcaaaaggacacagattataaagctgtaaattctccctaatttaatctacatgatcaatgtattctcaatgaaatactgagtaattttgtgaaatttgaccaaacgatacaaaattcacatagagaaataaatatgaaagaatacaaagaaatatgaacaaaaatgatgagaagggactactttgatcagatactgagatakaaaactacagtcactaaaatagcctgatactaatgctttgacagaacaatattctggaataaagagttcagaaacagaaacacaaacaaatacatatggtaacctagtctaagataaaggtagagaaagtggacttcagtaaatgatgagaggtaggctagaatctacctggaaatcaaaacaaaagcagattcttattgcatttcttacactaaaatgacggttagatgggttcaaaatgtaaatgtttaaaaaattattaaaagaaaacacagagtgtggaaaaacataaagcctagaaccataaaggaaacaactgataaaaataactgcataaaaatataaaacttccttataattaaaaaaataataaagttcaaaggcatcttacaaactggaaaaaagattttcaatacatatgacaaagacctaat

SEQ ID NO: 882748 - DNA, 663 bp, Homo sapiens
aatggcaaaaattaaagaatcagataaaacatattattgttattataactgtgatgaatactgataatgcatattataaaaaataaagcatatctgtgtatgtgtagatatgtaaagttctctaagatacgttcattttccaatcaatgtctacatgtaaaatagagttaaattctcatttttaagatttaagactttcatttggtacagtggtaggctgaataatggtcccctaaggatgtccatgtcctaatccctagaacctgtgttactatatatagcaaaagggactttgcagatgtgatcagtttcaggtcttgaggtgggaagattatcytgagttatcccagattatccatgtggacctaatgtaatcacatgggcctgtctaagaaggacacaggaggggtcagagtgagaaggctctgtgatcacagaagcagagtcagagggagaagacacgacgctgctggctttcaagatggaagaaggggtcacatgccacagaatacaggcttttctagaagttagaaaagggaagggaatgatcctcccttggatcctctagaaggaatcagtcctgctgacatcctaactttagccccttaagactcatttcagacttctgacctccagagctgtaagaaaataaatttgtttgaa

SEQ ID NO: 882749 - DNA, 613 bp, Homo sapiens
gaaataagatattcaactgtttgtcctacagatccagacatttcatatggctcaatctaacatctgatttcacttaatccttacaataagtctatgggagaggtgccattgaattcattttttggatggtgaggagccgtggtccatggatgtgaaggtatttctaaggctgcatggttaggaggccggcagaggccattgtctgatgctaaatcgcttgyactcttttgtatcttgctctgggtctcaggaccctcactgtgaatttcaaaaggcttggactaaaacccagtgcttttcaataagatgcagtcttgttctctgaggaggcatgtgacataaaggtgggtggtttagtgtcatgaagactggggaggagaccctttggcttatagtaggtggggtagagggtagaagccccctgcagtgtgagtcagactgactgatgaccaagcattttgctccaaatgccttttgcttcctgtttagaaacatgggcccacatgaaccccacatttcttcagacagtggaatccaatcactcagccttcaataaatcccaacagacgagggcggtactttgcttcgatggctgcctggtgggatgacctgc

SEQ ID NO: 882750 - DNA, 554 bp, Homo sapiens
ttctcaataacttcaagaaataaaaaaacatacacacctactatacagagtggctaattaagagtgaccagtagtgtggagaagatatggggtatgatgtagaggcataatgatgtttgtgcaatattagttgctaaaatcctggaagaccatagccaaatatttctgttaattattattttttcttcagaaaggcagtaaaacccaattatctaggtttaaaacaggtgtgttttgtgggaagattttttaacattttagaaaactggactaaaatttgacagcygattttaaaatacccttttttctcattttcaaaagagaaaattcttacctgttggcatgggaaagagaatttaatttcacagaacaaaagagctttctttcctacagcaacattcacacttagtgaccgctgggtatttatttattcagaagtggtttcaggtgccgactcagtgctgggcatcatgccaggcatggcaatgaaaaaataagcggggtgatgtggcctggcctctccctctctcaagaggcttaaagtccagaaggtg

SEQ ID NO: 882751 - DNA, 576 bp, Homo sapiens
atagagaaccctaaaataaacccatacacctacaaccatctgacctttgacaaaatcaacaaaagtaaacaatggggaaagaactgcctattcaataaatggtgctgggataaccagctagccaaatgcagaagaataaaactaggcccttacctctcaccattcaaaaattaactcaagatggactaaagatttaaatgtaaaacttcaaactatgaaaatcctagaagaaaacctaggaattatccttcttgacattggctttggcgaaaaatttatggctaagtctccaaaagcaattgcaacaaaaccaaaaattgacaagtggtatccaattaagctaaagagcttccatgcrgcaagagaaattgccaacagagtaaatggatagcctacagaatgggagaaaatattcacatattcacaaactatgcatctgacaaaggtctaatatccagaatctgcaaggaacttaaatcaacaagcacaaatcaaataatccaattaaaaaatgggcaaaggacatgaacagatacttctcaaaagaagatgtacaagatgatggcatgaatagga

SEQ ID NO: 882752 - DNA, 655 bp, Homo sapiens
ctgatggggtgggcacaaactaggagaagccacggtatgtggtctgccagggtgtcttcttgctataaactctgaatgacatcagaagggaaaagagtacgaaattcagagtgaaaggcctgagtttgggtcccagccccactgctgtgaatgcaaatcytgggatgttgccagctggcagagttggttttttatggaggctctgagggaaggtcttccatgcctcttccttagcttctgatgttgctccaatccttgccattccttggcttgtagatgcatcactccagtctctgcatccgtcctcacatgatgttcttctctgcaggcctctgtgtctcaaatctcactctgcatttctcttatagggacacctgtgagtggatttagggcccattctaaacccaggttgatttcatcttgagatccttacctaattacatctgcaaagaccctattttcaaaggttccattctgaggatccggtggacatgtgttttgaggaatactattcaacccaatacagctgtagagttagggggtagagtggaaaggagggcatggcagtggcttccaccggaagcacctgatctgccagggagagctggtgttcggattcaaaagacacagtctgagtcactggatggacaacctg

SEQ ID NO: 882753 - DNA, 649 bp, Homo sapiens
gttgatttcatcttgagatccttacctaattacatctgcaaagaccctattttcaaaggttccattctgaggatccggtggacatgtgttttgaggaatactattcaacccaatacagctgtagagttagggggtagagtggaaaggagggcatggcagtggcttccaccggaagcacctgatctgccagggagagctggtgttcggattcaaaagacacagtctgagtcactggatggacaacctgggggttaccactggtaaatacagaaaggttacagcacacagttgatttatggagatccattcatttaacaacttgaaaaattggctaccttccaggttctgggtctggtaatgaagtcatagaaggcccccaaaatgcaasagtcctgaagggctcccaggctcgcttcaactgcaccgtctcccagggctggaagctcatcatgtgggctctcagtgacatggtggtgctaagcgtcaggcccatggagcccatcatcaccaatgaccgcttcacctctcagaggtacgaccagggcgggaacttcacctcggagatgatcatccacaatgtggagcccagtgattcggggaacatcagatgcagcctccagaacagtcgcctgcatggatctgcttacct

SEQ ID NO: 882754 - DNA, 647 bp, Homo sapiens
tctctatctattccagctcatctcggatggtgggagatgtggagatagacagcattaggaaagtagtttgacttccttataatcctacagttctgctctgggcatcttactatggggagaaaggtgatccctagacctggttcagctgcagctgactgcctggtgcatagacttctattctccatgcagagtcatttaacattgacacaggaatagcaaactactattgcaaggtcaattttccaggaaaattctaaggaagaacatctaagagctgtttttgaactccagtctgtggttccaaagtggtggatggccattgatttcaaagcaaaccccatgttccttcataggaagtctactgtttcagtattttctaaagactagtatctaacaaaatagcatgcatttacattaagataccacccaagcacrcagggttgagtgacagccttttgttgaataacaattcacaattaaacagatcaacttaaatgtgtgtggtttgacttcagcgtggtgcgctagggagaagtgaagggctggatgaaaactctcttgggaacatcaatgtagttcccatactgtccctttctgtgacgataaaaacgttctacatctgtggtgactgagcacttgaaatgtgg

SEQ ID NO: 882755 - DNA, 484 bp, Homo sapiens
ggatcgcttgaagctgggaggtggacaccagcctgggcaacatggtgaaacccatctctactaaaaatacaaaaagtagccaactatgcctgtagtcccagctactcgggaggctgaggcacaagaagtttttgaacctgggatgtggaggttgcagtgagccgagatcgcactattgcactccagcctgggtgacagagtgagactccatctcaaaaaaatwaaaaaaaaggtcaatagatgcttcagagcaaacaagagatgccatgccagtacctgaaccccccctgttaaagtgcttgttgatgtctttgggaagaacaccatcctgtgtgaagatgaaggatggtctgctccgtgggacacatgaaaacttgaagagttcagagatgggagaatcaggtggagagcaggacaggaagcaagggttcaggggaaggtagtatgaggtgaaggtcttgacaggcaggtggtccagcaggcc

SEQ ID NO: 882756 - DNA, 627 bp, Homo sapiens
taatccttgcaagacttctccttccccagcctctctaccggtctgaggatatcattagggctacttatccactttctcctaaaagaccatgagaaataatctcatcactctgtacttctcagcgtctaccagaatgtcaagcctttgagaagacactttccccataccctgacttgtgccctcaggaggttcttcacattccttaagaggactcaatcttccagcccttccttaccaagcagatacttccactgtgtcctctggaatcagcactatcatcagcaaaaccccgtgtacrtccagtcttttctcagaaagttctcttctttgagatctgctctcccctgaggaccctgctttctcctgtagtcctcttgaatggtggctatttcctctcccattctgcatggagtatagagttgggaagtatgggagttatcctttctgatttgcatgatctcttcttgatcattttcttccccctttcctaaaaaattctggtcctttgaggtaactgccattaccatatgagttagtctgggttctccagagaaacagaaccaataggctatctatctaactatctatctatctatctatctatctatctatctatctatctatcta

SEQ ID NO: 882757 - DNA, 664 bp, Homo sapiens
aatgatttaatatatgcttaattgatgttctggatgaagaaaagagattaatggtgcagaggaaatatttgacaagataatggctgagaattttcctgaattgatgaaagacaccattccatacattcaagacgagatatagaagaagaaatmaaaaccaagcattttatgtaagaagcccagaaagaaaaatgcaaaaagaaaatctctaaagcactctgaggaaaaagataccttcctttcaaataaatggtagtaaaagtggtagctgactttctcatggtgagggaggactgaggaggaatagaggaaattggagttcaataatttacagtttagagttcaatatgctaaaaaaaaaaaactctaccaatttagagttttatactcaacaaaattgtccctcaaaaggtgaggcaaaataaaaatgttttcagacaaacaaaaacacacattttgttaccaggagaacctcattaaaagtaattctaagaaatgtctttaggaacaaggaaagcgattcagaacagaatgcctgggctgcaagtaggaattactaggaataaagtgtaaatatgtaggcacattttaaacaacacttactatgtaaaagtaataatgtggaggaaaaatagaattaaaataatatagaacaataacacaa

SEQ ID NO: 882758 - DNA, 664 bp, Homo sapiens
aatgatttaatatatgcttaattgatgttctggatgaagaaaagagattaatggtgcagaggaaatatttgacaagataatggctgagaattttcctgaattgatgaaagacaccattccatacattcaagacgagatatagaagaagaaataaaaaccaagcattttatgtaagaagcccagaaagaaaaatgcaaaaagaaaatctctaaagcactctgaggaaaaagataccttcctttcaaataaatggtagtaaaagtggtagctgactttctcatggtgagggaggactgaggaggaatagaggaaattggagttcaataatttacagtttagagttcaatatgcyaaaaaaaaaaaactctaccaatttagagttttatactcaacaaaattgtccctcaaaaggtgaggcaaaataaaaatgttttcagacaaacaaaaacacacattttgttaccaggagaacctcattaaaagtaattctaagaaatgtctttaggaacaaggaaagcgattcagaacagaatgcctgggctgcaagtaggaattactaggaataaagtgtaaatatgtaggcacattttaaacaacacttactatgtaaaagtaataatgtggaggaaaaatagaattaaaataatatagaacaataacacaa

SEQ ID NO: 882759 - DNA, 664 bp, Homo sapiens
aatgatttaatatatgcttaattgatgttctggatgaagaaaagagattaatggtgcagaggaaatatttgacaagataatggctgagaattttcctgaattgatgaaagacaccattccatacattcaagacgagatatagaagaagaaataaaaaccaagcattttatgtaagaagcccagaaagaaaaatgcaaaaagaaaatctctaaagcactctgaggaaaaagataccttcctttcaaataaatggtagtaaaagtggtagctgactttctcatggtgagggaggactgaggaggaatagaggaaattggagttcaataatttacagtttagagttcaatatgctaaaaaaawaaaactctaccaatttagagttttatactcaacaaaattgtccctcaaaaggtgaggcaaaataaaaatgttttcagacaaacaaaaacacacattttgttaccaggagaacctcattaaaagtaattctaagaaatgtctttaggaacaaggaaagcgattcagaacagaatgcctgggctgcaagtaggaattactaggaataaagtgtaaatatgtaggcacattttaaacaacacttactatgtaaaagtaataatgtggaggaaaaatagaattaaaataatatagaacaataacacaa

SEQ ID NO: 882760 - DNA, 655 bp, Homo sapiens
caaaatgcatgtaaaggctggagaaatccacattataaaagttaggtctgccactggcttcgggttgactgcaaaagaatcagagatttgatgcttcacagattttccacagtcagcctattgccttagaaaggctatttttttcagccttccacaactcctgtgaatgtatctcatcggtgtggcctaaattgcatgtacaaccctggtgttacagacattcagtccctaatactgaggaaatcattgatgggttgtaaaggttataagtgccaacagagaatgtccaggaaacccttgcacaacatttgaatgttggaagataaaargtgggtgtgagtcatcaattctgcattaagatttgacttcttagagtgtaacttttatgaaatcaaatttattgattaaaataaagactagcattgcataattgacctcttgttgtctctcccgcttatgtactccaagatgactattcaccacatgcatccaccttgaaacacattcgttttattggaaataactcaaaaattattctaagccactctgtcagcattgaatgcaatcaaactgccagtgaaaaaaatgtatgctccatgattataatgggaaatgcacgtgtagagagaaaaccaatttgtttgtctctgtgact

SEQ ID NO: 882761 - DNA, 655 bp, Homo sapiens
caaaatgcatgtaaaggctggagaaatccacattataaaagttaggtctgccactggcttcgggttgactgcaaaagaatcagagatttgatgcttcacagattttccacagtcagcctattgccttagaaaggctatttttttcagccttccacaactcctgtgaatgtatctcatcggtgtggcctaaattgcatgtacaaccctggtgttacagacattcagtccctaatactgaggaaatcattgatgggttgtaaaggttataagtgccaacagagaatgtccaggaaacccttgcacaacatttgaatgttggaagataaaaggtgggtgtgagtcatcaattctgcattaagatttgacttcttagagtgtaacttttatgaaatcaaatttattgattaaartaaagactagcattgcataattgacctcttgttgtctctcccgcttatgtactccaagatgactattcaccacatgcatccaccttgaaacacattcgttttattggaaataactcaaaaattattctaagccactctgtcagcattgaatgcaatcaaactgccagtgaaaaaaatgtatgctccatgattataatgggaaatgcacgtgtagagagaaaaccaatttgtttgtctctgtgact

SEQ ID NO: 882762 - DNA, 655 bp, Homo sapiens
caaaatgcatgtaaaggctggagaaatccacattataaaagttaggtctgccactggcttcgggttgactgcaaaagaatcagagatttgatgcttcacagattttccacagtcagcctattgccttagaaaggctatttttttcagccttccacaactcctgtgaatgtatctcatcggtgtggcctaaattgcatgtacaaccctggtgttacagacattcagtccctaatactgaggaaatcattgatgggttgtaaaggttataagtgccaacagagaatgtccaggaaacccttgcacaacatttgaatgttggaagataaaaggtgggtgtgagtcatcaattctgcattaagatttgacttcttagagtgtaacttttatgaaatcaaatttattgattaaaataaagactagcattgcataattgacctcttgttgtctctcccrcttatgtactccaagatgactattcaccacatgcatccaccttgaaacacattcgttttattggaaataactcaaaaattattctaagccactctgtcagcattgaatgcaatcaaactgccagtgaaaaaaatgtatgctccatgattataatgggaaatgcacgtgtagagagaaaaccaatttgtttgtctctgtgact

SEQ ID NO: 882763 - DNA, 623 bp, Homo sapiens
ttgtaacaaatacgccactctggtggggaatactgataatggggtgaggctatgcatgtgtggtcacaggggcatattggaaatctctgtatcttctaattttgctgtgaacctaaaactctttaaaataataaagtccttaaaattaaataaaatcagataatgacatctagaaagtttcttgaattataaaaataacttggttttatcttatgtaataatccatttgatattatgcaggacacatggaaatcttaactatgttcataatctgatgtaatttcaaaacaaaatcctcacatggtaggatgtcttcaaaacttgctactgttgtaaaattaattttgaatgtggaaaacatctctagtgttttccaaggtattccacgttggttgttgatgccaaattaaaatttrtaattatttattttctcatgtaatgtctacaactaccttttagactgggtcaggtaccgcatatgctttgttggcctctgcatactaagtacctaacacatagttgctactaaatctatattgagagaataaataaaaggaaaaggtccattaggtaactaaatacatgttcagccttgaaagtctttcagcaagtcttaaaagtct

SEQ ID NO: 882764 - DNA, 641 bp, Homo sapiens
ctgtaaataaaatatctgaaataatagacattcctcctgtcttctggggaatttcagtggtggtaatagaatactttctataacaaagccacctatcaatttagttttgtgacactatatctccttggtgcatcttttgtagtaagctttacagtaaatattttcaaaaccagaatttaaaaaattctattacaattgtgtttctcaatcttgattgtgcatcaggatcacctaaagggctctctaaaatattatattttggggccccactcccagttcactgatttagtaagtctgaggtgctacctcagaatttgtattttagcaagttccatattatattgatgtttatagtgctacactttgagaaccrctgtctaacagaaatagcattcacatatgaaaaaaaaaaatcaggaatcaggcggtatgtgtgtgtgtgtgttagcacttccagcacctggatgagccaaagtctaaacgaaaaaataatgaaaatccttaccaccaataagcttctcttcaccacatcctaacatctggtcagaagaaatacatgcctttggtatttgctttccttctagtcataagaatagatgcagcatataaaaggactattaaatatctaggaacaaattaaa

SEQ ID NO: 882765 - DNA, 643 bp, Homo sapiens
ggggaaaaacatgcactcttctttgtagatccagaattttttatataaaatgcaacaaccatttataattcttagcaagttagaaaaggagggagatattcttatcttaataaagagtgtctattaaattcctgtaaaacataatttttggcaaacagwtttatatgcattcccttaatattaggaaataacacaaagttctcattatcgtcacttctattgtacattgaaatgaaaccccaagtcactatgtaacaccaaataataataaatagtaaaattaaaattgaaatattaacttgtaaagaagaaaaatgtaattatttacagattgtacatagaaaacctgaagaatcttctaattaatagaatcaatataaatatatagcaatatagctagacatcaaattaatgtacaaaaatcagtcttatagctctgcatcagctacatttacaaagtgtagtgggaaatatattttgtgtcacttaacagtgtgtagagtttaatttgttatgaaaacatatcaaacaaatatatatagtcggaaggaggtaagctgactttttgcacttacgtgcaggctcaaaattctcattataggaacatttagaaatcgacttatttatacaaaaggctattatg

SEQ ID NO: 882766 - DNA, 594 bp, Homo sapiens
actgggagctataacatgttgattcaaactctctaaatgggctgatgtatagatttaccaggaagtaaactaaaaagagacctgtttctgtatgacctacttttatgtttattaaaatttgaaatgttttttaaagtgttgataaacttcaactggcaaggaaaaaaaaagtcaccctgtattttctaatcaaggaggattaaaaggctgtgaaactatatccaatgcacaaatgttgtaattgcaataaatatttgtcctttctgttttctctacaaactcaaaaatcytagagtctgtgtttggcacattcgggagattacagccatctgctgggagacaaagctgtcaattacaaagcaatctggctttctgttccattccatttccaggttaaatatggcccaattgaggtaggatctttttattattattattacaattggaagcttcttggtactgtccaacctttgaccctattctcaggatcccaagagagatttacatgtctctgaacttggagtttgcaacacaaggtcaaccatgtcttatacaagccgtttaataaggtaaaccactcttaggcagggctct

SEQ ID NO: 882767 - DNA, 362 bp, Homo sapiens
tttctatggctccactcagatcattgctcagaaattatttctttaaaattctttcaggattactgtatttcagctaacagtattacatactattcctttatgctaattaatttttcatagaatttattactgtcctgacttgtattatatatgtgtttggtttatgtctgccttctcaatcagaataaagcctccaaaaggacarggacttatttcctaccaaaccccagggcactagtactaggtctaaggcacagtcatgcacaatcatatttgtcaagtgaatgagtgggaataataatactttagagtgagtattcacggggttgttgagaagattcaatgtcataatgcatgaatgt

SEQ ID NO: 882768 - DNA, 362 bp, Homo sapiens
tttctatggctccactcagatcattgctcagaaattatttctttaaaattctttcaggattactgtatttcagctaacagtattacatactattcctttatgctaattaatttttcatagaatttattactgtcctgacttgtattatatatgtgtttggtttatgtctgccttctcaatcagaataaagcctccaaaaggacaaggacttatttcctaccaaascccagggcactagtactaggtctaaggcacagtcatgcacaatcatatttgtcaagtgaatgagtgggaataataatactttagagtgagtattcacggggttgttgagaagattcaatgtcataatgcatgaatgt

SEQ ID NO: 882769 - DNA, 584 bp, Homo sapiens
tctcattttacgccccccaaatgcatgattcactttgaatgataaatatggctatgaaatggagtgtttccgacattcacagatcaaatgtaactggggaggaataattcagatgcatcctgatgttttatatttccatgcactaatatttgcttcacaccatatgtcacagtaacacaagagtgtgatcatgtagaacagcccagtggttttctcctccaacatctggtcttctgaggaagtctagcactttagagattcatgtgtaaatcccaagacaggtggtaaaaatcaaatgccttggtgacgggaagtaaaaagaaggctagaaaggctttttcctgtcatcagattggcatcaaggaatgctgtgatmatcttagtggaattaaacaaacagaaccagtagtccactggaccctctctgaaaagccacacactatgtacattcacagggcagtaaagagaaccagttgtcagcaggcgttttaatcggtggcccccctcttcaagtctgctgactcttggctctgttgaaggcatccagccctggaggcactatagcttcgtaaggagcaatggca

SEQ ID NO: 882770 - DNA, 609 bp, Homo sapiens
catgcattttggcttctagctgagattccgctgaattaatagttgattaaaattgttttaagaaaaatgtcactgaatggcaaaatgccaaataacaactgaattcatttgtgaggcacaaagacgagtgttactatctccaccccatctcccacaggccaatggcagtcctgacaaagtacaaagtgaagctctcgtctcaaagaaaagacacaaaatccccagcagccccatcccagagaggatatgacagcagagctccagggkggacacagctcatgataacagtggatttctcttgcttccccttgatatgatatcataccttttattttttccaatcaaaatgtagattaaatttcataatgcactgcaaagtgttttcaaaatgcaaactcgttacaaaaacccattgagtaatattattaatttatgtttattgctatatagaaagaatcttgctgcttttctgtttttgactatttgcacatgctctttcctctgtttggaatgcctttctcattttccgcttggagaaagcccaacccaccaggagaaaaaccttccttggcaaacttgccactaccccagagcctcttgtgactccta

SEQ ID NO: 882771 - DNA, 609 bp, Homo sapiens
catgcattttggcttctagctgagattccgctgaattaatagttgattaaaattgttttaagaaaaatgtcactgaatggcaaaatgccaaataacaactgaattcatttgtgaggcacaaagacgagtgttactatctccaccccatctcccacaggccaatggcagtcctgacaaagtacaaagtgaagctctcgtctcaaagaaaagacacaaaatccccagcagccccatcccagagaggatatgacagcagagctccaggggggacacagctcatgataacagtggatttctcttgcttccccttgatatgatatcataccttttattttttccaatcaaaatgtagattaaatttcataatgcactgcaaagtgttttcaaartgcaaactcgttacaaaaacccattgagtaatattattaatttatgtttattgctatatagaaagaatcttgctgcttttctgtttttgactatttgcacatgctctttcctctgtttggaatgcctttctcattttccgcttggagaaagcccaacccaccaggagaaaaaccttccttggcaaacttgccactaccccagagcctcttgtgactccta

SEQ ID NO: 882772 - DNA, 618 bp, Homo sapiens
ccctggccttttgtgagtatcccttacactcttcaggacccttcctcccacagcactgccctcctgccagggaaccccactgcgctcggtcctgcaggccctgacctggcctcacttggggatggactcctcatctaacaagaaggaaagtttcctagttgagaaaaggagtgaactttgggattaaagctcttcttatttccttgactatggccagattgtttaactgatttcatttcttttctcttccwgagacattcagtccttacagatgtcctgctgtttgggtttccaaattacacttcttacactgactacccagagcataaattctgttgccacatggatgtcctggattgaacctggctctaacgctagtaaactttgggtccttaggtaagtcacttaatttctctctgcctcagtttttccatctgtaaaatgaagttaataagctatttttatttataggtttggtacaggaattgtattttctaggttttccacatgtctcacattccttttgccataggatcacatgttggcctcctaacatgcatggtccctgaaggtatttgaatttgcagtttaagtgttttcagagtcctcattgaccac

SEQ ID NO: 882773 - DNA, 597 bp, Homo sapiens
atcaatctcatcactcaggtagtgagcatagtatccaacagttagtttttcaacccttggcctccttcctccctccccattctagtagtccctagtttctattgttcctatttttatgtccatgagtattcaatttataagtgagaacatgcgakatttggtttttaagttcctgcagtaaactgattagcataatggcccccaacagcatccatgttgcttcacaggacttgattttattcttctttatggatgcacagtattccttggtgtatgggtaccacagtttctttatccagtccaccattaatgagcatctaggttgattccatatctttgctgttgtgaatagtgctgtgatgagcataaaggtgcatgtgtatttttgttaaaatgacttatttttgagaagtcattttgaagatatataaatgaagtgggcatgaccaaaagaaacagaaataagagaaagagtattccttcaaatgacttccaaaactctgacagagttggctaaatttctgcctcctagtctcaaaaagtatatgtagattttttaaatttgaaaactctttgttttgaaatgacttaagattc

SEQ ID NO: 882774 - DNA, 539 bp, Homo sapiens
ttctccaccgtttttgagagaatcacttcactgaaactctagttgtgtggggcacatgccattctgattttttcaaatatttcaacttattttataagaatggttttctgactccttccttatggtagaaagggaaagcgtcaacataatttaagctgaatgttctagaacattgaaagccacccatcttaaagagcatgagatggtcagtttcaggtgttttctctttcttgctagatcttacgagaaaagagcccatgaaaactaaaatgcaaacgataaggttactcaaaaaaaaaaagattggcactcagaaggtagtatgcatattaagcagctgttgtttctgtctagccatatagaggcgtccatyattgtgctacaggagcttataaacgaaagagaccttaggggtcatctacatcagccctagtcccttgctatccggcattcatctgtaactctcgcaactgatgatctatagtttctgtaattatttgtttggcttggatgctgaatacttattttattttattcaa

SEQ ID NO: 882775 - DNA, 605 bp, Homo sapiens
ttaaagcaaacgaaatatggcctgagaaagactccatacttctatatttgagcccttgtggatgaactgcaacctaacttaataggtagacaagttcaaaaacctaacttaggagtatgcacctgtaacaatcacgagttctggccaatccctccagccatacttcaaccagtcatacactgctgagtgttcaaactgtgtttaaataaagcaarcactgagctgtaaccaatccagctgtttctgtacctcacttccaatttctgtacctcacttcccttgtttttggtctataaatcttcttctaccacatggctgttctggagtttctctgaatctgctgtgattctgggggctgcctgattcacaaaccattcattactcagtttaaataactgagcaataactcctttgaatttaattcagcttaagttttctttttaacactactcatacttacctttacaaaagagtaccttaggaatctctgtgacatatcatcagggaccatcttgagcttcatgtgtgaataacactcttggacacaaagaaacacaaatatattacaacaaattcttccattattgactcggttcattccggtt

SEQ ID NO: 882776 - DNA, 605 bp, Homo sapiens
ttaaagcaaacgaaatatggcctgagaaagactccatacttctatatttgagcccttgtggatgaactgcaacctaacttaataggtagacaagttcaaaaacctaacttaggagtatgcacctgtaacaatcacgagttctggccaatccctccagccatacttcaaccagtcatacactgctgagtgttcaaactgtgtttaaataaagcaagcactgagctgtaaccaatccagctgtttctgtacctcacttccaatttctgtacctcacttcccttgtttttggtctataaatcttcttctaccacatggctgttctggagtttctctgaatctgctgtgattctgggggctgcctgattcacaaaccattcattactcagtttaaataactgagcaataactcctttgaatttaattcagcttaagttttcyttttaacactactcatacttacctttacaaaagagtaccttaggaatctctgtgacatatcatcagggaccatcttgagcttcatgtgtgaataacactcttggacacaaagaaacacaaatatattacaacaaattcttccattattgactcggttcattccggtt

SEQ ID NO: 882777 - DNA, 591 bp, Homo sapiens
ctttgacttgtagactcgccacatcaatctctgcctccattttcacatcactttcttcctggtgtctttgtgtgtcttctcctctttttaaagatgttttattgaattttgggcccacctggataatccaggataatctaatttagagatgattaactaaacactatctgcaaagaccctttttccaaataaatcatatacacaagttccaagtaaaatttctctatatctatctatccagctagcaagytatattgctatctagctatctatctgatatggtatggctctgtggccccacccaaatctcatctcaaattgtaatccccatgttttgaaggagggagctggtgggaaatgactggatcatgggggcctttcctcccatgctgtactcatgatagtgagtgagttctcatgagatctgattgttttacaaggcagttttccctgctcttgcacactttctcttgcctgttctccttctgccatgattgtaagtttcctaaggcctccccaaccatgtggaattgggagtcatttaagcctctttcctttataaattacccagtctttggcagttcttgatag

SEQ ID NO: 882778 - DNA, 682 bp, Homo sapiens
agatagacagatttttttttggtggaggggtaccatttaacccactgcagttaatgccctgtatctaaaagtttacagctattgtagtgataactccctgcctgcaataataaatactaggaggcaacagctgttgcyaatttaagtacaaaattaggacaccaagattaggtttctccattgcaaaatgtaggccaattcaacaccaacctgtgactctacctgtacactggtgctggtctaaaaactttggcttgtccatgaggttataacaacagaatttaagagtaagcatttaaaaaactccattagcaatttgacacggtaaatgaaagataataataataatgaagcttctatttttaaagtctttttagaattttatagttctagtaattcagttttattttttaaaatattggtctgagctgaatttaaaaagtatataaacctgatccttcatcacaggttgtttgagaagcactggtataaactgtcattggtaaaactagaatataacaatatgcctccacaattacgttcattcaaaggagagaaaacacatcagtctcaggaactgaagggatgtgcttcatggacaatgtgctgtatatcatagataataatttctaattgccctgtttaatgtacttcagcatgtagcttttatcactgctatggt

SEQ ID NO: 882779 - DNA, 588 bp, Homo sapiens
tcacagttctgcatggctagagaggcctcaggaaacttacagtcatggtggaaggcaaaggtaaagcaagtaccttcttcacgtggtggcagaaaagagagagctagcaagagcacagaaaactaccttataaaaccatctgatctcatgagaactcactcaatatcatgagaacagcatgagggagaccgtccccatsatctaatcacctcccatctggtccttccctcgtcatgcagggattatggagattacaatttgagatgagatttgggtggggacacaaagccaatccatatcactgaggctttcttatttttactcagcatgagggttttgagatttatcaatgtcatctgtattagttttccactttgctgagtactattccattttacgaccacatgtgactatactacaattgtttatccattctcctattgatgaacaccttaactctcttcaggtttaaactattatgagtaagacagctatgaacatttctgtacaaatgttttgatgaacatatgttattatttttcttgattcatttgtgtctctatatttttgtttatggtttcttttaag

SEQ ID NO: 882780 - DNA, 588 bp, Homo sapiens
tcacagttctgcatggctagagaggcctcaggaaacttacagtcatggtggaaggcaaaggtaaagcaagtaccttcttcacgtggtggcagaaaagagagagctagcaagagcacagaaaactaccttataaaaccatctgatctcatgagaactcactcaatatcatgagaacagcatgagggagaccgtccccatgatctaatcacctcccatctggtccttccctcgtcatgcagggattatggagattacaatttgagatgagatttgggtggggacacaaagccaatccatatcactgaggctttcttatttttactcagcatgagggttttgagatttatcaatgtcatctgtattagttttccactttgctgagtactattccattttaygaccacatgtgactatactacaattgtttatccattctcctattgatgaacaccttaactctcttcaggtttaaactattatgagtaagacagctatgaacatttctgtacaaatgttttgatgaacatatgttattatttttcttgattcatttgtgtctctatatttttgtttatggtttcttttaag

SEQ ID NO: 882781 - DNA, 592 bp, Homo sapiens
gtgagatctttcagcagatgttgttttccatatctttaccctttccgttgtggaagggggaaaaagccctcagaaaagcaattttggaggaggcagaaaaggtttccatcatgaacatacttttagaaacagctggtaaaacaaatggtccaagtgcaatgcctggagcatatctattcaaacaaggttgtttaaagataaaagcacccacttctaaatatcagcattagtagtgatttcctcacrtatatttaagagatggaagagcttgtgaagactttttgatttctattttgttttctgagacttctttaactcttttggttttgttagtatttgaatttatcagaagctgctcaaattgttaaaactgtatcatcatatgtaaaatatataaatttacatataacggatgcataaagatttgctttcttattctaagaatgttcttatttgataacatctatgcatagtccagaagattgacatgaaaaactgataatgtacttaggtattaccaatcctataacccaatttgtgaaaaggtcaggcactcctactaaagaacaaacgtttgtatttgtagcattta

SEQ ID NO: 882782 - DNA, 684 bp, Homo sapiens
tttttaatactcttaaaaacatcttctggaggtaggcttctagttaattagtgttttaattatgtaattataatttttgtttcctttctctgtcctcatatttgctagaaaaacactatgtcaaccatttgatcatactcatttgtttctaagcatatatcttaactaatctagagacccatattcattgagcttttggaatgactggaaaatttctcaaagcttcctcccttatctacggtttagtttacaaaaattaaataagcttatgatgtgtgtctcatccacccaagtacatctgcagggctcctctattgtaaatcagctgcctaaggctcaagttagacacagtcaaagccstgtatatttagggtacataatcttgatgtcaagtgctggagtcttgggcaaacttttcatctttttatgtaaaactgatttccattaagtatgaaaacaccttggtggtattgattttatgaaccctgtacattccctgcaatgaagacagattttagggtaaaagaggatgtttgcaagaaatggtgagttttattgtaagagaacttaccggccctatagagaggagaaaacaggttggaatgtccagctgctaccacccaacgggatcccagcacaaagaaaacagtcaaaattatgttcatcatgacagagcaaatgagc

SEQ ID NO: 882783 - DNA, 580 bp, Homo sapiens
ctattgtaaatcagctgcctaaggctcaagttagacacagtcaaagccgtgtatatttagggtacataatcttgatgtcaagtgctggagtcttgggcaaacttttcatctttttatgtaaaactgatttccattaagtatgaaaacaccttggtggtattgattttatgaaccctgtacattccctgcaatgaagacagattttagggtaaaagaggatgtttgcaagaaatggygagttttattgtaagagaacttaccggccctatagagaggagaaaacaggttggaatgtccagctgctaccacccaacgggatcccagcacaaagaaaacagtcaaaattatgttcatcatgacagagcaaatgagcttttggggaaaacagaagcaaaataaacctttttgaataatttattattctataaacacaatcataaagcgtaatggtatcagttcaggagaaaggtcccactgctcctgtgttctacgtcagtggctgcagggccacagcaggcagagataaccaagcatgctttcactgccctgatcaccattcccccattaataatttgcttgg

SEQ ID NO: 882784 - DNA, 580 bp, Homo sapiens
ctattgtaaatcagctgcctaaggctcaagttagacacagtcaaagccgtgtatatttagggtacataatcttgatgtcaagtgctggagtcttgggcaaacttttcatctttttatgtaaaactgatttccattaagtatgaaaacaccttggtggtattgattttatgaaccctgtacattccctgcaatgaagacagattttagggtaaaagaggatgtttgcaagaaatggtgagttttattgtaagagaacttaccggccctatagagaggagaaaacaggttggaatgtccagctgctaccacccaaygggatcccagcacaaagaaaacagtcaaaattatgttcatcatgacagagcaaatgagcttttggggaaaacagaagcaaaataaacctttttgaataatttattattctataaacacaatcataaagcgtaatggtatcagttcaggagaaaggtcccactgctcctgtgttctacgtcagtggctgcagggccacagcaggcagagataaccaagcatgctttcactgccctgatcaccattcccccattaataatttgcttgg

SEQ ID NO: 882785 - DNA, 760 bp, Homo sapiens
tgaatacaatacactattactaactacagtcctctgcacattagatctttagacttgttcatcctaaacacctgttacttggtattctctcacctacatgtcatttcctctcccacctctagtaaccactgttttattctctatctctgtgggtattagacattgtttttttagattccacatataaatgagatcatgtaatatctttctttctatgcctggcttatttctcttagcataaaaccctgcaagttatgtatattgtagcaaatggcaggatctccttatttaaggctgaataatattccacttaatattttataatgtgtccatcccttgacagatacttcgattgctttctatcttggctaatgtgaatataggtcgggtttggttccaaaccatttcaacaaagtgaatattacaacaaagcaagtcacatgaatttcttggtttcccagtgcatataaaagtatgtttataccatactgtgctttgttatatgtgaaayagcactatatcttttaaaaaaatactttgataaaaaatactttactgctaacaaaaatgctagtgatcaacagtattcagcgaatgtttttgctggtagagggtcccgtcttgatgttgatggctgctgacagatcaggatgtgggtgctgaaggttgggatggctgtggtaacttcctaagacaaaaatgatgtttgctgcactgactgatttttcttatcacaaaagatttctctgtagcatgcaat

SEQ ID NO: 882786 - DNA, 582 bp, Homo sapiens
ttccttttttggcaagagaacagatctggagttgagctcctgccctctaccaaactgtgaaatttgagacaagtcacttgtcccccatgccaacccctggggcctcacttttcttattcaaaaagatcaaagattttgtcctaactcatgaaatcatgagcattacatgtaaaattaccttagaaactataaaatattcatttcaaatgcatcaagatgttattagctatattttatgagctcagcactccttgatggtcctgaagagaccaaaggggctgaggccaaagggagaattctccttaaatctcttggaaacaatctgacagaccttagaattgtgtagtaagatgaggacataaaggaacagagggtcaaggtagtatcttagctcctttctcccaamgtgttgatactggttaagatacacaaaagggaaaacccacctaagaaactgccaggaattcttttttttttttttcattttgttttaatgctaacttaataatcatgtcttagtgtaactaagcttttcttcatcaagaacattataagctcattgatgcacaggctaaatcttta

SEQ ID NO: 882787 - DNA, 573 bp, Homo sapiens
taatgactggagagatgggtacacactggaacaatttatattaaaagatcaaaaacaccctggctatcatcatctataatataaagtcacgtagaagtaaagataattttcttccaggtagatgctttagttggataaagaggaagattatctactttatggccaaattctatgtaaattatatgtaaaacattcaagaaggcagatgagtttacacacaatatagcagcttttaggaaaatagacatgagacatcagaaaatatgatcacttaaactggaaagctagagcccaggaagtaatcctggagaacttgataatgcatccatatttataagaaagccaatcattgaatctatgaaaatatgtagaatgattttatgaaarttgtggttggtcaggcaagtgtttgccatgatctaaaatattcatcttgaatcctcagtaacccttacagtgtctggcacagaggaggtgactgagcaactttagtggaaggaacaattgaatatagctgatctgatactcatgggatgtacaaacacatctttatcattttccttttttttttcc

SEQ ID NO: 882788 - DNA, 629 bp, Homo sapiens
taatttattgctgtcaggtgaatctgccacacactttctttttttcttggttctttccctccttccttcactatcacttcttgagcacgattccagatactctaagaggtactgataaaatggtgagggagatagactcaggccttgacctgaagcttacagtccaataggaaagttgcacaaattaaaaagttcaaaaaacaaaamcaaacttaacagggtaaaaaaaaaaaaaaattggtgcatccacccagcagttgtcaattgtaattaatttagtctagggtttctatcagagtcagaggaaggctaaggaagtaactttcgaagtgagacctaaaggatgaagaattaaccaaatagcacagtagagaggagatgagaaagtaggcagtagaagcctttcaggtagagaataatagaagtagagaggaagcctcagagagcatgagtcctgcaaggaacagaaatgaggccggttaggctggagcggaggatgcaaagggagaaaacagagagtgataagaatacaaacgtaggcaggaaccagagcataaatattcttgtgagctaggtgctcatggtgcaaaatcccaggctctaaaattcagacatgaaagcatctatct

SEQ ID NO: 882789 - DNA, 629 bp, Homo sapiens
taatttattgctgtcaggtgaatctgccacacactttctttttttcttggttctttccctccttccttcactatcacttcttgagcacgattccagatactctaagaggtactgataaaatggtgagggagatagactcaggccttgacctgaagcttacagtccaataggaaagttgcacaaattaaaaagttcaaaaaacaaaaacaaacttaacagggtaaaaaaaaaaaaaaattggtgcatccacccagcagttgtcaattgtaattaatttagtctagggtttctatcagagtcagaggaaggctaaggaagtaactttcgaagtgagacctaaaggatgaagaattaaccaaatagcacagtagagaggagatgagaaagtaggcagtagaagcctttcaggtagagaataatagaagtagagaggaagcctcagagagcatgagtmctgcaaggaacagaaatgaggccggttaggctggagcggaggatgcaaagggagaaaacagagagtgataagaatacaaacgtaggcaggaaccagagcataaatattcttgtgagctaggtgctcatggtgcaaaatcccaggctctaaaattcagacatgaaagcatctatct

SEQ ID NO: 882790 - DNA, 632 bp, Homo sapiens
ttgataatctaccaaagtgtacatgtctttggtgcatatagagtcctcttcttttctctcctgatgctttccttccgggaaatttaattgttccacttaaatggactggaacagaaagaagaggagatccaaagcagtttaccgtcaccagtgcagtggtcaaaacatgaatattgatgctgcatggcctagaaacatattgtggtttaatcacttaactcctctgtgcctacattcttacctgtaaaataagaaactaataatacctaacttaaagcattgttgtgaaaatgaagtaatcggaatttgaaatggtatgactaaaattaaagtgcattttaattaatcatctttgtccagctgtcttcctccccaaaaagtggkcagtcattgatcaaacaatgtgtcctatttcctcctcttgccagccaaagatgctgcatcggatagagaatacacattataaaaggaaacatggaacactggtcaagcaaaatgtatttctctgcctgcaatttcccttctctactccagatattaaaaactaattctctcagttattcattgctggcagagatgattaatttaacctttatagataaagtaatatgtttggatgaaaggagcaaata

SEQ ID NO: 882791 - DNA, 701 bp, Homo sapiens
agcttcaccactgaccagcagtgggacacaggacaaggaaaactctttccaggcctcggctcctgtattagtccattttcatcctgctgatagacatacccaagaccagttgctttatttaaaaaaaaaaaaaaaaaaaaaagaggtttaatggactcacagttccacgtggctggggaggcctcacaatcatggcggaaggcgaaaggcacrtcttacatggcggcaggcaggagagtatgagagccaagcaaaaggggtttccccttataaaaccatcagatctcgtgagacttattcactaccacaagaacagtataagggaaatcacccccaggattcaattaactcccaccgggtcccttccataacatgtgggaattatggaagctacaattcaagacgagatttgggtggggacacagtcaaaccatatcatctccacacctccaaaatggagagagtaatccctcttcccatgtctgtagaaaccttgcacagtgtccggcgtacaggaaaatgtcaattagtggtaggctgttatttttcatcttttgaatgggagttgtaattttttttctttttacattttctcttagaattttagtcaatttttaaaatattgggttctaagagtgctaacatggagtaaaaaacttgatattgtcattgcttggagttggaagagaaaaagcaaacac

SEQ ID NO: 882792 - DNA, 413 bp, Homo sapiens
agtagacactacactaagcagccatcccagactccctatctcagtaagattccgtgtttgtttgtttgtttgagacaaagtttcactcttgttgcccaggctggagtgcaaactcactgcaaactctgcctcccggattcaaccgattctcctgcctcagcctcccgagtagctgggattacaggtgcccamcaccacgcccggctaatttttgtatatttagtagagacagggtttcaccatgttggccaggctggtcttgaactcctgacctcaggtgatccacccgcctcagcctcccaaactgctgggattacaggcgtgagccaccgcacctggcaagattctgtttttaaggtgcattcatcaactacattttgtcacttatctcatttttgtggttatcttcatta

SEQ ID NO: 882793 - DNA, 413 bp, Homo sapiens
agtagacactacactaagcagccatcccagactccctatctcagtaagattccgtgtttgtttgtttgtttgagacaaagtttcactcttgttgcccaggctggagtgcaaactcactgcaaactctgcctcccggattcaaccgattctcctgcctcagcctcccgagtagctgggattacaggtgcccaacaccacgcccggctaatttttgtatatttagtaragacagggtttcaccatgttggccaggctggtcttgaactcctgacctcaggtgatccacccgcctcagcctcccaaactgctgggattacaggcgtgagccaccgcacctggcaagattctgtttttaaggtgcattcatcaactacattttgtcacttatctcatttttgtggttatcttcatta

SEQ ID NO: 882794 - DNA, 619 bp, Homo sapiens
aacctggaggcaggggtgctatgactttaatccatagtcacatctcagggtacaggtgtcaaagagcagttgttcaagtgggagacttgtgttgatctgggtaatcccccacctttaaagcctagttgttttgccccaccccccctccaatattttcttgacttagtgagtgaatacttaaagacaaaaggagctaaggcaatgaagatggagggaatgaagttctgggaaggctggaggggtatgcagatttgtaggggttacagatgtcatgctgcatctgtggaaatgaggattcaaaaccaaaggtgggtagggaataaatgtggawgtgtggatctttcctgaggttagggaggaggacaggggacaagggttacactgactacacatcaaagttttttcaggatatgtattatgtcttactgtccaaatattatgctatggtgttccttatagccatgaacatgtcacctatctgtatgatttagctccctcatttttgagagtcaggcaagacaacctgctattagaggagaaaatgatggtgtttgtatctaggttttattaaaaatcattccctaactatggcttatagttatttaaattgttttcagag

SEQ ID NO: 882795 - DNA, 610 bp, Homo sapiens
acttaatatggtttggctgtgtcctcacccaaatctcatcttgaattatagctcccataatccccatgtgtcatggtagggagccagtgggagttaattgaatcttgggggtgagttttttcctgtgctgctcttgtgacagtggctaagtctcatgagatctgatggttttataaaggggagttcccctgcacatgctctcttgcctgctgccatgtaagatgtgcctttactccttctttgccttccaccatgattgtgaggtctccccccaaccccccatgtagaacagtgagtccattaaacctctatttctttataaattacccagtctcaggtatttcttyatagcagtatgaaaatggactaatacactcagccaatgtcatatctcattctaggaagagcccacatccagtgactgataaaggctggagtataaaagtatgtggggtcatctcagctccagagctacttatggtgtgatctaatccaatcactggggttgcatagaaattcaacatctccctttccctaatcctgtttcctttccctcctttctacaggtgttaattccaagagcacgtcccaataaatgcccacatgccaa

SEQ ID NO: 882796 - DNA, 610 bp, Homo sapiens
acttaatatggtttggctgtgtcctcacccaaatctcatcttgaattatagctcccataatccccatgtgtcatggtagggagccagtgggagttaattgaatcttgggggtgagttttttcctgtgctgctcttgtgacagtggctaagtctcatgagatctgatggttttataaaggggagttcccctgcacatgctctcttgcctgctgccatgtaagatgtgcctttactccttctttgccttccaccatgattgtgaggtctccccccaaccccccatgtagaacagtgagtccattaaacctctatttctttataaattacccagtctcaggtatttcttcatagcagtatgaaaatggactaatacactcagccaatgtcatatctcattctargaagagcccacatccagtgactgataaaggctggagtataaaagtatgtggggtcatctcagctccagagctacttatggtgtgatctaatccaatcactggggttgcatagaaattcaacatctccctttccctaatcctgtttcctttccctcctttctacaggtgttaattccaagagcacgtcccaataaatgcccacatgccaa

SEQ ID NO: 882797 - DNA, 634 bp, Homo sapiens
ctctgtatacaacattttctcttctcatattgctttatggcccaccctaacccagtgtgatctcattttaacttgattacatctgcaaaggccctatttccaaataaggtcacagtcacaggttattggtggaaatacatttttttkgggggacactatttaccacaatacaattctctctctatttcaccaggcaaaccagaataacacattgcatttagtagctatgtcttctcactctcctgtggtctactacggtttcttagtccttccttgctcttcatgaccttggcagtcttaaggtgtactggtcaggtatcctgtagatgtctgggtttgtctaacatgccagctctcaggtctcagttactaagctatagagatgaagcattcctgagaagcacctgttggcttattcatttgctttttcacttgtgggcttgcttagcactgaacacataggtggaggctcaataaatacctgataaattgattgatgcagagcttgttgtcttcctgccacatctcaaccccctttccccaaacatggaagtgacgtcttccttcttgcatgtataagacaaagctgttcactttgttagttacaataatggatcaagtgctactgtgaaca

SEQ ID NO: 882798 - DNA, 663 bp, Homo sapiens
ctgcggatgggaaactgatgctaagatcagcaataagtaatcagtctgcttctgatccagaaacctttgttaactgtcaggataaaataaataaatagagacatgaagaacatgtcaaggctttattacattccaggtactgtgctaagagctttgtgtacaatatcaagtttaatcttcacagtgtgagcatatgaggtaagtattaagaytgatttatagatgatgaggctggcggtcagaactgctaagtgaccagtcaacccaggttcacactgctcataatcagtcgggatgcacttctaacccaagtcggaaggattcatactcattctcttaggatgtagcttcttacaaggagtgattctatctgttttgttcattgatgtatccccaatgccaagaagaaggttttgtgttcagtaagtgctcaaaaaacatgtgttgactgattattttattattctgaggaataagaaacgtgggtaacattcttgggaactaaattccagttagcaagtcactaaaattgccattatataggttatgtttaattcaaccatgtagtcttctaaaatttttaaagaacacatcagggaaatacttagaaccttaaaataagtcatagatagcacttagatttggtatatatggcttgtattt

SEQ ID NO: 882799 - DNA, 612 bp, Homo sapiens
gaattggaaaaaaactactttaaagttcatatggaaccaaaaaagagcccgcattgccaagacaatcctaagccaaaagaacaaagctggagtcatcacgctacctgatttcaaactatactacaaggctacagtaaacaaaacagcatggtactggtaccaaaacagagatatagaccaatggaacagaacagggccctcagaaataataccacacatctacaaccatctgatctttgacaaacctgacaaaaacaagaaatggggaaaggattycctatttaataaatggtgctgcgaaaactggctagctcctgagtttttttaaagtaaaggtttccattgaaaggtcaacttcctggagctgaaagtgggccaacatttggatttgaacgtggagactttatcactcaaaactctgaaaagaggggtaatggtagaaggtgggtcacagtcatgatatatagttgaatctggaaactgagctatcctggcattatagttatgactttattaaaatagaagccttctaaaactctgaatgacgaagtatttgggatggtttccaagcactggtatggggtgcaaaatgaatccaagaaagttcacatt

SEQ ID NO: 882800 - DNA, 631 bp, Homo sapiens
cagtatttgcttgcctagaaaggatcttgttcctcctttgcttatgaagcttaatttggccagatgtgaattcttggttggaatttcttttatttaagaatgttcagtgctggccctcaatctcttctgccttgtgggttttctgctgagcartccactgttagtctgatgggcttccgtttgtaggtgacttgacctttctctctagctcccttcaacatactgttttctcattttgaccttggagaatctgatgactatgtgtcttgggcataatcttctttgaagtatcttactggagttctctccatttcctgaatttgaatgttggcctgtctagctaggttggggacgttctcatggataatatcctgcagtatgttttccaggttgctcacactctctccatctctttcagagacaccaatgaatcatatatttgatctctttacataattccacatttcttgtagattttgtttgtcccttttcattcttttttctctattctcttgtctgactgtcttatttcagaaagcctgaaattctttcctgagcttggtctattctgatattaacacttgtgattatattatgaaattcttgcagtgtgtttttcagctctatcagg

SEQ ID NO: 882801 - DNA, 631 bp, Homo sapiens
cagtatttgcttgcctagaaaggatcttgttcctcctttgcttatgaagcttaatttggccagatgtgaattcttggttggaatttcttttatttaagaatgttcagtgctggccctcaatctcttctgccttgtgggttttctgctgagcagtccactgttagtctgatgggcttccgtttgtaggtgacttgacctttctctctagctcccttcaacatactgttttctcattttgaccttggagaatctgatgactatgtgtcttgggcataatcttctttgaagtatcttactggagttctctccatttcctgaatttgaatgttggcctgtctagctaggttggggacgttctcatggataatatcctgcagtatgttttccargttgctcacactctctccatctctttcagagacaccaatgaatcatatatttgatctctttacataattccacatttcttgtagattttgtttgtcccttttcattcttttttctctattctcttgtctgactgtcttatttcagaaagcctgaaattctttcctgagcttggtctattctgatattaacacttgtgattatattatgaaattcttgcagtgtgtttttcagctctatcagg

SEQ ID NO: 882802 - DNA, 635 bp, Homo sapiens
agccatggagtttaccttcacctccaaagctgagtacagctcagctttgttgaaccttttaacatccgtcctcaactttaaggaaggggatatgacatgggtaagaatgatcacaccagagaacttcagcagtacaacttctggctcataactgattttttgtttttgtaaatttgacacttaagtaaacatgatttcaaaccataattcaaacataccttgatcctctaggtagtaccaggtggtactaattctactgaaactattccaaaaaaatctaggaggagggactcctccctaactcattctatcaagccagcttcaccctgaaacaaaaacctcacaggacacaacaaaaaaggaaaaccacaggccaatatctatgatgaaaatagatgtaaaaatcctagcaaactgaatccagtagcacatcagaaagttaatttaccatgatcaagtaggcttcactcctgggatgcaraattggttcaacatatgcaaatcagtaaattcgtcacataaacagaactgaaaacaaaaatcacgtgatcatctcaataggcatagaaaaggctcttaataaaatccaacatcctttcataataaaccatcaacaaactaggcatcaaaggaac

SEQ ID NO: 882803 - DNA, 607 bp, Homo sapiens
ttacacagagcttccctctttctctgtactatccttcactctttctctaccccgatctcagcgactttatggagacagaagattagaggtggggttgagtctgtttctaaggtggaatcaaaggttatatccacctactggaataagtttgggaattttgaaaaggggaaggattcaaacttttatggctttttggatatgggcacttagggaactagcctatgcagacccgtgaaagaaaatgggtctagattcagctcatgaggttggggaagtgttcactgtgcgaaaagaaggttaacatgaccttaagggtctattcaatgttctgttgttgatgcttccacatatgaatgtacggtagacaytgatgtgttatatgattgtacttctttgtcccatattgccagaggcaatgtttttgactgagaagagccacatgtagagaacccctagtgggacatagaaatagctccgtaccttatgtttctttcctctcctaggtgttctatcggacatagtatagcatcttagggaaaggaagatcatagcctgttgaaggacttaaaggtagaaagaatagtaagagatgcattagcccaataca

SEQ ID NO: 882804 - DNA, 652 bp, Homo sapiens
gctcaaaaaatcataagggacatcctctcagccctaagttctattcaccctgatactcaatacatttgaaagtaaaacctcactttcgaagtaacgctgatactgaagcaaggagatgttgaatgactcacccatttcatagcttttccgtggcaaagcctcactaaaacctatctaatccctagctccaattctttaatctccatggtgcttctgattaatagttaaaccacccggaagtatgttaaggatactaacattttcaccccraagtattatccttcgccatcctctagaatatgctatgcaaagaggcctaaaacaaaataaactgcgacttcagcagctgagaagtaatgattcctttcccctcccacacatcaaaacttcctatcctatcccctcactactttttttcctttttaaaagtaacaatggtcattgagaactactaaatcctgcaacactcacaaggtagtatgtacaaccacagttttcccccgcgatacttcactgaagtattcaatacagccaatgacttaaactacagaaggtaattacaacttgctacttatcctcactggacaaattcacgcagcatatcttttcaaatacgtcttttttacacctatatgcatatgaattgctgctc

SEQ ID NO: 882805 - DNA, 620 bp, Homo sapiens
aagcacatgaaaagatactccataggattagccattagggaagtgcaaatcaaaatcacagtgtgatgctacttcacactcaaggcaaatgactataatagaaaaaaaaagatgaaaacaagtgttggtgagcatgtagagtcattggaacactcaattgttattccttattgatgcatagcaaatcgcttcaaaatttagtggcttaaaacaagaaacacttattatctcatagtttctgggggcaaagaatgcaggaacagcctagctggatggttctgacacaaggtctctcatgtggctgcagtcagggtgttggcagggcctgtggtcatgcgaggcttgcctaggtctggaggatcgaattgcaagaaggcaccctcacatggttgttgacaggaggcctcagatycctgccacatgggcctctcctcaggctgcttgagtatcctcatgatgtggcagctaacttccactagagcaagccgtccaagaaagggcgagagcgaagccacagtgtcctttctgacccggtctcctaattcacacatggttacttccattttattctattaattagaagtgagtccctaagttcattccacactcaaaatggaaag

SEQ ID NO: 882806 - DNA, 515 bp, Homo sapiens
aagggcgagagcgaagccacagtgtcctttctgacccggtctcctaattcacacatggttacttccattttattctattaattagaagtgagtccctaagttcattccacactcaaaatggaaagtcatcttgaagggaggagtagcaaataatttgtgaacagattttaaaaccaccacagcacgcaattcacatttttgcctgtggtctgcctctttggtttcctaaaccaacttgcatgtccttgtttccatacactgaacaggctcactgcctccctcragggaacaagacttaagcgtcttctggttactgcatcaaatctattgcttaagaattctgggtgatatgcagcactcccaggatgccccgatgaggccccttgaaggctggtaaacgggcgtgctttcagccacagcacatttacattttcaaccatgaagaaggaacaagatcattgcaataaatctgtccatttggaaaaggaagaatgaggaacacacattggtcaccg

SEQ ID NO: 882807 - DNA, 597 bp, Homo sapiens
caattgttccattttgacttatttcattcctagaaaatttgtcctatgctttgttatttataatcacattaatgatttatttcagaatatactgtaatataaaaaatgatgcatgctaaataaaatctggcaggtttttttttttccccaccattaggaaggaaatggaggtgtaaatacatttaaaattcaccatggggtgatggaatgcacgacttttgggcaaccttaaaactgtcctttcaattttaaatccacacaccaacagaggggataattttaagtctctctttgttgagagcttcaggggagagtgtgtaragtggattttttctgattcaaaatgaagagatacatgaaaactaccaaagtcaaggcacttcatagagaaaagtatgatgctttcattgctgaagagacccaactaaagtctaatgcagaggatgagaaagaaagagggcttgtcatattcttcagccagcacaaccttcccttcatgtttacatcaacagcagtggtgcctcccggtctgatgtttacataaagctgagagtcaactggataccctggctccatgctggcccaaggcagagctga

SEQ ID NO: 882808 - DNA, 597 bp, Homo sapiens
caattgttccattttgacttatttcattcctagaaaatttgtcctatgctttgttatttataatcacattaatgatttatttcagaatatactgtaatataaaaaatgatgcatgctaaataaaatctggcaggtttttttttttccccaccattaggaaggaaatggaggtgtaaatacatttaaaattcaccatggggtgatggaatgcacgacttttgggcaaccttaaaactgtcctttcaattttaaatccacacaccaacagaggggataattttaagtctctctttgttgagagcttcaggggagagtgtgtagagtggattttttcygattcaaaatgaagagatacatgaaaactaccaaagtcaaggcacttcatagagaaaagtatgatgctttcattgctgaagagacccaactaaagtctaatgcagaggatgagaaagaaagagggcttgtcatattcttcagccagcacaaccttcccttcatgtttacatcaacagcagtggtgcctcccggtctgatgtttacataaagctgagagtcaactggataccctggctccatgctggcccaaggcagagctga

SEQ ID NO: 882809 - DNA, 640 bp, Homo sapiens
tcttgaaagcttggcttggatttagtaagagagttctctctctctggttttctgcctgccaggagtacaggttgccaagtctgtgctaagagatggccaaacatcagattgggatcccaagaatttgtagttagctggataaaaatctgggtagcccgggcattccatttgttgctggcattctatccaccattgctaattttcagcagtttcatcacagaaagacagagacttagaagtggtgtttatagaagtggcttgagaaaygaccttagattccaggggctgtatgttctgcaccctttctgggaatgcctcttgtgtccccactgttaagccacagaaagtcttactacttctgagtcgcattttggaacaggtatacctttggagatcctaaatcatgaatggccagatgacagatcctttgatctgaaaaagcttttatatttaaaaggatttttagagagcttcccccctaaacaaatgacctgtttgtacctatggaaaaatcaaattaaaagaagaagaagagtatcatggctagcctaaaaggatcccttggcaaaattaaatagcagaaatcacatttacaacaaaaattgaaatccacacagaccataaacccttccactgacag

SEQ ID NO: 882810 - DNA, 600 bp, Homo sapiens
tgtgacctcttatttgttcaagagctgagaggcagacagctttctctcttccccttgtataagggcactaatcccatcatgagcttattgtcacctttatgaccttctctaaatctaataacttccccaaagtcccatctccaaataccatcacattgcaggccagagcttcaatatataaattggagaggactcaattcaatccatagcaaatctactcaaaaacttagatattacaaattgaaatcctcccaaaatggcaaactcactcacaggaaggcaagaaaagggagacacagggatgagaaacagatggactagaaaacaaacaaacaaacaaacaaacagtatggcagacttaagccctatcatattacctatartgtaaataatttaaatatacaatatagtaacagaggttggcagaatgaataaaatatatgattcaactagatgctatctacaagaaactcagttcaaaaacaacatatgtaggttgaaagtaaaagaatagaaagagatgcaccatgcaggtgtaaattttcaagagctcagaaggaactctttgatcccttacacactcatgatgctcagatactt

SEQ ID NO: 882811 - DNA, 639 bp, Homo sapiens
gtgacagaagcctatgagtgaaatgtcttttccatattttttagctatcactctgtcaatacacgcacttgaaactggatgcacttgagaattaaaagatgttagatctataaagcattagaacagtgtctactaggtactactcaataaatactgtctactttgctgaagtaataagtatattaataacaaaatttttaaatattgaattaaatttttttattgtatatacagaagctccttcaatgctatcttttattttcaccatggcttcacattagcctatcacaaaattctactccttacctacgatctcagtgagaggttcttgcattaggatgtactaagaacaccaaagaatctaaagaactcacggttatggcaatttctacaatgaagataaacagggattatgcagtttggttgacattcaggtctccagtrtgtgctctttggcctttcgtggtcacactatgtgctgctctgcttctatttatatcatcttcatcaaataacaggcctagtaggagaattgtaggcagggggtgaaggaaaaaacaaaatgtatgaaaccttcaaccaaacacagtgactttatgttaccagtactggtgggagatttgttataggactaaaaaa

SEQ ID NO: 882812 - DNA, 592 bp, Homo sapiens
gtgatttttagaagtacatgtaggagagttacatataacagcaaattaacacatttctatttaaaattcttttaacatctggacactacagcaatgtcaaggtaaaacttcaatatatttcagtatctttaacagtgctgtaatataatggagtatgagtagtttcaatgctactaataggaatttaatataatagccatgattggtgaagaaaagagacctaagaaatgacatttcagtatttcttctgggaccactagagtattgactcacagttctgcccatttgctgccagtgtggaatttgtgaattcaatatcagctttataaatgctttcaacagagagactagtagagatgggtgtgtgtgtgtgtgtgtgtgtgtgtgtgtgtgtgwgatataacctctttgtacgtgctctacattaaagcaagagaacagtataaggagagctactctctctgactcccatgttgctgccttctggctgagttggacggctggtggcaatgaagagcatctggatgtgcttcagtgacttctggaatattcagcctcagtcctctcagtgtcacagttccaagaatgaagc

SEQ ID NO: 882813 - DNA, 566 bp, Homo sapiens
tgaaataaaaaaaaattctagctataggcagaaccaaaagaaaatgggtaattgtttacaacgttctgaatgagctaagaacatcacatgagccaaattgatgtcatttaagcatgaagtcaacattttcagtattctaagaatagcagctagcacccactgaatagttgctctgggttaagtccttttctttggcctttacaggtattattgcactcaatcmtcataataatctcacgagagaaggtacagttgttatgaacaggtaactcaatagacctctctgtgtcacctagcatttctctgcttaaacactgggaattggggcctgtggtcaagcagagcctaaatttgcagaaatggaaaaatacagaacttgcaaacaggttgtgatggttaatactgagggtcaacttgattgtattgaaagatacaaagtattgatcctgagtgtgtctgtgaaggtgttgccaaaagagattagcatttgagtcagtgggctggggaaggcagatccacccttaatctagtgggcacaatctaatcagctgccaatggtaaagcag

SEQ ID NO: 882814 - DNA, 624 bp, Homo sapiens
tataaatagtgcataatgtgcaaactaggcttttaaaattagaattagtctaatgatggtttaacttcctcatctgtgaaattggcataatgataatatctctcctgtaagtttgccatagcaataaaatgagatgacacataaaaagcttttctggtgttgtgccatrgtaaatactgagtaaacattagttgtattataattatttctagacatttagcagtttaagaatatgtagattgaaataaagggatcggagtgtaaaccttttttgagattaaaacataaggagaaaaaacacattcctaaaagtaaacttttacagtagtcgtagttttttcatcctttgtagttagtactacccctttgggcagtatataatgtgttgtattacatgtttcaagagtaccttatagcgtccattggtggtatttcattagcaaaggtatagttttacaaaaagaaactaacttgagagaacatgagaggcaaggtcataaagaagagcagggtcccccataaatcaattaagggtgatagctgggcaaacgggaaccagaggagagagagagtgatggtctctgcagtgcaggctaacacacttccaagaactgagtaatccac

SEQ ID NO: 882815 - DNA, 647 bp, Homo sapiens
aatgtcatttagcgggataacagtaaattattaagaaatggggctgaacacacccattagtaaccacaattggaaacttgtggaaaggaagaacaaataacctatgccagaaggaaaaggtggcttacccatgtagtaaattagttttttaggttgcctactactgagtgtcttagaaatttgtmacagtaatttcacatactttctgtatcaccaggagtgagtagatcaatgaactaatctatttgtttaaaaaccaaccaattaatctattatatttataatttaccatataaatatatcacaactattataaggattagagtaagataataaaaaatcaatttaatacaacccacaacccaggttaggtgactgaattttccaagggaaacatcaagcttggtaaaaattggcatgagtagtttagagcaagcattgtgggatcatagagcctgggtttgaagtgttttttttttttttgtttatttccttgtctgatatgcctactccatttcccatgtgttactataaaataggatagcttgcaatttttagattgctaatttatcttttatggctaaactgtctcttactgggttttcttgaatttagttttttgtaatcataaatattttatttttaca

SEQ ID NO: 882816 - DNA, 647 bp, Homo sapiens
aatgtcatttagcgggataacagtaaattattaagaaatggggctgaacacacccattagtaaccacaattggaaacttgtggaaaggaagaacaaataacctatgccagaaggaaaaggtggcttacccatgtagtaaattagttttttaggttgcctactactgagtgtcttagaaatttgtcacagtaatttcacatactttctgtatcaccaggagtgagtagatcaatgaactaatctatttgtttaaaaaccaaccaattaakctattatatttataatttaccatataaatatatcacaactattataaggattagagtaagataataaaaaatcaatttaatacaacccacaacccaggttaggtgactgaattttccaagggaaacatcaagcttggtaaaaattggcatgagtagtttagagcaagcattgtgggatcatagagcctgggtttgaagtgttttttttttttttgtttatttccttgtctgatatgcctactccatttcccatgtgttactataaaataggatagcttgcaatttttagattgctaatttatcttttatggctaaactgtctcttactgggttttcttgaatttagttttttgtaatcataaatattttatttttaca

SEQ ID NO: 882817 - DNA, 647 bp, Homo sapiens
aatgtcatttagcgggataacagtaaattattaagaaatggggctgaacacacccattagtaaccacaattggaaacttgtggaaaggaagaacaaataacctatgccagaaggaaaaggtggcttacccatgtagtaaattagttttttaggttgcctactactgagtgtcttagaaatttgtcacagtaatttcacatactttctgtatcaccaggagtgagtagatcaatgaactaatctatttgtttaaaaaccaaccaattaatctattatatttataatttaccatataaatatatcacaactattataaggattagagtaagataataaaaaatcaatttaatacaacccacaacccaggttaggtgactgaatyttccaagggaaacatcaagcttggtaaaaattggcatgagtagtttagagcaagcattgtgggatcatagagcctgggtttgaagtgttttttttttttttgtttatttccttgtctgatatgcctactccatttcccatgtgttactataaaataggatagcttgcaatttttagattgctaatttatcttttatggctaaactgtctcttactgggttttcttgaatttagttttttgtaatcataaatattttatttttaca

SEQ ID NO: 882818 - DNA, 558 bp, Homo sapiens
atttctagaaattctttattttaaaaagtctgccttgtcattttttgtagttttgttttgatctttctctgatttccttacacatgttaacataggtactctatgttctttatctgataattccaatacctggagcctttatgggtctggtttggtgtttcagctgattttcactgaaggtgatayatttattggattacttctgatatttatttatttatttatttatttatttatttatttagacagagtcttgctctgtcacccaggctggagtgcaatggcacaatctaggctcactgcaacctccacctcccaggttcaagcgattctcctgcctcagcctcctgagtagctgggattacaggcatgcaccaccatgctcagctaagttttgtgtttttagtagagatgggatttcaccatgttggacaggctggtcttgaactcctgacctcaggtgatccacctgccttagcctccccaagtgctggcagttctgatttttaagaaagttgtgagcatatactggcaatcacctctaagtcctgtgaggct

SEQ ID NO: 882819 - DNA, 670 bp, Homo sapiens
tcaccagattcagacaaggtagtaaccagtgcacagtgaaactgcttgacaaaagggccttcatttttggtattaagggacaagatactgaccctttactgtttttccaaagttaaaaaaaataagattcgtgggtaccagaacaaaggccattattcacgttggcaatgggggtgtgggtaaattcatcattattaaacccttatttgcttaaatatggatcctgatcaaggccatactaggaactggggatataagaggcacaacccatgatttcccaggattttttagtactttactttctagttgggaagggaaacacctatacagaaagctgtgaatcacaacaggaacaggatatgcacacagcagaaagggcaggggagacaataagtgttttagctatccaggttggggaggataattgtcgactattgggttggagggagtttcatggaggaggctgwgtgtgtagtgaatttcagtgatattttcttttcattaattttgcaggcaacagggcaggcactttcactgtgcatactaaagctgttgctttgtcttcttcgtcgtctttttttttttaagtgcattaaacttttctcattttagccaagctagttgaacttggtaaaaatggctgagatggtgcaccagaagccagggaata

SEQ ID NO: 882820 - DNA, 628 bp, Homo sapiens
agatgaatatgtttaactttggcacacaattaacacaatgacagcaaaacaatttaatcatgtcatatgtgaccattacctaaagtgtctgtctttatataatcagtagaaaaattgcagccatctatttttaatattgctaatatcgacatttgaatggaattcaatgaatatctagaaataaaatggatactgagcaataattaagcacttgtatgtttgcaattgtaagcttcgatactattttcaaaacaaatggggccggggtataatgttctgggagtttctgttggacttgacttttcctgggtcaaatctcaagagctgtttacttgaggagggggtggcggggcatggagctgagaatgtgaaggaaggggcagccccccagggagaattccaatcagtgatccagtcataggtttggaggggatactgcacctggccatgtgccaacaacatggaaactggggcatcttaggggaragaagactccaagaagtcctgatagtaattcactgaacttgagcacaccaggtacaatgttttatgtggtcccttgggaaattaaaacaggcctactctatgggacttctgatatacctagaacagcagggttaaattaata

SEQ ID NO: 882821 - DNA, 545 bp, Homo sapiens
tttttcaggatgtgatcagataactgatttagccctaatgatagttaatggcagtggctggaatttaatggggttgataatttcatgtaattggggggtcttcaaatgagggaatgctcctgagtggcactgcattagggctgctgtstgagtcaaacaggtgcttcctgtctgtgtttcccttctgcagctctgttaaggaggagattcgagaacttctaggaatattgcagagcttttgggtgtgtttccacttcactgtatggctctctttctgcgaggatgcaccaaaccaggtgatgtttcttagagggcgtgccaacctggtttagtttcagacaatgttttagtttaaatttatttttttcttttaaatttaataacccttaaccaatctaggtgactatttcaatggatctagcatagaacttggcaggtgataagtgtagaatgaactaattttaattgtaactgccatgtctacattagaacgttgtgatccaaggtgccgcttttgtaattatcatgatgatattaagctataa

SEQ ID NO: 882822 - DNA, 545 bp, Homo sapiens
attgacaaccacccattagtttacaagtgggaattttttcccaccctgtaacacccatcatttatgaagctaaatattagttaagggcctctgaaatttccaataaaactgctagaaagattcttttgatctctargcagctctgaggacagatacaacttcattcctcctggaaaatgctttgttctttggctccacttaaggaggcagtggaaaagcatataatacatcaggctttctttctttgtagaacaaagttaatccaggtccttatcataggaaactgcacagggatataatcttttagaagacataaataattctccataatacttttggaaatactttgatctttctgtatacttctccattgcaaaagggtactgcaaaccttattttccttgtttagagatttgttaaatgaagttagtcatattagacctttgaagttgtgttttaaatagaagctaccaaaaggatgaagataattttactatgtcctgaaaaattctgaaagacgtgccaggcagctgcctcctgtggtt

SEQ ID NO: 882823 - DNA, 570 bp, Homo sapiens
gataaacctctgttaaagaccaaagtgaaagtgttcattctgccctattccttcttcctctctagccagccatcaaatgcctggcagtctccacctcagaggagctgagacttgagacttggaggtgggcccaacytaagtgaaaactccagcattcttgggtttgtttgttcattggacctcagaacaataattgatatataggacatactttttgtaaggcagattttagaaacatttaagttaaaatacttcaaagcaaaagagatttttctgctaagaatcaggctttagttattcaaacattatctaatctatagtaactttttctccaaaaattccagacatagaaaatgtcgttcttaatatgtcaattcccagtttgatttgtcatttttgaaataattagcacaatatttttacttttatgattatttgataatttacattttgggggctatcttccctatctttaactaattctggaacaatcaaagcaaaataaaatggcatacttaataagttagttatttttcttcttccaaacatgtttaagctcatgttggaaag

SEQ ID NO: 882824 - DNA, 766 bp, Homo sapiens
cagtcttggcaataaagagaactcctagttctgcctcttggatgctgtgttagaatggaagagttagctttttaatatctccattttctcatctgtaaaataaaaaagttgggttatataatcttcatgcttcttttcaactttaactatatgagcttccaatttcttttagttcagagctattcttcatgtactttgtgggctagatagatatttcgagttggcctaggacttaaaccattctgtagatgacagtttccactggaaaaggcattccaaagaattgacttacaaactgtggaagacagctctgccaagctgggtagtagttttaaatagatgggcttaacctaggatatataatagaaagggctcaccaatgcatagttcaaatcctttagaaatgagctttgaagagaggggcaagtggcataatatcagatttcaaagttaaktctctgttttgggggctcctggattgatcattataaccgaaatctttctttgtttatgaatgtttataaatgctagcttttggcagttgaggagactttgaagcagcaaactgcacaaggaagaaggacaagtttgaagccagatagggttcagtaggggtaaagcagagaaaaagagtaaatcgttggatgcaggatgattagtaagaccagcaagtgatatgagtaccgaattggataagggactcagagactcaggaaaagggagaactggaggcccggtaaggctgagatgggccagaacaggaaga

SEQ ID NO: 882825 - DNA, 610 bp, Homo sapiens
ctctgtaatccccatgtgtcgagggaaggaggtgattggatcatggaggtggtttcctccatgctgttctcatgatagtaagtgaggtctcatgagacctgatggttttatgtgtttgacagttcctccttcacaggatctctctcctgccaccttgtgaagcaggtgcacacttccacttccgccatgattgtaaatttcctgaggcttcctcagccatggaactgtaagtcaattaaacctctttcctttataaattacccagtcttggacatttctttatagtggtgtgaaaacggactagtacattctttttcctcaaagaccaagtccctatatgtattggtctctgcctacattttcttttttttttttttttttgaccaatttaactctgctctctgtgctctaacctcactgacttytgttaaatttttcaggtgaattatgctactatgctacctattgccacaggacaactatctgggatttatttttattcattcaacaaatataacttgagagttcccctttcccctagttaatttcaactcaaacttaaaaccaaagctcagacattcttggaatcctcagtgaaagctggatttct

SEQ ID NO: 882826 - DNA, 590 bp, Homo sapiens
tagaatgtagcacaatatctggtaaatgtgtaagtgctcattactgttgatagtagcaaagacatggaatcaagctacatgcccatccgtggtagactggatatagaaaatgtggtacatatacaccatggaatactatgcagccataaaaagaatgagaacatgttctttgcagcaacatatatggagctagagggcattatccttagtgaactaacacaggaacagaaaaccgaataccacatattctcacttacgggcacctagacattgagtacatatgggcacaaagaagggarcaacagacaccaggggtcaacttgagggtggaacgagagaagagggtgaggaccgacaaactccctgttgagtactatgctgattacctgggtggcaaaatattctatacaccaaacccccatgacacacaattcacctacatgacaaacctgcacgtgtagctgtgatcctaaaagttaaaaaatagtgtaagtgctcattaaatggttagctcatgttctctttccttcttaaagtagtaggtttttcattgattgattgcttcatttgttcagaaaatatttgaatac

SEQ ID NO: 882827 - DNA, 590 bp, Homo sapiens
tagaatgtagcacaatatctggtaaatgtgtaagtgctcattactgttgatagtagcaaagacatggaatcaagctacatgcccatccgtggtagactggatatagaaaatgtggtacatatacaccatggaatactatgcagccataaaaagaatgagaacatgttctttgcagcaacatatatggagctagagggcattatccttagtgaactaacacaggaacagaaaaccgaataccacatattctcacttacgggcacctagacattgagtacatatgggcacaaagaagggagcracagacaccaggggtcaacttgagggtggaacgagagaagagggtgaggaccgacaaactccctgttgagtactatgctgattacctgggtggcaaaatattctatacaccaaacccccatgacacacaattcacctacatgacaaacctgcacgtgtagctgtgatcctaaaagttaaaaaatagtgtaagtgctcattaaatggttagctcatgttctctttccttcttaaagtagtaggtttttcattgattgattgcttcatttgttcagaaaatatttgaatac

SEQ ID NO: 882828 - DNA, 590 bp, Homo sapiens
tagaatgtagcacaatatctggtaaatgtgtaagtgctcattactgttgatagtagcaaagacatggaatcaagctacatgcccatccgtggtagactggatatagaaaatgtggtacatatacaccatggaatactatgcagccataaaaagaatgagaacatgttctttgcagcaacatatatggagctagagggcattatccttagtgaactaacacaggaacagaaaaccgaataccacatattctcacttacgggcacctagacattgagtacatatgggcacaaagaagggagcaacagacaccaggggtcaacttgagggtggaacgagagaagagggtgaggacygacaaactccctgttgagtactatgctgattacctgggtggcaaaatattctatacaccaaacccccatgacacacaattcacctacatgacaaacctgcacgtgtagctgtgatcctaaaagttaaaaaatagtgtaagtgctcattaaatggttagctcatgttctctttccttcttaaagtagtaggtttttcattgattgattgcttcatttgttcagaaaatatttgaatac

SEQ ID NO: 882829 - DNA, 617 bp, Homo sapiens
aaatggttagctcatgttctctttccttcttaaagtagtaggtttttcattgattgattgcttcatttgttcagaaaatatttgaataccaagacccatatctagttctggggctatggaggttttagttagacctacagctagaactacagaggaggtagatacagacaaatatattcaatactacttgctaaagactgcaatggagagaagatcagaaatttataggagcacagaggaggagcagctgcttggctgtgagggcaatgatgtcaaatttgccagttctgcctttaagcaagtcctttaggttctatggccctcaacttattatatgtaaaataaggctaataaggattttatcctcagtttttgtcacagttaaaggtggtaataaaaaggtatagacatatatacatatatttttatatggagggaaatgattggmtcatgggggaagttcccccatgctgttctcatgatagcgagttatcatgagatctaatgattttataaatggaagtttcccctgccctcttctcttttgcctgccgccatgtacgacgtgcttgcttccccttcaacttctgccatgactgtaagtttcctgaggcctt

SEQ ID NO: 882830 - DNA, 664 bp, Homo sapiens
cattcacagatacgggggattaggacttgtatctgacttttggggggtcattctttaaatcacaacacaagggtcttgtagtttttgaactattgaagcaatttctgctacatttttccgactgcttctttctgtcttctgattagagatactatgtggcaagctctcggcaaatccggaggttgacaggagggtcccgttctcctgtcatttctcactttagtgagactttatcaggagtgtccaccatcagagcatttggacatgaacagaggtttatccagcaatacaaagagatggtgaatgaagacttggtctgtttctacaataatgtaattttcaacctgtaagtcccgttratacctagcctaggatcaatctcttcttagacatcttgctcactgacttctaaacagacggttttgaaatggcatttcatccaagttttagaagtatgtattaataagacaaatattttccagtatttaatgtacatttaaattaaattatatctatttatattcacatgaaaggcacatactatttaatatgaaaaaggtgcttttagaattactcatgacataattctacattgtgttttatatctttagaatatattttatttgtatacactgttttgtaaaatttttgaatttgaagttat

SEQ ID NO: 882831 - DNA, 661 bp, Homo sapiens
tcaacctgtaagtcccgttaatacctagcctaggatcaatctcttcttagacatcttgctcactgacttctaaacagacggttttgaaatggcatttcatccaagttttagaagtatgtattaataagacaaatattttccagtatttaatgtacatttaaattaaattatatctatttatattcacatgaaaggcacatactatttaatatgaaaaaggtgcttttagaattactcatgacataattctacattgtgttttatatctttagaatatattttatttgtatacactgttttgtaaaatttttgaatttgaagttataatctcacataaaggagaaaaatgaattaaatagaagttgagcatgtttcaatttttaaagactaattttatcatattaaaaagtatacacaattggaaagggaattgattttccaataggatttaaaaaatgcaatacatcattatagctggtgttattttgcttctaaattcrgatcaagttttaaagcaaagttctgcaaaagtaaaatgcattttcatgcagatgaattctttaagttatcatgtgatgatcccatgtttgattgagttccaagtaagttggggagaaaaaagaaagcagctattgctgtttatgtctcaatttcccagagg

SEQ ID NO: 882832 - DNA, 605 bp, Homo sapiens
ccaaggtatttagtaaatacaataaaagtaaataaaaaagtaaattaaaatatgtatgcatgctaaacttgtacacaaatatttatagcagcttttttcataaccaccaaaacctgaaaatgaccctaatgccatttaagttgtgaatagaaaagcacattttgctaatctttatcatggaatgccagtcakcaaaaaaaagtttaattaaaataagccagacttaaaagatacatcctatataattttattcatatagacattttgcaaaaggcaaaactgtggttcagggaatagatcagtggccgctagggttaggagttgagtgaaaggttgactgtgaggaactaatttaagagaatttggtgggatgacatttgtttgtgaatatggttatacgcattaattgcacaccaaaaagagtaagttttactgtaaactaaaactaaattacaaaagatacacacagccaaacaaaacacacacatttatgcacacacaaaatcaatgtcactctattttgagcaagatgttaatagaaaagttacatagttaactttcttttggttcaaaagtagcctaaagccatgtactagctctgttac

SEQ ID NO: 882833 - DNA, 605 bp, Homo sapiens
ccaaggtatttagtaaatacaataaaagtaaataaaaaagtaaattaaaatatgtatgcatgctaaacttgtacacaaatatttatagcagcttttttcataaccaccaaaacctgaaaatgaccctaatgccatttaagttgtgaatagaaaagcacattttgctaatctttatcatggaatgccagtcatcaaaaaaaagtttaattaaaataagccagacttaaaagatacatcctatataattttattcatatagacattttgcaaaaggcaaaactgtggttcarggaatagatcagtggccgctagggttaggagttgagtgaaaggttgactgtgaggaactaatttaagagaatttggtgggatgacatttgtttgtgaatatggttatacgcattaattgcacaccaaaaagagtaagttttactgtaaactaaaactaaattacaaaagatacacacagccaaacaaaacacacacatttatgcacacacaaaatcaatgtcactctattttgagcaagatgttaatagaaaagttacatagttaactttcttttggttcaaaagtagcctaaagccatgtactagctctgttac

SEQ ID NO: 882834 - DNA, 628 bp, Homo sapiens
gtgtctctgagctttctcttctctcttcccaggataatcttttctaggatgttttacagcctcatttccaccattcaaattgataaatggatctctgtttcaaacattaccttctttgaaaaacttgtgtgaccagtctcccttcccacattacttcctttccccttacagcattttagttttctttataacacttataatacctaaaatcatactatataygataaatgatttatcattcttactattgtattgtttatttgatttgttactctccctatcccgtaaccccaccccaaatgcaaatgctttgaccagagatttttgtcttatttgttgctataaccctggtgtctagcatactattgggaacatagtaggtactcaataaatacttttaaaagatgtttttggaatgaatacatacattattgaaccaacaagacaaagctcaaatgttttgcaaggcatataatcttcaactcccagcttcgctgtaatctcttagtcctaactcacaaaacttctacacacatgccttacgtttcagtctaattgactacttctcattctcttttgtgaaagtattcccagctctcctggactaaagtctctccttatgttcttg

SEQ ID NO: 882835 - DNA, 652 bp, Homo sapiens
gttcaacagcttacattgtttctcatgaggtgaatgctgtaattaattctgaactttttcctcctttactttggctactttaagattttccccttatctctggttttcagcaggtagattatgatatgcaatggaggcccatgtgtggactttggtagatgtaacattctgcagtagattttgtgtgcttttgaatgaatcaatcaaaacagcagtagtcatcagcagcagtttattacaatagcatgcctgaaaactgttagcctctcctgtctgtttttcctccatccttacggagacttttgtaagcatcacattttctatattaaatctttactttctgaagtatctaaagtgctttttaattatgccatgctattttaatctgtgacttttccatctctgactttaagaaaatatgtttttccrtcttcactttcttcttttacatgcatgtcaaattcttagccctactcaactatctttgttgattaactctactgacaaaaataatgtgtactttcctctccttgatattaatgtgctcttacctagacagtttatcataacattttttataatatttaacttatatgtttaaatggtttttttttctattctactcattactgatatctttaaaggcaaatgt

SEQ ID NO: 882836 - DNA, 606 bp, Homo sapiens
atatcaggcaattgcctagttaaacagatgggccttgcagcccaccctaaaagccagcaaacatgggctttatttaattaaaaagggaaacaaatttctgaggtgtagacacacacacagagagacatacacacacaatctctgaccggggtcaatcccagaataaaaatattgattcttgctttctcattaggttttatgaatgtccaaccatatactatccactggattgaaagaactaaatgagatcattcagtgctgtatactcagaccaaatctctatgggaaatagctgaactcatttcctttctytcaagtaagagagaacatttacatctgaattaacccagattcaactcttctccatctgacattgaagagtaggtgttttccaattttcttcctatttctaccccctgctccgttatcctctgctgctttgcactcttatcccacccactactccatacttacgcaataaactctcagttgtacataaccaaactcaacatctgattttgcctaaatttcagactaaaataatccactagaaactcaaatttaatatgaccaatatcatcattaagaaagaggagactataaaga

SEQ ID NO: 882837 - DNA, 600 bp, Homo sapiens
ttgaacaacatttcccatatgtgaaaagtcctttcctttttacttttatgtagcttttttctgagctcctaaaataattaaaaattattgaactcacaattattgaatatcttaagaattgagtgatgttaggctaggtgctgtagctcacgcctgtaatccctgcactttgggaggccgaggcaggcagatcacgaggttgggagatcaagaccatcctagctaacatggtgaaaccctgtctccgctaaaaacacaaaaaattagccaggcatggtggtgggtgcctrtagttccagctacttgggaggctgaggcaggagaatgggatgaacccgggaggcggagcttgcagtgagcccagatcgcaccactgtactccagcctggacgacagagccagactccatctcaaaaaacaaaacaaaacaaaacaaaacaaaacaaaacaaaacaaaaaaagaattgagtgatgttgtaggccctaaagatatgaaattgagtacaatataatcccgtccttgctaaaataaaatggtataaaatattgatataaataagtccaactttaggggaatcttacttaattctgttttcggac

SEQ ID NO: 882838 - DNA, 600 bp, Homo sapiens
ttgaacaacatttcccatatgtgaaaagtcctttcctttttacttttatgtagcttttttctgagctcctaaaataattaaaaattattgaactcacaattattgaatatcttaagaattgagtgatgttaggctaggtgctgtagctcacgcctgtaatccctgcactttgggaggccgaggcaggcagatcacgaggttgggagatcaagaccatcctagctaacatggtgaaaccctgtctccgctaaaaacacaaaaaattagccaggcatggtggtgggtgcctgtagttccagctacttgggaggctgaggcaggagaatgggatgaacccgggaggcggagcttgcagtgagccsagatcgcaccactgtactccagcctggacgacagagccagactccatctcaaaaaacaaaacaaaacaaaacaaaacaaaacaaaacaaaacaaaaaaagaattgagtgatgttgtaggccctaaagatatgaaattgagtacaatataatcccgtccttgctaaaataaaatggtataaaatattgatataaataagtccaactttaggggaatcttacttaattctgttttcggac

SEQ ID NO: 882839 - DNA, 661 bp, Homo sapiens
aaatgttctatgtggctcactcatcctttcatttccttcccttccctttctttcttccttccttccttccttcctccctccctcccttccttctttccttccttcctttctctttctttttctttctctttcttcttttctctctctgtctctctttgtgtgtgtgtctctctctctcttctctctgtccctcccttcctctccctccttctccctctttctttctttcatacacatgggctgatgcatcatgtactaattgaaacttctgggtggccttcatctcagctacatatttttggcaatgtatcagaggagacatttgtcctcttctgaaatattgtcctcattatcattaagttttggtttataattccatgttgctctaaaaatagtgacttaaaagatcyttaaatccaaggcattaaaatataggagtattgaaaatgaggctgaaagcagataaattttagatgggaagggattatttgtagttttagaagccaggagtatgaattaagaaagttataacagtgaggtaggaataagcaaactctttagacattaacagtatttttttctctctctcttgtttaccattaaaatattgaatcgtcttagcataattccatctgttcaagttttgcagatgttaaactct

SEQ ID NO: 882840 - DNA, 647 bp, Homo sapiens
caacctaaaataatagtaataaccacaattagctaataacaagagggaagggaacacattgggtgcttactatgtgctaggcaatgctttaagcaacacagataacctcatctatttcctatcaccatccccattttataaatgggaaagtcaagcacagagaaataaagaaactttaccaaagtyagccagctagtaagaaagagacatttgctgataagtatgataattcttaaattggaaaaattccacacactcatatgataattcttaatccttcaattatctcatgccctcaaataggtgtttcatgccatctctatgcaagtcattgtattttgcacagctagaatgttgtctgttgtttttgtttacatggcttcatgtcttttaggacatggtacgtaggaaattgcatggtgaagtggtacaagcatcaggctcaagaatgagagtccagtttgacagaccagatgaagaagtgattaagaccatagttctggacttagacaagcctggctttgtgactttggacaaattatttgataactgtaagtgtatttatcactaaaaggcagataataatattatgtcatacagatgctcatccattgattcaacaaatattaattgagtgtcttccatgt

SEQ ID NO: 882841 - DNA, 631 bp, Homo sapiens
ctctcttctgaaaggtattcccccttggaacttgcattttaattactaattattttttctgctttatttctgtgtagtgatcaaagtgcttgactgagctttatttaaataggatgtatgcattgtttcaaactagttttgcataaaatgtgaatatgaataccacaactaggcgatttatttgaatctcgaatacattagcaactattaccttctgtctttcatgtagctgtcttacaataatattaagaagaatattacatgtgcctgaattactcatttttttcagctttgatttacatattattcacttaaaactagcaatgtaaaattgcctttaacgtttactgtttcaactttaaagttttttttaatcagcgaaagcraagttggtgaaatataattaaaatttctctaattatgttacctttaggcaatgctgtcttctagattgtaacattctctgttaccgtgctatgaaattatggagtgtacaatgttggagtgtatgcttctaaaatcaatgcattagagatttgtagaaatgctatataactcatgtattaaaagtatttctaacatctaaatgtattgctgttatatgtttaaactttcaaagagcaataatcct

SEQ ID NO: 882842 - DNA, 619 bp, Homo sapiens
tatgacagagcagtttgggagaaaactatgctctatttttaaccatctctttttttaaaccctaacaattacattttttgaaagtgtctccaggatagcagcttccaagaatggagtcatgttagtcaagaattagaacagttgacacaacctgtgtcagactctgtgctgagctcttttcaaggcaatctcatgtaattccttcaattaacctatgacattgctagtattatcccattttacctatgaggaatatgaggtacttaaagactgagaaacttgcctcagatcacgcagctgaaatgctataaactaagtttggaaagcaaaccatgggactttctaacttgtgcctgttatgtttacgctatgctctcataaatatttcttgtttggggataatcttttaggtggctttgaagatacagaacacaaaaaccagaatttgtctctactaatmcttgttggtgtctaacctaaaaaaataaccacataagtgtgccctcacagcaatatatcagtagaactcatttataatcctaaaaaaaaatcattcttaaaagaagagaataaaaatagggtaggcgccatgtaatgagtatttaccatgttagtaggt

SEQ ID NO: 882843 - DNA, 606 bp, Homo sapiens
cacatctctgcagaatttccccctcactggaatgtacgacagtcaggatgtttgcattgataaaagaaataaatggttattggatgagtccacacactgactagtcaagttgaaacaaataagcacttgagcacccaatgcctaaaaatcctttcccctaaagtctcatttcctctcatcatgtgactgtaatcactagggagaagtattcaaatattttgtttccagtatgatttctcaacaggagttcctccatgtttttgcaattaacaaaaagaccaacagagamccatattttcatgatcaacttcccactgtctgaaatgaccccaccctaacttcactgccattttggagtgctttactatcagttccaaaggggaaaatgaacgatttacacttcacaaattcacttataattgcaaattgcaacttatgagaatgttatagcaatttagcaacaaaccagactgaatacttctgcagaccacattgggtcgagaaatgaggcaagtttttgctctctagggagaatcttcaaaatccctggtccatgttatgtccataagataggcacggagtctcaagaggaacagcattgtgttc

SEQ ID NO: 882844 - DNA, 575 bp, Homo sapiens
tttttcacacgtacacataaaaagatattctgaaggatttaatttgaaaaattaaaatatacaaagaaaagagatggaaggtaaccagaaatgtatccgttgcttagactggtcccataagaaagagtattaggtgtccattgtagaggcgggaggcatcaatggcctagcttagagcaacaggacmaggtgaaaagtaatgtatgaaggaagggaaaagaggaactgagagagtcctaggattttcagcagagagggggtatagcattgggctaatgggaaggaaatcccaaggttttaactgtataagtaagaaattctctcagttgagtaatacttaagggtctcatggtagccactagcaattaagtgatacaaaataaacctttcctttatcttaaatgggaggatttgattcttcatatgtttttatgacttttgataagaaagattatgcttttatgtaagcatgtcagaaaggatttaaaatgtgcagcttttaatacaatgctcaactgaaagcttaagtttttataggtgaaatactggaaccctatctcaggcagttggaggca

SEQ ID NO: 882845 - DNA, 575 bp, Homo sapiens
tttttcacacgtacacataaaaagatattctgaaggatttaatttgaaaaattaaaatatacaaagaaaagagatggaaggtaaccagaaatgtatccgttgcttagactggtcccataagaaagagtattaggtgtccattgtagaggcgggaggcatcaatggcctagcttagagcaacaggaccaggtgaaaagtaakgtatgaaggaagggaaaagaggaactgagagagtcctaggattttcagcagagagggggtatagcattgggctaatgggaaggaaatcccaaggttttaactgtataagtaagaaattctctcagttgagtaatacttaagggtctcatggtagccactagcaattaagtgatacaaaataaacctttcctttatcttaaatgggaggatttgattcttcatatgtttttatgacttttgataagaaagattatgcttttatgtaagcatgtcagaaaggatttaaaatgtgcagcttttaatacaatgctcaactgaaagcttaagtttttataggtgaaatactggaaccctatctcaggcagttggaggca

SEQ ID NO: 882846 - DNA, 575 bp, Homo sapiens
tttttcacacgtacacataaaaagatattctgaaggatttaatttgaaaaattaaaatatacaaagaaaagagatggaaggtaaccagaaatgtatccgttgcttagactggtcccataagaaagagtattaggtgtccattgtagaggcgggaggcatcaatggcctagcttagagcaacaggaccaggtgaaaagtaatgtatgaaggaagggaaaagaggaactgagagagtcctaggattttmagcagagagggggtatagcattgggctaatgggaaggaaatcccaaggttttaactgtataagtaagaaattctctcagttgagtaatacttaagggtctcatggtagccactagcaattaagtgatacaaaataaacctttcctttatcttaaatgggaggatttgattcttcatatgtttttatgacttttgataagaaagattatgcttttatgtaagcatgtcagaaaggatttaaaatgtgcagcttttaatacaatgctcaactgaaagcttaagtttttataggtgaaatactggaaccctatctcaggcagttggaggca

SEQ ID NO: 882847 - DNA, 631 bp, Homo sapiens
ctcaaagtttgtggcagataataactgttttattattctcacgggctctatggatcacagttttgtacaggacacaacagggacagcttgtttatgctgtactatgtctgggcacacagctggaaaagctcaaaggctgggggtgactccacagctggggattgatatgatctggaggcatctctgtgcatttgtctgtggctgatactggctattggctgggaactcatttggcactctcagctaagacacctgctcttctctccatgtggtctggacttcctcactgtgtggaaactggatagtaaaakcaggcatcccaggagaattgggaaggaattgcattgcaattttatgacctaaacccaaaagtcatttagcatcacctccaccacaccctgttggccaaggcacagaacagtctttccaggttcaaggaagtagtgtcaatgtcacactgtaagtagagcacactggagggggtatactgttttggccagattccaaaaagaatagctgccacgcactttctatccctatttctaaataggtttttcttctgttccttacattgttggctccttcatgtcattccggttgtttgttcaaatatctctacctatgccaactg

SEQ ID NO: 882848 - DNA, 631 bp, Homo sapiens
ctcaaagtttgtggcagataataactgttttattattctcacgggctctatggatcacagttttgtacaggacacaacagggacagcttgtttatgctgtactatgtctgggcacacagctggaaaagctcaaaggctgggggtgactccacagctggggattgatatgatctggaggcatctctgtgcatttgtctgtggctgatactggctattggctgggaactcatttggcactctcagctaagacacctgctcttctctccatgtggtctggacttcctcactgtgtggaaactggatagtaaaagcaggcatcccaggagaattgggaaggaattgcattgcaattttatgacctaaacccaaaagtcatttagcatcacctccaccacaccctgttggccaaggcacagaacagtctttccaggttcaaggaagtagtgtcaatgtcacactgtaartagagcacactggagggggtatactgttttggccagattccaaaaagaatagctgccacgcactttctatccctatttctaaataggtttttcttctgttccttacattgttggctccttcatgtcattccggttgtttgttcaaatatctctacctatgccaactg

SEQ ID NO: 882849 - DNA, 614 bp, Homo sapiens
aaaaggaaaaaaaaaaaaaaaaaaaaaactgggatagcaaaaagtagaccgctacgataatagctgctatatgctgcagggaccagtagagtttcttcacctaactaatgcttaacaattcaaatggttttcacctgtagatcctactgcaccttcagagattcctgaagctcaaagatctctttctaaccaaagtcaagttctacattattgtgtccatcagaaaaccaaactaaaggccaaattcagttctcaggaataggagaacaactgagcaytgtgatagctcaaaaagtgatcataataataaaatcgaagatattatttataaaggtcatatataattaatagaatattttatacaaacaaatgactttggccctacttacatcggaggataaattttaaaaagtagttacatcctctgcagcactgtttgctatagaacaatggtataaaacaagatttggtattttagcttatttactttaatccactggttacagcttttgggagacaaattatttttaaaattacactaaaacaaacctctacataatttttaatgtaaataattgcaaagtatgttagtcttttctatacatgacaagcac

SEQ ID NO: 882850 - DNA, 614 bp, Homo sapiens
aaaaggaaaaaaaaaaaaaaaaaaaaaactgggatagcaaaaagtagaccgctacgataatagctgctatatgctgcagggaccagtagagtttcttcacctaactaatgcttaacaattcaaatggttttcacctgtagatcctactgcaccttcagagattcctgaagctcaaagatctctttctaaccaaagtcaagttctacattattgtgtccatcagaaaaccaaactaaaggccaaattcagttctcaggaataggagaacaactgagcattgtgatagctcaaaaagtgatcataataataaaatcgaagatattatttataaaggtcatatataattaatagaatattttatamaaacaaatgactttggccctacttacatcggaggataaattttaaaaagtagttacatcctctgcagcactgtttgctatagaacaatggtataaaacaagatttggtattttagcttatttactttaatccactggttacagcttttgggagacaaattatttttaaaattacactaaaacaaacctctacataatttttaatgtaaataattgcaaagtatgttagtcttttctatacatgacaagcac

SEQ ID NO: 882851 - DNA, 679 bp, Homo sapiens
ctataagctcattagattcttttgataagtgatagtcttctcaagttatcattgggataccaatgtgaattatacaaatagttatttttcataagacattctgatacggcaggctcaaggagttagctgaaaaatttagaattgacctctattcatgtgtgtacctctgaataaaactctatgaaagggactttaaaaatatatttcatttgcaataattaacttgaattctccataagaaataatttagttccataaggttggccttttttggtaactttcaaatgaaatctattatttaaactaaattcaatcaaactcatcataaatattgagactgatttttaaggccacaagcctaaataacaatccttctataattttaaagggtttaaatgtaccttacatttcaatatataaacctgtgtatatagaactaaaatcatcaaaaggaaaattgaaattcttcatctatgatataatgaattataaaattaaacataaagttagaaaagctcccaaatcttaagwattgtggacacacttcagaaaatgagactgaccagatattgacagaagagtaagaggacttcccagttgacagtaagttgatttgcccagccttagggtcaagtgtgaaatgatcagcagctgcaaattagcaatgtgcctatgcttt

SEQ ID NO: 882852 - DNA, 541 bp, Homo sapiens
gtattgatgactaccatcttctaccacccattctgtgtcccctttgccttcagcaagccgtggatttttcctagtggagggactcaaacgttcattcctgaagggtctgggtcatttgtagtcctacctggattgggctgttgtagtgttctatggaccttaatcacagggcatgttaatactaagagatgccccattagatctccatgcattctcttccttacctccgttgtggagtagtagactgatttcatctgatagtccgggtcaatcaccccagtcaacactgtaactcccttcctagcttaaaggtaggaggagcccaaagtgtcaaggtggcaatcttaacttccagtttaatggaatcattgytatgtctcctggtggcagcattcctccctctggaactaagacctctaggccagcagaatgtaatgtcgcaggaacaggaagcaagtatgctaatggatccctaggggcgatggtgagtggtgccactttcgcttctacacctcgattcctggacctgtgaatcctggct

SEQ ID NO: 882853 - DNA, 548 bp, Homo sapiens
attctaggaaatttttaatgttcattcctaatttttttaatatcttcatttttgtttggtgttatacacctatgaccttggtactgaaaatttaggtttttaccattcatgttttttatttttattaaagcaggaagagaaaagaaagagaaagtgagagaaaggaaggaaggaatgatgggaggaaggaaggaaggaaggtaggaaggaaggaaggaaggaagggcacaaatgtttctgaaatttcacaaggaaatttcatttaactctagagttctacaaatacgtaatagaaatatgtagatatgtaaaacatctgcttatattaccacagagttacataccacattttgcataatttccccaaatctctttaataactaaggttaaagtgttaaattttaaagtatgtyctaaataaattttactagatattctagtataagaaatttgaaaaataaatctggaagcttatggatattacatatgtaaagtccctgttatttatgctggctttaaatacttgattaagcatccatatgtcaacc

SEQ ID NO: 882854 - DNA, 627 bp, Homo sapiens
aagagaagtatatgatgtgagtaaacaccaacatttcagtttttacatgatagccctaccttctttctttttttctttaagaaatcttcctaagaatcctttcaggcactaggccatggtccacttgtgaatttggctagctgaccccataatcacagcggcagtttgctgcctctttccacaaaagatttctttgctctgttgccgaggctggactacagtggcatgatctcggctcactgcaacttctgcctctcggggctcaagtgatcccccaacctgagccttctgagtagctggaaccacaggtgtgcaccaccacacctggctaattcttttgtattttttgtagagacagggcttctccacgttgcccaggctggtctcgaactcatgggttcaaacaatccacccacctcggcctcccaaattgctgggattataggtgtgagccaccaggcccggcctaaaagattactatttctaaamttcacttccatatgatttggttgcaattgtttcagagagaacaatcagttgtctctgaaaaaaagtgagaaagttgcagatatcttcaccagcgagaaagaaggacttctagaagcaatctcagccgtcttgagactc

SEQ ID NO: 882855 - DNA, 646 bp, Homo sapiens
caacattttgttctttgtctcaagcagaaactattcccaacagggctctcatttccttactgttagacttagttttcattaccttcacgcaaatgaaagtgtaaagggggacccagactatatatcccattcactatagatccctaagtgattaacatattttctagtatacagttgtctcacaatgaatattgttacttattaatagtgaatagtagtaaaaacaataatagctaacaattctcagatcatcaaaacactgcctattttatattacaacacataatctgcatttaacacttaaccttcatttaaaattcaatcctcaaaaaaaaaaaaaaaacagaagaaatrgaaactattattgatcccattttaaggacaaagaagttgaggcagagagaagtaatatgtccaagattatatagctgtaagtggcagtgcagcgattgtttgcttcctctactatcattaacttttagaaaacagaaactgtgtcatagttatctgctatctgctataacgtctagccaaaatcttgtattcaagcagtatagcacagctgttaagaactcaggaatctgagtgagactgtctgcattgaaatcctagctccatcacttgctgactatgtgacattaacatc

SEQ ID NO: 882856 - DNA, 598 bp, Homo sapiens
tatatatatatatatatatatatatatatatatccctgatatgtaatatatatatatccctggtatgttttttatatatatatatccctgatatataatgccataagattagagatttgataatgcagcaaaacctagaccattctgaataacatattactttttatttataccaatttggcaagaaagatgagatttagaggaaatttcccagacctatgatattcaaactatacactaagtgcttgatgattggttcttatatagaaaagaaaatcaatcttccttagaaagaggaaataaacaaagacgtaactcggtggatcaggaaacgataagttgttataggattttagagtttgaactattaatccagactatgaaaactgtgaaaatctatgcagtttttgcgtgtgggcgcacgtttctgggaataatatgtcttcaagaatgttcawagcatagtttaggtgagattcaagggtaggagatatggggaaagagaaaattagctcgaaatgaggacaaggagttggaatttaggaggactaggcacacgaggactaggcaacttaatttattaagctgaaaatagcac

SEQ ID NO: 882857 - DNA, 614 bp, Homo sapiens
ttttgtcacaagtactcaactctgccattaggaacaggaaagcagccatagacaatatgtagatgaatgggtgtggctgtgttcccataagctttatttgcaaaaacaggtgggatgggtttgacccaagggccctactttgccaactgccaagttagagaaaaatcgtatctacttaaagccttygatagtattctcatttccatctatgaatcaaggtggaacactggaaagggtagatgatataatgttggctatttactatcaagttttataacattaaaatattatttactaccaccataggaattgcatttctgtaattattaattatttttcaagacattatttaaaaatatttcctatgaaatgcctcatttaagacttttctgacagagtttagtattagaatacaaatgttttccatcataaaacttacgtgttttcttctgtcagtggactcaaatatttattagacatacctcttcatccttattagaaaagttttaagaaagttttatgcttaattctaataatcttatgatttaatggctagcatactttccttctctgttttgtttttaccttcaatcttcctttctctccctctatct

SEQ ID NO: 882858 - DNA, 604 bp, Homo sapiens
ggttcatggaggcattgtatgtaatcacaaaaaaaatatgaaccacccagctgatcctctcaaaagaatggaaacataggctgcagtaatcaaaacagcagagtactagtacaaaaatagacacatagatcaatggaaaagaagagagaacccagaaataaagttcacttctacagccaattgatctttgacaaagtcaacaaaaataagcaatggggaaaggagtctctattcaataaatagtgctgggatagctggctagccatatgcagaagaatgaaactggacccctacctttcaccacatacaaaaattaactcaagatggactaaagattgaaatgtaagacctcaaactataagaatcctagaagagaagctaggaaataccattctggataygagtttggggaaaaatattatgactaagtcctcaaaagtaattgcaacaaaaataaaaattgacaaatggaacctaattaaactaaagaattttggcacagcaaaagaaactatcagcagagtaaacaagcaacatacaaaaagggagaaaatattcacaaacaatgcatctgacaaaggtctaatatccagaatttgttaga

SEQ ID NO: 882859 - DNA, 666 bp, Homo sapiens
gcatcagatatcaggtgaagcacaggggttttttttttaggtcagtgaaaccattctgtatgatagtctatgcatttgtcaaaacccatagaactttaacatggtgaaccccgtctctattaaaaatacaaaaaaattagctgggcatggtggtgggygcctgtagtcccagcgactcgggaggctaaggcaggagaatggcatgaacctgggagcggagcttgcagtgagccgagatagcaccactgcactccagcctgggtgacagagtgagattccataaaaaacaaacaaacaaaaaaaagcatagaattttaaagcacaaagagtgaatcttattgatgcaaattttaaaatatcctttaggagatcatggaattcaagaatagaatgcagaatgtagaatatgacaaaataactgtattatagatatatgaaatgacgtcactgaaggtgatgatgggaaaggacctagatagctttagacatgagaggaatatataagaccaaaggcaaagtaatcactttactctagctgataaacttgtgtcccgatagggtatgaattaaaaattctggaaacaccacctatttattcagatcttggttcctaatagcattcttaagtgaaaagaaccagtgatccttggtgacatagctccttct

SEQ ID NO: 882860 - DNA, 519 bp, Homo sapiens
aaaaaggcaaacttggagatacaataaaaaatattagtggttgccaggcattctgcaagtggggagagcatcagatatcaggtgaagcacaggggttttttttttaggtcagtgaaaccattctgtatgatagtctatgcatttgtcaaaacccatagaactttaacatggtgaaccccgtctctattaaaaatacaaaaaaattagctgggcatggtggtgggtgcctgtagtcccagcgactcgggaggctaaggcaggagaatggcatgaacctgggagcggagcttgcagtgagccgagatmgcaccactgcactccagcctgggtgacagagtgagattccataaaaaacaaacaaacaaaaaaaagcatagaattttaaagcacaaagagtgaatcttattgatgcaaattttaaaatatcctttaggagatcatggaattcaagaatagaatgcagaatgtagaatatgacaaaataactgtattatagatatatgaaatgacgtcactgaa

SEQ ID NO: 882861 - DNA, 519 bp, Homo sapiens
aaaaaggcaaacttggagatacaataaaaaatattagtggttgccaggcattctgcaagtggggagagcatcagatatcaggtgaagcacaggggttttttttttaggtcagtgaaaccattctgtatgatagtctatgcatttgtcaaaacccatagaactttaacatggtgaaccccgtctctattaaaaatacaaaaaaattagctgggcatggtggtgggtgcctgtagtcccagcgactcgggaggctaaggcaggagaatggcatgaacctgggagcggagcttgcagtgagccgagatagcaccactgcactccagcctgggtgacagagtgagaytccataaaaaacaaacaaacaaaaaaaagcatagaattttaaagcacaaagagtgaatcttattgatgcaaattttaaaatatcctttaggagatcatggaattcaagaatagaatgcagaatgtagaatatgacaaaataactgtattatagatatatgaaatgacgtcactgaa

SEQ ID NO: 882862 - DNA, 546 bp, Homo sapiens
tacctttgggattgcaactattttgacaccacctacttcaggcaagaacactgctgtaatagccacatactgtgactattgttagaaattctgactgtctgcatttagcaactgggaatgtgaaaacaaatatcattccaactaaaacaatagtcaaagtaaccttttcaattgaattgttgcttgtaataatgaaatggtagtccataccactgagtgtatttgcagtcattttmacttgtgttttattcagtgaagccacttttcacatctttaatagaataaaaaaaatcagatgctttggcagtcttcacagttccctggtctcttttatttatcttgagggtcatatgtataattgatacaaggcagaagctaggagaatattactaaaaggaccagagagtagagggatcccactggcctgtgggattcaggtacagggctctctccagggaaatgttcctttggaccactgactgcacctgactggaaaacactggacgattgtcaaaattcacagtgatatccttctgtttcccagcc

SEQ ID NO: 882863 - DNA, 546 bp, Homo sapiens
tacctttgggattgcaactattttgacaccacctacttcaggcaagaacactgctgtaatagccacatactgtgactattgttagaaattctgactgtctgcatttagcaactgggaatgtgaaaacaaatatcattccaactaaaacaatagtcaaagtaaccttttcaattgaattgttgcttgtaataatgaaatggtagtccataccactgagtgtatttgcagtcattttcacttgtgttttattcagtgaagccacttttcacatctttaatagaataaaaaaaatcagatgctttggcagtcttcacagttccctggtctcttttatttatcttgagggtcatatgtataattgatacaaggcagaagctaggagaatattactaaraggaccagagagtagagggatcccactggcctgtgggattcaggtacagggctctctccagggaaatgttcctttggaccactgactgcacctgactggaaaacactggacgattgtcaaaattcacagtgatatccttctgtttcccagcc

SEQ ID NO: 882864 - DNA, 610 bp, Homo sapiens
actgcagttatatggccaagaagagggttacgaatagagagaacaagaatgggatgtctttagtagagcaggtcataatctagttaacatcagaaatgagatgataaaaacgcacggcgccttgcaagtgagtgccagtggaacatgtatagacgtgcatattcagcatgggctcaaaacataatcaaaagaatcatagcaatctgtgctcctcttatagactgacaagatgagactctactgattattttagccatggttcaggcaatttgataagccatagaaaaacatgcatcttcaatctgcacagaaaaaagtcataggtaagaatacagaaattactgtacaaaacaagttctgctaacttaacctaaaatttcatcccattgttaaaactcagcctcaaataaaatggtgcttataagatctaagasacctgggccctcaagttgttcacttaaaagcagtgtgaaatagttggtatgacatgactcagaccaatcttcgggattgaaaaccaaacattttaaagaacgttggtagaactcatgaagcacacacaaagattattatgttaatttagatagaattaatttttaaaattctcttt

SEQ ID NO: 882865 - DNA, 598 bp, Homo sapiens
tttgcctttttaaaaatttttgagtcatcattttggctaaatgaatgattatggtaacctggaattgtatttcacattatcaagaattttaaacctttaacatatttaataggcttcccaaaatcaaatttcagcttcaaaattgtcttttctgacctctaactttaagatgctacagatagcctctgaagcatccaaaaaagaggtaaacagaattatttgacatgttcaatttcatgggaagcattgccaacaatacacaaagttttaatcttcttcagggtatattttagtgaatcatattaatatatgtcttaaaattgtatgagatttctaaaattctaatatrtctgagtatatgctattgatcataattatggttattatgttattgtagaccacagaaataaccaaatttcattgtcaattgtgtttttaactataactatttaaagtcatttccacagttatttgcttaatgctgatgcagtttctggaaacttcacaagcatgcaaaatcctagaatatggtgtcttttggtaggttcatgaaggagggaaaggaccctaaaaggcactcttaaatacagatttctaa

SEQ ID NO: 882866 - DNA, 648 bp, Homo sapiens
ttatctttgaatattttttcttgtttatgcctctatgaacaatagaaatgaaaaagggggccaggtgtggtggctcatgcctgtaattccagcactttgggaggccaaggcgggtggatcactcgagatcaggcattcgagaccaacctgagcaacatggtaaaaaccagtctctactgaaaatacaaaaattaacccggcatcgtagcgcacacctctaatcccaactactcggatggctgaggcaggagaatcacttgaacagcagaggcagaggttgcagtgagctgaggtggtgctactgcactccatcctgggtgacagagtgaaactccatctcaaaaaaaaaaaaaaaagaaaagaaaggaaaagaaaagaaaagaaaagaaaagaaaaaagaaaaargggggtctgttgtgtgcacttatggagtatacttttatttgtaaaggattttgcagccagccttatacatagataatcttatactttgataggtaaaagatgaaggtccaatgtaggtgagaaactttaatggtacatacattccctcataatcagtcagaaagttaacattaattcactcctcttaacccacatcatgagttaaagagaacattgccaaggaggcctttgctcttctctaag

SEQ ID NO: 882867 - DNA, 567 bp, Homo sapiens
tcatctcttctatatcatgttgctgttttaaggtaagtaatatttgacagctttatcaaaaaaggctgaaagtcctaaattaagaatttaaaaaattttatgtagttccaaattccttttttagggggcaggagataagttgttttttgttttttttktttgtttgtttgtttttccccaatataaagatatagtcacacagataaaatgctactgatgaattcagatagtcaaaatcgttcctttgaatccctgaatacatttgcaacaggaattccatataaggaaaagaaatttcctttagaaaattaaccatcttgcgagctggatgccctgagtttggttaacttggagaaatttcctttggttgaagtactttaaatcaggatatttttcccatggaggaaaagatctccctctaaattttctttatgagtaagttattgtctaaaaagagatttatgtgtgttccagggtaaccacatccttaaacaaagtaaaaatatttttattttctagcaaaaacatgctgcttcatatttgttgaaattgttctaacattcagtt

SEQ ID NO: 882868 - DNA, 658 bp, Homo sapiens
acctggagggaattttaaaattcctgggctttatctcttttaattaatcttggatgggtccaggcatccataggttttatgagttccccaggtgattctaatgtgcagtgaggttgcataccattgttttacactttccctatttaatatcacttgctttggttgggcttgagacagggcattgaaaaaaagacaacttaaaattagatccttgaccagttcctaaaaggaagggattatgctattgattgaaaggagttggcaggcaagtaggtgccacggtcattgatatggtttgactctgtgtccccacctaaacctcaccttgaattttaataatccccacgtgtcatggagagacccagtgggaggtaattgaatcatgggggggtgggtctttccatgccgtcctcrtgaaagtgaatacatctcacaagatctgatagttttctaagggggaattcccctgcacactgtctcttgcctgctgccatgtaagatgcccctttgtttttccttcctcttctaccatgattgtgaggcctcccccgctatgtggaactgtgagtccattaaacctctttcctttataaattacccagtctcaggtatttcttatagcagcacaagaagggactaatacaatcctttactgcaa

SEQ ID NO: 882869 - DNA, 653 bp, Homo sapiens
cttttgttgcaattgcttttggtgatttcatcgtaaaatcttttcctgtacctacgtcctgaatggtattgcctacgttttcttctagggttttttttatagttttgggttttaaatttaagtctttaatccatcttgagttaatttttgtataaggtataaggaaggggtccagtttcagttttctgcatatggctagccagttttcccagcaccrtttgtaaaatagggataatgataataataaaattaaatattttaaaaatcaagtttaattttttatacacttactcatcagcattttgtactgataaaaagcactggaaaaatccattaaattattcccagctactagatattaatgagaaagtaatatagcagattcaagcatagttttaaagacaaacaatatgatatgtgtccaacagttggttagagctcagcactaatgaggccaaggtcaggagttaatcccctcatggctagttagttttgttctatttcatagccaaaggcagcatccatgacctcagatagctgacttggatatgcacgctattgaccattagggagtctcggctgaaggatagagggcaccagcacaaaaccattgcccattatgggaagaacaactgaagggtagaactaccctg

SEQ ID NO: 882870 - DNA, 653 bp, Homo sapiens
cttttgttgcaattgcttttggtgatttcatcgtaaaatcttttcctgtacctacgtcctgaatggtattgcctacgttttcttctagggttttttttatagttttgggttttaaatttaagtctttaatccatcttgagttaatttttgtataaggtataaggaaggggtccagtttcagttttctgcatatggctagccagttttcccagcaccgtttgtaaaatagggataatgataataataaaattaaatattttaaaaatcaagtttaattttttatacacttactcatcagcattttgtactgataaaaagcactggaaaaatccattaaattattcccagctactagatrttaatgagaaagtaatatagcagattcaagcatagttttaaagacaaacaatatgatatgtgtccaacagttggttagagctcagcactaatgaggccaaggtcaggagttaatcccctcatggctagttagttttgttctatttcatagccaaaggcagcatccatgacctcagatagctgacttggatatgcacgctattgaccattagggagtctcggctgaaggatagagggcaccagcacaaaaccattgcccattatgggaagaacaactgaagggtagaactaccctg

SEQ ID NO: 882871 - DNA, 642 bp, Homo sapiens
aatctgtctaactcagagtttaactgattgaaaagctaacagcatctaagaaataccttcacagaaacatctagactcctgtttgaacaaataactgggccccatagccagtcaagcagtcacataaaattaagcattgtggccaggcgcagtggctcatgcctgtaatcccagcacttggggagaccaaggcatgtagatcacctgagatcaggagttcgagaccagcctgggcaacatggagaaaccccgtctctactaaaaatacaaaaatagctgggcctggtggctcatgcctgtaatcccagctacttgggaggctgaggtaggagaatcgcttgaaccagggaggtggaggttgcagtgagctgagatcacgccattgcactccagcctgggcaacaagagcaaaactccacctcaaaaaaaaaaaaaataaaataaaataaaataaaataaaataaaataaaataagcatcgcatagmgctggaatttgaatgtaagtcaattcactctaaagtgtttgcaataagccagtgtaagatcctatttccccaaattttctgtctcagaaaatagtttacaatcttaaaacactaatcagcttcagagaatggcttgaagtaccaaaacatctgtcg

SEQ ID NO: 882872 - DNA, 616 bp, Homo sapiens
agaattctgttctccaaatacttcagcaaatcatttataaatgcttatggtaattgtttgatgatattaactgaattgcaaccaattatagagaaaagaatgtgatttatattgtaatttgattaggtttctatgtattattcagcaaggttccctaagtaattacagccatttcatttctaagaagtcttgcagccartctcgggtaggatctttgaccaaaaagaaacttcagaaaaataaagttattaataacttacatttaagattcagcattaggaccacgaagaggtctacacttgactaattgttctattcttaaaggtcaataagaataagaattgaacaagttcttaatcagctttctctttttgaaacagtagactacccggtgagtttttccttacgtgtaatcaactcttaggtaaaatactaagtagcccatcttttcttcttacctgtgacaagatgaataagctctgtgtatcctgagatcagtatctcttcactctgttattttttctttcctctctgggaaaaatcaactctaactccttttatttttcctcatatatttctttatactcttacatctttcctgattccagtcctttag

SEQ ID NO: 882873 - DNA, 616 bp, Homo sapiens
agaattctgttctccaaatacttcagcaaatcatttataaatgcttatggtaattgtttgatgatattaactgaattgcaaccaattatagagaaaagaatgtgatttatattgtaatttgattaggtttctatgtattattcagcaaggttccctaagtaattacagccatttcatttctaagaagtcttgcagccagtctcgggtaggatctttgaccaaaaagaaacttcagaaaaataaagttattaataacttacatttaagattcagcattaggaccacgaagaggtctacwcttgactaattgttctattcttaaaggtcaataagaataagaattgaacaagttcttaatcagctttctctttttgaaacagtagactacccggtgagtttttccttacgtgtaatcaactcttaggtaaaatactaagtagcccatcttttcttcttacctgtgacaagatgaataagctctgtgtatcctgagatcagtatctcttcactctgttattttttctttcctctctgggaaaaatcaactctaactccttttatttttcctcatatatttctttatactcttacatctttcctgattccagtcctttag

SEQ ID NO: 882874 - DNA, 616 bp, Homo sapiens
agaattctgttctccaaatacttcagcaaatcatttataaatgcttatggtaattgtttgatgatattaactgaattgcaaccaattatagagaaaagaatgtgatttatattgtaatttgattaggtttctatgtattattcagcaaggttccctaagtaattacagccatttcatttctaagaagtcttgcagccagtctcgggtaggatctttgaccaaaaagaaacttcagaaaaataaagttattaataacttacatttaagattcagcattaggaccacgaagaggtctacacttgactaattgttctattcttaaaggtcaataagaataagaattgaacaagttcttaatcagctttctctttttgaaacagtagactacccgrtgagtttttccttacgtgtaatcaactcttaggtaaaatactaagtagcccatcttttcttcttacctgtgacaagatgaataagctctgtgtatcctgagatcagtatctcttcactctgttattttttctttcctctctgggaaaaatcaactctaactccttttatttttcctcatatatttctttatactcttacatctttcctgattccagtcctttag

SEQ ID NO: 882875 - DNA, 661 bp, Homo sapiens
gaaaacactaggggagagaggaaagtaactggctcagttaaggttgtctatgatagaaacaagcaaagaaataaagtagatgtcaagaaagcatttgacacatggatctggagctcagggaaaagctatggactggagataccaatttgaaaatcatccacaaagaatcaggttattgaaactatgggagtggatgagattgctcaggatagtgtgaagcatacaaaggaaataattcctagaactgagcccgaggaaacataaacattggagggaagacagagaaaggaacctaaagagaaactaacggagggccagaaaggtggaaagaatatgaaagtacagtggtgaaargaagtgaagaaggagccctttaaacaagtgagtggtcaacaatattaaatgtgatgaagagtttaagtgaaataactttcaaagtgtctaatagacacagcaataagtagtttactagcactcttgatggaaacaatttcaaccaggtgccaaaaactttaaggaggaaaatgtggtttgacagaaaaatatttggttacaaaagggcagcaaaaagtaggatggtaactgaataaggagaataactgttgttgttgttattgttgtcgttgttttgtgatggttttaaaatgagaagaatgagttg

SEQ ID NO: 882876 - DNA, 661 bp, Homo sapiens
cattcacagatacgggggattaggacttgtatctgacttttggggggtcattctttaaatcacaacacaagggtcttgtagtttttgaactattgaagcaatttctgctacatttttccgactgcttctttctgtcttctgattagagatactatgtggcaagctctcggcaaatccggaggttgacaggagggtcccgttctcctgtcatttctcactttagtgagactttatcaggagtgtccaccatcagagcatttggacatgaacagaggtttatccagcaatacaaagagatggtgaatgaagacttggtctgtttctacaataatgtaattttcaacctgtaagtcccgttratacctagcctaggatcaatctcttcttagacatcttgctcactgacttctaaacagacggttttgaaatggcatttcatccaagttttagaagtatgtattaataagacaaatattttccagtatttaatgtacatttaaattaaattatatctatttatattcacatgaaaggcacatactatttaatatgaaaaaggtgcttttagaattactcatgacataattctacattgtgttttatatctttagaatatattttatttgtatacactgttttgtaaaatttttgaatttgaagt

SEQ ID NO: 882877 - DNA, 670 bp, Homo sapiens
tcaacctgtaagtcccgttaatacctagcctaggatcaatctcttcttagacatcttgctcactgacttctaaacagacggttttgaaatggcatttcatccaagttttagaagtatgtattaataagacaaatattttccagtatttaatgtacatttaaattaaattatatctatttatattcacatgaaaggcacatactatttaatatgaaaaaggtgcttttagaattactcatgacataattctacattgtgttttatatctttagaatatattttatttgtatacactgttttgtaaaatttttgaatttgaagttataatctcacataaaggagaaaaatgaattaaatagaagttgagcatgtttcaatttttaaagactaattttatcatattaaaaagtatacacaattggaaagggaattgattttccaataggatttaaaaaatgcaatacatcattatagctggtgttattttgcttctaaattcrgatcaagttttaaagcaaagttctgcaaaagtaaaatgcattttcatgcagatgaattctttaagttatcatgtgatgatcccatgtttgattgagttccaagtaagttggggagaaaaaagaaagcagctattgctgtttatgtctcaatttcccagaggagagggtta

SEQ ID NO: 882878 - DNA, 634 bp, Homo sapiens
actaagcctttagcctggtacaccatatacaaagtatagccctgaaacaaagtacagccgttggatcctgacacaaaccctagctgccatcctcaaaaattctggcttagacacaaaactggctcactctcaccagtatatcccttggtatttgctttctcaagttccttttggagtccacttaaaacctctgcgaccagtttcaaaaactcatctagggagcactttctaggaaaataaactttaattctagttttctgttgtatccacatccatgcaaacatcgattctttcaaaaattatttatagtttaatatcttcatgatttgttcatttattctttggacccaaagaaatgtatctccccgcatttgcctgggagcttctgcaatgaagttaccacaatttaaatcatctctacagtgactttatttaaaatgttgattgaataaatccaaamtcaattaatgtgccagaaaaaaaggaagccaccccactagctaaagagtaaagccctttctgcattcatctttcttactctcacccactctcccaccgcccagccctacgccaggcgagggagcagtgcggtgggcggtaccccaagtccgctgggggcgtggccctggagcca

SEQ ID NO: 882879 - DNA, 522 bp, Homo sapiens
taaaagggacaaacatacagctcaggccattgcttcagaggctgcaagacccaaggcctggcagcttccatgtgttgttgagcgtgtgggtgcacagaagtcaagaattgaggtgtggggacctcctcctagatttcagaggatgtrtggaaacacctggatgtccaggcagaagtttactgcaggggcagagccctcatggagaatctctgctagggcactgcagaagggaaatgtggggttggagccccacaaaagtcttcactgggaccttgcctagtggaactatggaagagggctactgtccttcaaaccccagaatggtaggtccaccgacagcttgcaccatgcacctgaaaagctgcagacactcaacaccagcctgtgaaagcagccaggaggggggctgtatcctgaaaagccacaggggcagagctgcccaaggccatgggagcccacctcttgcatcagcatgacttggatgtgagacttggagtcaaagcagatcattttggaacttta

SEQ ID NO: 882880 - DNA, 528 bp, Homo sapiens
tttgaggtcagaccacttctctgctcttgaaccctgttttctgttgttatgatgtttatcaagacaatacattcacagctgaacatagaccctcatcagtaattctaattttgccctttgctttgtgatcttgtttttaccctttgccttgtgatctttgctggacccttatcaggagttcctgattttgtccttgccctatttcctcrgaagcatgtgatctttgctctgccttttgccctttgaagcatgtgatctttgtgacctactccctgttcgtacactccctccccttttggaatccctaataaaaacttgctggtgttgcggctcaggtggccatcacagacctaccaatgtgtgatgtcacccctggtggcccagctgtaaaattcctctctctgtactgtttctctttatttctcaggccagctgacacttaggggaaatagaaagaacctatgttgaaatattgggggcaggttcccctatagatggcttgctgtttcccacagctgaactcattgg

SEQ ID NO: 882881 - DNA, 597 bp, Homo sapiens
tttataggaatcttctttaatgaaggttaatcactttggtagtctttgaagaatttaaagacttttccgacttctctctctgttcactaatgtgcaattttgaaagccaaattaatgaaactcttccttgcatagctcatccttatcccataaattcatctagttaawgtaaataggaagataatgactacattcttgtgtcataaccaccacctttgctttaatatataaagatcgatggtgagtcgaagtatgagaacattgaccaaggaggaggctggaaatgaggttgaaattgtgaactaacctgttgtgaccttttttttaaacctttacagtacacatgattttattgtgtctacttctatacttaaaagatattagctttaatttgaaatgattttttaaatgataagactcctttgtcaatcgtcatccttgactgaattccatctgctgttcctaatacgataattcgttggatctaagatgtcaatgattgtgagccttatcattatttcctgaactactaagaaaaaaatctacaaattaaactataaccaacaatgctttcttgtctatgagatgtgttatttt

SEQ ID NO: 882882 - DNA, 597 bp, Homo sapiens
tttataggaatcttctttaatgaaggttaatcactttggtagtctttgaagaatttaaagacttttccgacttctctctctgttcactaatgtgcaattttgaaagccaaattaatgaaactcttccttgcatagctcatccttatcccataaattcatctagttaaagtwaataggaagataatgactacattcttgtgtcataaccaccacctttgctttaatatataaagatcgatggtgagtcgaagtatgagaacattgaccaaggaggaggctggaaatgaggttgaaattgtgaactaacctgttgtgaccttttttttaaacctttacagtacacatgattttattgtgtctacttctatacttaaaagatattagctttaatttgaaatgattttttaaatgataagactcctttgtcaatcgtcatccttgactgaattccatctgctgttcctaatacgataattcgttggatctaagatgtcaatgattgtgagccttatcattatttcctgaactactaagaaaaaaatctacaaattaaactataaccaacaatgctttcttgtctatgagatgtgttatttt

SEQ ID NO: 882883 - DNA, 597 bp, Homo sapiens
tttataggaatcttctttaatgaaggttaatcactttggtagtctttgaagaatttaaagacttttccgacttctctctctgttcactaatgtgcaattttgaaagccaaattaatgaaactcttccttgcatagctcatccttatcccataaattcatctagttaaagtaaataggaagataatgactacattcttgtgtcawaaccaccacctttgctttaatatataaagatcgatggtgagtcgaagtatgagaacattgaccaaggaggaggctggaaatgaggttgaaattgtgaactaacctgttgtgaccttttttttaaacctttacagtacacatgattttattgtgtctacttctatacttaaaagatattagctttaatttgaaatgattttttaaatgataagactcctttgtcaatcgtcatccttgactgaattccatctgctgttcctaatacgataattcgttggatctaagatgtcaatgattgtgagccttatcattatttcctgaactactaagaaaaaaatctacaaattaaactataaccaacaatgctttcttgtctatgagatgtgttatttt

SEQ ID NO: 882884 - DNA, 662 bp, Homo sapiens
[354 bp omitted]gttggtgattagaaagattaagcagacaccttggctctaagaaatgcaaacataagaaaaatgaattgtacaatttagatttagccaagggcatttcaaggctcaaggctgtttttctcaatgaatagtggagtaataaatactttgtcttctcttatagcaagaccaggctggcctctacgtcagacattctggtaaacaatgaaaagtatgaaaatattcttggctttcttaaggactgtgaaaaagaaaatgacatctaaatctctgcatatgtttagtctgaagtcatactacagaagactatt

SEQ ID NO: 882885 - DNA, 662 bp, Homo sapiens
[354 bp omitted]gttggtgattagaaagattaagcagacaccttggctctaagaaatgcaaacataagaaaaatgaattgtacaatttagatttagccaagggcatttcaaggctcaaggctgtttttctcaatgaatagtggagtaataaatactttgtcttctcttatagcaagaccaggctggcctctacgtcagacattctggtaaacaatgaaaagtatgaaaatattcttggctttcttaaggactgtgaaaaagaaaatgacatctaaatctctgcatatgtttagtctgaagtcatactacagaagactatt

SEQ ID NO: 882886 - DNA, 662 bp, Homo sapiens
[354 bp omitted]gttggtgattagaaagattaagcagacaccttggctctaagaaatgcaaacataaraaaaatgaattgtacaatttagatttagccaagggcatttcaaggctcaaggctgtttttctcaatgaatagtggagtaataaatactttgtcttctcttatagcaagaccaggctggcctctacgtcagacattctggtaaacaatgaaaagtatgaaaatattcttggctttcttaaggactgtgaaaaagaaaatgacatctaaatctctgcatatgtttagtctgaagtcatactacagaagactatt

SEQ ID NO: 882887 - DNA, 662 bp, Homo sapiens
[354 bp omitted]gttggtgattagaaagattaagcagacaccttggctctaagaaatgcaaacataagaaaaatgaattgtacaatttaratttagccaagggcatttcaaggctcaaggctgtttttctcaatgaatagtggagtaataaatactttgtcttctcttatagcaagaccaggctggcctctacgtcagacattctggtaaacaatgaaaagtatgaaaatattcttggctttcttaaggactgtgaaaaagaaaatgacatctaaatctctgcatatgtttagtctgaagtcatactacagaagactatt

SEQ ID NO: 882888 - DNA, 671 bp, Homo sapiens
aacactccataactcaataatcactttgctggaaaagtgttttgcagtattgacaaaagctgaatatatacacaaccaattctgctctgagttagatatgtaataggaatgagtgcttatggcaacaaaaaaaagtacataaaatttttatagtaactttataatatcttcaaaccggaagcaacccaattattcatcatatgcaggagaataaatcaatacattataatatatttttataayggaatatttagcaacagtgaataataacaattacttacagtgaacactgataacataaaagcgcaagtttttgtctgatagaagtgagaggtcagtaagaatagttaaaggaaattttagaattttaatttttcatttatagagtagggagcaagtagatactttccaacattaatggataaataaaaaaggacaaggcgtaaaaatactctttagagtaatgagtagaaatgattaaaaacaactaagcgggaaatttacttctatttttcttatctttaaacaatatgtattttgcaaaatgtttcacaattaacattttaaaattgtaaaacatacttcatatttgagatgactgaatgggaattagaagcggaagaacacccattttgctgatgttggtatgtatacaacaggaaagcctttac

SEQ ID NO: 882889 - DNA, 643 bp, Homo sapiens
cttagatacctcagaggagtgactttaaactcatgatgtcagaactgaactcacattttattttaaccttatcctacttatacattccctatcttgtctcccacaccacatttcctactatatcctgcctgaacctacattcccttctgtaacacaggggggaatattattctttgccataacgattaaatggagaattaaggttaaacacttcattgactttaaaccattatgacagttaaactcattatatgtgtatacacacacacayacacacacacacacacatatatatatacaaacgcacacacaactatacatataccaacatacatacatacatagtatattccatggaagaaaagcagcaagaataccattagcctaagcaaatttcaaaaatactgagcatcagaaagctgtcaaggaaaattctaacttgagaaaaatgacagaatgctttatagggttttagcaggaaaagcatgtcaagccttgctagtttcagagaatagttggtcaaggatggtctcagaaggggtaagaattgttcttgaggaggaagagctaagggtcaagtttgtctgcaagacggggtaggcaagaacatctaagggaaacaaaacatttgagaccaccttgg

SEQ ID NO: 882890 - DNA, 643 bp, Homo sapiens
cttagatacctcagaggagtgactttaaactcatgatgtcagaactgaactcacattttattttaaccttatcctacttatacattccctatcttgtctcccacaccacatttcctactatatcctgcctgaacctacattcccttctgtaacacaggggggaatattattctttgccataacgattaaatggagaattaaggttaaacacttcattgactttaaaccattatgacagttaaactcattatatgtgtatacacacacacacacacacacacacacacatatatatatacaaacgcacacacaactatacatataccaacatacatacatacatagtatattycatggaagaaaagcagcaagaataccattagcctaagcaaatttcaaaaatactgagcatcagaaagctgtcaaggaaaattctaacttgagaaaaatgacagaatgctttatagggttttagcaggaaaagcatgtcaagccttgctagtttcagagaatagttggtcaaggatggtctcagaaggggtaagaattgttcttgaggaggaagagctaagggtcaagtttgtctgcaagacggggtaggcaagaacatctaagggaaacaaaacatttgagaccaccttgg

SEQ ID NO: 882891 - DNA, 633 bp, Homo sapiens
ctcttctgccttagagtttttttatgaacttggtggctggcatgatgatattccagacaagctgtgttctctttctgacaatatgaaatccccagaaggcttttgctaacttaggtgtcctgtgaaataaaaacagctgttggtgatctgcaatgattttgctaagctggttcattaattttggaatccaagatcccrggaaatatcgagtggttttaagtgataacaaatagtaatgtagcaatatctcaaaggttatatcacctctgaaaacaccagggtacctaagtttaaattcaaaatgctttgaaaatatacatcataatgatttcccacattaaagaaaattgacaaaaccagaaaattttttattgagataatactacagcatcttagaaatggaaaacagggagtcagtaggagtagaacaagcacaatatgtatttttagtttgaggtcctcttggaccaatgtcatgattaatttatgaatctaatatatttaatatttttaaactcttagattttcttgtgtttgtttctggtcttctttgaaaaacgactgatttcacttctcatatcaactcctacccaattttaatagcactgtaaaatagcattttattttcagtta

SEQ ID NO: 882892 - DNA, 484 bp, Homo sapiens
cggcaccttttattgaagatattgtcctttttccaatgtatgtttttggcacctttgttgaaaatgagtttactgtagaagtaaggatctgtttctcggcaatttattgtgatccattgaagtatgtgtttgtttttataccagtgccatgctgtttgggttactatagctccacagtattatttgaggtaaggtaaagggattcctccattttttttttttttttttttttttttgcttaggatagcttwggctattttgggtcttttgtggttccatataaattttaggatattctttttctatttccttgaaaaactattagtattttgataggtattgcagtgaatcagtagattactttaggtaatgtggagattttaacaacattgattcttccaatccatcaacatgaacatggaatatctttccatttttttggtgtcctcttcaagttcttttatcagtgttttatagttttcat

SEQ ID NO: 882893 - DNA, 645 bp, Homo sapiens
atagcttaggctattttgggtcttttgtggttccatataaattttaggatattctttttctatttccttgaaaaactattagtattttgataggtattgcagtgaatcagtagattactttaggtaatgtggagattttaacaacattgattcttccaatccatcaacatgaacatggaatatctttccatttttttggtgtcctcttcaagttcttttatcagtgttttatagttttcattatagagatctttcacctttttagttaattcctaggtatttaatttttttgtagttgttgtaaataggaataccttcttgatttcttttttaraatgtttgctgttggcatataaaaatgctactgaattttgtatgtcgattttgtatactgcaactttatgaatttgtttatcaattctaatattttttggtggagtcttttcgtttttttaaatataagattatatcatctgcaaacagagataatttgacttcttcctttccaatttggaagtcctttatttatttctcttgtttgatttctctagctaggacttccagtagtattatgctgaataacagtggtgagagtggagaatcttgtcatgttccagatcttagaggaaaggctttgtttttctc

SEQ ID NO: 882894 - DNA, 645 bp, Homo sapiens
atagcttaggctattttgggtcttttgtggttccatataaattttaggatattctttttctatttccttgaaaaactattagtattttgataggtattgcagtgaatcagtagattactttaggtaatgtggagattttaacaacattgattcttccaatccatcaacatgaacatggaatatctttccatttttttggtgtcctcttcaagttcttttatcagtgttttatagttttcattatagagatctttcacctttttagttaattcctaggtatttaatttttttgtagttgttgtaaataggaataccttcttgatttcttttttaaaatgtttgctgttggcatataraaatgctactgaattttgtatgtcgattttgtatactgcaactttatgaatttgtttatcaattctaatattttttggtggagtcttttcgtttttttaaatataagattatatcatctgcaaacagagataatttgacttcttcctttccaatttggaagtcctttatttatttctcttgtttgatttctctagctaggacttccagtagtattatgctgaataacagtggtgagagtggagaatcttgtcatgttccagatcttagaggaaaggctttgtttttctc

SEQ ID NO: 882895 - DNA, 646 bp, Homo sapiens
tccttttttgtagctattacaaatagaattgccttcttgatttttttcaactagtttatcgtttatgtgtagaaatgctacttattttgtatattgattttgaatcctgcaagtttactcaatgtattcattagatctaagaattttttggtggagtcctcagatttttctaatttataagattatgtcatctgcataaaacaactttacttccttctttgtggtttggaggttttttatttctttctcttgtctgatttctccagctagaacttctagtgctacattaaaaaagtgtggtgaaagtggacattgtcttgctccagttcttacaggaaaggctttccgtwcctcctcattcagtatgatattagccgtgggttttcaaatatggcctttattatgttgaaatatgttccttctatgcctaatttgctgagagttttcatcacgaaaggatgctgaaattcttcaaatgctgtttctgcaactaatgaggtaatcatatagtttttgttcttcattctgttgatgtgatatattatctttattgatttgcatatgttgagccatccttgcatccctgatataaatctttcctcatcatagtgtatcatctttttgatatactgttgtattaagtttg

SEQ ID NO: 882896 - DNA, 646 bp, Homo sapiens
tccttttttgtagctattacaaatagaattgccttcttgatttttttcaactagtttatcgtttatgtgtagaaatgctacttattttgtatattgattttgaatcctgcaagtttactcaatgtattcattagatctaagaattttttggtggagtcctcagatttttctaatttataagattatgtcatctgcataaaacaactttacttccttctttgtggtttggaggttttttatttctttctcttgtctgatttctccagctagaacttctagtgctacattaaaaaagtgtggtgaaagtggacattgtcttgctccagttcttacaggaaaggctttccgtacctcctcattcagtatgatattagccgtgggttttcaaatatggcctttattatgttgaaatatgttccttctatgcctaatttgctgagagttttcatcaygaaaggatgctgaaattcttcaaatgctgtttctgcaactaatgaggtaatcatatagtttttgttcttcattctgttgatgtgatatattatctttattgatttgcatatgttgagccatccttgcatccctgatataaatctttcctcatcatagtgtatcatctttttgatatactgttgtattaagtttg

SEQ ID NO: 882897 - DNA, 593 bp, Homo sapiens
ctctggagactctggttgccctgtttcttgccctatttctggtagccagtaagccagtggactttctaccagagtttgagctatccctacaccatgccactgtgactgtggctccattcagggcaaagctgcaaaacaaaacacacaaaaaatgaggcagtcaccctgttctcgtgattgttttccccaagtcttgtctctactcccaaatctgcttgtcatacttcagtttcctgaacctgcaggtaattatgttaataattttttccattttatagctatatctaggagaattgctttgttgatcatttctcttttaacatkatttaagagatagattgaaaaattgattttgaaccatgaagatgttgtcctaaaaattatagttagtatgaaaagtaaagtacttgagaaggacacttttagacagaacttcacttatgtgacatagtggactctgttgaatatcttccaactcacaacgatccacttaattacacacatccacttcagacctactgatagccatacagttagcacttagctgccatatttatgcaatggcctcttaaaataattgtacattctaccct

SEQ ID NO: 882898 - DNA, 593 bp, Homo sapiens
ctctggagactctggttgccctgtttcttgccctatttctggtagccagtaagccagtggactttctaccagagtttgagctatccctacaccatgccactgtgactgtggctccattcagggcaaagctgcaaaacaaaacacacaaaaaatgaggcagtcaccctgttctcgtgattgttttccccaagtcttgtctctactcccaaatctgcttgtcatacttcagtttcctgaacctgcaggtaattatgttaataattttttccattttatagctatatctaggagaattgctttgttgatcatttctcttttaacatgrtttaagagatagattgaaaaattgattttgaaccatgaagatgttgtcctaaaaattatagttagtatgaaaagtaaagtacttgagaaggacacttttagacagaacttcacttatgtgacatagtggactctgttgaatatcttccaactcacaacgatccacttaattacacacatccacttcagacctactgatagccatacagttagcacttagctgccatatttatgcaatggcctcttaaaataattgtacattctaccct

SEQ ID NO: 882899 - DNA, 627 bp, Homo sapiens
atcacttctataaaactagatttatatttatataactatatatagaaacataaacatctttaaaagataaagtgatcaaagttccatcttctttgaagccataatttaaatacacattttcaactggaaatcacatgtatttcaaatggttattttgtttatgtaatatgactcctttccaccccaaatgagtgtttacccccaaattattctgcgagacatttcctaagaagagtgaaacgtgctcatctttaattttatgaggtaataactcattaatactgcactgagtaccagcacgctaatgttttgtgacttcacataaattgctgcagtggaaaaagatagtaggtgttccagggagacaaaaatgtataattttaaaagaattgtaatagattagatatgataggtgataaaaaggcaaatttcaagcatatatkggtttttcatcggcatatacgtggtgatgttgtttggagtaaaagaaaacacagaagaccagactgagggccagcaggaaggaaaagcatggatataaaatcttgctacattgagctacctaagtggagatgttgaagacaccatcgtatatgtggatcttgagctaggaataaaagttgagag

SEQ ID NO: 882900 - DNA, 718 bp, Homo sapiens
caatgattgcatgcgccatgcttctgacagttcatggcactgccctaacactggtttttcacaatcctgttatcttcattattatcaggaagtttagttctgtgacagcttctcctccttttaccctgacctacaggtgatccccaccactcagcttctcagcaatgccactatccctctcatcagcacaatccctattgctgtaataaatgaagtatcctctggaccattccaatgaacattgtggtctgtagagttttctgaccttagatagtatccgttctataatagcatgctctstttttgtcttttgaccccctccttctctatttgtcataatattttctagcattttcccccatttttatgaatcattactttctcctagctttcaaagaccttcctagcaaagaccatctccagtggtgcttgacatggtattaagatctatagactggacctatattcatacgtgtttctttcatcttcaactttattttttgcccctttgatccagaaccctcaggacccagttacatacctactcctaccaaaacatattagccagatctttcagcaacttcagtacagtgttcttatcttccttagaatgtggccgggtgcagtggctcatgcctgacatcctagtactttgggaggccgaggttggtggatcaattgagatcaggagtttgagaccagcctgggcaacatggcg

SEQ ID NO: 882901 - DNA, 553 bp, Homo sapiens
cttatttgtccttttagcctcaaatcagccagtccagcttccaagctcaatgctgctaagtgaatgaccatacacagagcagagaactaccaagctaagcctaataaagatgagatatttcagaaataataaactatgagtgttttaagccactatgattggggatggttttttacatagcaatgaatactgaaatagaaatgaagacagtcaccaaaatcttcagagagatgatacattaaaattaaatattaaagaacacattggcattgtctcagcaggcaaggggaacaaaacagagtgaatactatgttcacaaggcatataggcaagaatgaacactgatatggtttggctttatgtcctcacccaaatctcttctcaaaktgtgatcaccaggtgtctaggaagggcccttgtcagaggtgattggaacatgcagacagtttcccccatgctgttctcatgataatgaatgagttctcacaagatctgatggttttatacaggggtcttccccctttgccctggtcggagctgattggaacatgcg

SEQ ID NO: 882902 - DNA, 615 bp, Homo sapiens
tgggtggtaataacatgtgtatgtcattttgtgaaagctcaaccagctgtacacttaggattcacatacttttcagtttgtaggttatacttgaatacatgcatttgtttaaaaaggaaatatttaccagtgaacgaacacagtcctaccyttaggagctttcagcccagagagagatgtagacaaggcaagagtgaaataaattctgatgaaagtttcagtacaaatgcaatagaaatactcgcagcctgtgctggggtgtagggaggattagaagaataaaattccccgaaaaagttaatgacaaaaatctaagacttgaaaaatgagtagaaacagagaagtgaacaatgtgttctatcagagcaaacagcatgcacaagactaaggaaaaaaataaaaagtaaaaagtaagagaaagcatgacccatttaaggaacaaaaagttgttccatttggctgactctcagagtggaaggtgtgaagtgtgaaaagagaaagcgggagaaatggacaacagctagtaaatggggagctttgaaagaaagaagctggaaagcattgtaggcatgattacaacttaattggaaatcaaatattatatcttaaggtgtt

SEQ ID NO: 882903 - DNA, 615 bp, Homo sapiens
tgggtggtaataacatgtgtatgtcattttgtgaaagctcaaccagctgtacacttaggattcacatacttttcagtttgtaggttatacttgaatacatgcatttgtttaaaaaggaaatatttaccagtgaacgaacacagtcctacccttaggagctttcagcccagagagagatgtagacaaggcaagagtgaaataaattctgatgaaagtttcagtacaaatgcaatagaaatactcgcagcytgtgctggggtgtagggaggattagaagaataaaattccccgaaaaagttaatgacaaaaatctaagacttgaaaaatgagtagaaacagagaagtgaacaatgtgttctatcagagcaaacagcatgcacaagactaaggaaaaaaataaaaagtaaaaagtaagagaaagcatgacccatttaaggaacaaaaagttgttccatttggctgactctcagagtggaaggtgtgaagtgtgaaaagagaaagcgggagaaatggacaacagctagtaaatggggagctttgaaagaaagaagctggaaagcattgtaggcatgattacaacttaattggaaatcaaatattatatcttaaggtgtt

SEQ ID NO: 882904 - DNA, 615 bp, Homo sapiens
tgggtggtaataacatgtgtatgtcattttgtgaaagctcaaccagctgtacacttaggattcacatacttttcagtttgtaggttatacttgaatacatgcatttgtttaaaaaggaaatatttaccagtgaacgaacacagtcctacccttaggagctttcagcccagagagagatgtagacaaggcaagagtgaaataaattctgatgaaagtttcagtacaaatgcaatagaaatactcgcagcctgtgmtggggtgtagggaggattagaagaataaaattccccgaaaaagttaatgacaaaaatctaagacttgaaaaatgagtagaaacagagaagtgaacaatgtgttctatcagagcaaacagcatgcacaagactaaggaaaaaaataaaaagtaaaaagtaagagaaagcatgacccatttaaggaacaaaaagttgttccatttggctgactctcagagtggaaggtgtgaagtgtgaaaagagaaagcgggagaaatggacaacagctagtaaatggggagctttgaaagaaagaagctggaaagcattgtaggcatgattacaacttaattggaaatcaaatattatatcttaaggtgtt

SEQ ID NO: 882905 - DNA, 625 bp, Homo sapiens
ataaatgtcgaatatataattttataaaaggatagcctaattaattttcagtagcaggaagtaatttttcataaattaggatgttattattctgaaaaatctctgtaagatatctgaatacctaaataaatgcacattgagttataataatggccaactatcacctagcattaatatgttctggacactatgctaagtgatttatatattttaaatcattcacaaaacaacactagggactaggagctattactctcccgtcttatagatgagaaaagtgagactcatagagtttaagtaaattgccgaaagtaacacagttaatatttgaggaarctagggttcaaattcagaccatcttgccacagaattcatgcctataatcatacaaaaactttttaaacacaatttattttcaacggtacccattgacagaaatagacaaggaaattaatctctctgtataaaaagcatacttgtcataataattaaaatcatgaaacattttattatttatggtgttaaagatgttagaaaaatagatattggagaaatattggatttaaagaaaagtcaaatcaatcgacacaaatgtttaagcagaatatgtgtatatacatggtta

SEQ ID NO: 882906 - DNA, 625 bp, Homo sapiens
ataaatgtcgaatatataattttataaaaggatagcctaattaattttcagtagcaggaagtaatttttcataaattaggatgttattattctgaaaaatctctgtaagatatctgaatacctaaataaatgcacattgagttataataatggccaactatcacctagcattaatatgttctggacactatgctaagtgatttatatattttaaatcattcacaaaacaacactagggactaggagctattactctcccgtcttatagatgagaaaagtgagactcatagagtttaagtaaattgccgaaagtaacacagttaatatttgaggaagctagggttcaaattcagaccatcttgccacagaattcatgcctataatcatacaaaaactttttaaacacaatttattttcaacrgtacccattgacagaaatagacaaggaaattaatctctctgtataaaaagcatacttgtcataataattaaaatcatgaaacattttattatttatggtgttaaagatgttagaaaaatagatattggagaaatattggatttaaagaaaagtcaaatcaatcgacacaaatgtttaagcagaatatgtgtatatacatggtta

SEQ ID NO: 882907 - DNA, 568 bp, Homo sapiens
ttcactttgattttagagagataaaagaactatatacagtttcatacgtctacaataaattctatagcattgccattactaaacatgaaactattaattttacaaataaatgttttatgaatatgtaatatatgcatgtaagtagacacacgtataagagattatgatataccatcatgaacagaaaccaaaacggagaaaaaaaacagattaagacatagatatcaacttastctctattccttctccttgctccttgctccagaatgtattctgatatgtaaattacacattttattgatcattttactgaatactgcacatcctcaccatacaccatccactttccaataacatttaatcctttctaaaattgtaagtatacaattgtactttctttggattttcataacaaatataccatagactgttaattttattgaagtttccttaatggaatgagtcatttttgtcttgtgcttttgaggttacctttgctttgacttccaacaatttgatcatatagtgttgagctgtggaaatctttaagtttattctatttgtagtt

SEQ ID NO: 882908 - DNA, 670 bp, Homo sapiens
acagtcttacatccacacacatagtcattgtacttctcactttttaaaaaaattcttcctttaatttctttaacttcaccaccacattattacatgctcaggaagcaatgtagctactgagctcaggccatttctctgtccaggtcttatagacaatagggtatcatgctcaaggttctacccagtgggaggaaacttcatttcccacacagcaaaccctgatgctagttattatgctgcagcagttatgttcctgatcatactaggcccatttcttccaggaaactcttcamaaggctaaagatgtaagtcataggtaggacgacactatagcaaaatggacagatgcgactaagttcttgcacaactagtgctttcaaggcctgctatggcctggtatagttgccactgagttgataggcccctgtatttttgtgagatttgcctttcccccctgctgtgcatttgtctttccaagggaaaagcagaatgcttctgatgttctctgctgtttgagtagagacaaaaagttcagccagactgctatctgtgtaccaggaactaggtgctctgtttatttgctcccatgaagagaccacatctggaaactacagctgctataagagcaaccatctgattaagcttccagcaattcattatcattctcaaa

SEQ ID NO: 882909 - DNA, 607 bp, Homo sapiens
aaattaaaatactttttcatctattctctacttagtcattcataatgaaatttttagagacaaaataatctatctttggtttggattccagaagagagattagtgttattgctacctttgtgccaaaataaagcttcaggatgataaagcagaaatttatgccaaggaaattaatgtgttactttcagttccaattcttactttaagttttatagcatcccatttttctaaagtttcccttcctgtactaaagagtgctatcttgctactcagcagagaaattcagaaattatttctatcaacaaaatattcattaggctcaagtgttcatttttaatataggccatacttgcctaaaaactttgatttatgaaatcaattaaagggttagacaattataaagagcaataggtatttctttagagctatgcattatawacactgtactcaccagtgattttttgttaaacagcacttttatagttatcattaattgctttaaaacttcctcaaaaataagtgaaagaataaattctaaattaagcagaataaaagcaggctttcactgacatatttttatacagataattgaattgaccttgctcac

SEQ ID NO: 882910 - DNA, 579 bp, Homo sapiens
taaggaataatctcctgagatctcccaagaatggcaaactcagtttgactgaagttctagcctatggatatagaataggatgatgtgggcagctataaaatgcaagttacaaagaagctgtttcttatgattctgagcttacactcaaatatcttcatcctggcaagatctgctacattacataacattaatcagtattgattcttggacctgagtaatcaacagttactcatctttaattgaaaattttctccttaaatttttcttattttttatccttattaattttggacacttcatctgcctcagtgaaatatatacttttcaaaaccaatttgggccatgaccaagcaaatatggatttcattatggaaactaaatatatatttctctcatttttcaaggagtgtcacacagtaatttcattaatgcyctttaccatggatgagaaactttcttatacactcacaagtacagacatcagcaaaaaaaaaaaaaaatgttgtaaatggaaatagattgtcatactgaaaatgcagctactggcttcaacacttacctttcttttttctagtattg

SEQ ID NO: 882911 - DNA, 607 bp, Homo sapiens
ggtcaataggtgcagcaaaccaccatggcacatgtatatctatacaacaaacctgcacattctgcacatgcatcctggaacttaaagtaaaataaaataaaataaaaacaataagaactcaaacaatccaataaaaaatggtcaaatggcctgaacatacacctcatcaaaaaagacatacaaatggcaaataaccatatgaaaagatgtgcaacatcatttttcattaaataattgcaaattaaacaaagagataccactatacacctattagagtgactaaaatccaaaaatttgacaataacaaatactggcaatgaagcacagcaaaagaaactctcattcatttctggtgggaatgcaagatggtacagccacttyggaagacagtttggcacattcttacaaagctaaacatagtcttaccatatgatcaggctcctagttatttacccaattcacttgaaaacttatgtgcacaaaaatacctgtactcaaatgtttataacagctttacttataactacccaaagtggaaccaaccaagatgtttttcaataagtgaatggataagcaaactaggacatccaaatagtggaacaggatt

SEQ ID NO: 882912 - DNA, 618 bp, Homo sapiens
atccataaagttgttgttacaaatagtactctctttgatgaagaacactgtacttgacaggttaatgatattaaattttttaataacttcctatatttaaataaataatgagaagatgcaattcatttgtttatttttagtccttcaaccctctacaggcagttaatatagaggaagaaattaaggcaaactcatttctgcctcaggaactagagttgagctcctctcccagtgtcraatgtttatttgaatttccacacagaatcaagtgccaattatattaaaataatctagacaccttcaaaatctaaagccccattcatgggataagttggaatccaaaatttatggaaatagtgatttcataggtgtctgtagtaacttgttcccttggctaatgtgcccattgaactaaacaacactgatgcaaaattttacgggaaaattatattaggtagccataggtggaaacaacatctgacttttcagctagtttctcttaaataaagagcattaagtgtcatgaagtaaaatctataattagatttatgttccccaaaactaacactccaaagtttagaaacaggcatacctggttatttcaatttataatttttt

SEQ ID NO: 882913 - DNA, 715 bp, Homo sapiens
gcacaggcaaagatttaatgacaaagacaccaaaagcaattgcaacaaaagcaaaaattgacaaatgggatctaattaaagtacggagcatttgcacagcaaaactatcaacagagtaaacagacaacctacagaatatgagaaaatttttgcaaactatgcatctgacaatggtctaatactcagcatctataaggaatttaaacagatttccaagaaataaacaaacaaaaccattaaaaagtgggtgaaaatatatgaacagacacttctcaaaagaagacatacctgcagacaacagtcagatgaaaaaaatctcaacatcactgatcattagagaaatgcaaattaaaaccacaatgagataccagctcacacctgtcagaatggctattactattataaaaagtcaaaaaataatagatgctggtaaggttgtggagaaaaaggaacacttatactctgctggtggaagtgtaaattagttcaaccattgtagaagacagtgtggtgattcctcaragacctaaagctggagataccattcaacccaacaatcccattactggatatatatccaaaggaatagaaatctttttattataaagacacatgcatgtgtatgttcattgcagcactattcactatagcaaagacatggaatcaacctaaatacccaccaatgataggctggataaagaaaatgtggtactta

SEQ ID NO: 882914 - DNA, 591 bp, Homo sapiens
aaaaataatagatgctggtaaggttgtggagaaaaaggaacacttatactctgctggtggaagtgtaaattagttcaaccattgtagaagacagtgtggtgattcctcaaagacctaaagctggarataccattcaacccaacaatcccattactggatatatatccaaaggaatagaaatctttttattataaagacacatgcatgtgtatgttcattgcagcactattcactatagcaaagacatggaatcaacctaaatacccaccaatgataggctggataaagaaaatgtggtacttatataccatgaaatactatgcagccataaaaaataataagatcgtgtcttttacagggatgtggatggagctggaggccactatctttagcaaactaacacaggaatagaaaaccaaatacagcatgttttcacttataagtgtgggctaaattatgagaatacatggacacatagagggaaacaatacacattggggcctatcaaagagcagaggttaggaggaggtagaggatcgggaaaaataagtaatggatactagacttaatacgtgggtgatgaaataatct

SEQ ID NO: 882915 - DNA, 577 bp, Homo sapiens
gatcaaggtactggctgattcagtgcctggtgagaacccccttcttagttcatagatggctgtcttcttactgtgtcctcacatagaagacagagggagggagcccaggcacagtggctcacgcctgtaatcccagcactttgggaggccaaggcaggtggatcacttgaggtcaggagttcgagaccagcctggccaacatggtgaaaccccatctctattaaaaatacaaaaattagctgggtgtggtggtgggtgcctgtaatcccagctactgaggaggctggggcaggagaattacttgaactcaggaggtggaggctgcagtgagctgagatcatgtcactgcgatccaggctaggcaacacagtgagactctgtcacraaaaataaaaataaaaaaataaaaagagtgaggtagttttttggggtctctttcataagggcactaatcccatttgtgaaggctgcaccctcatgacctaatcaccgcccaaactcctggtaccatcaccttgggtgttagaatttcaacatataaattttaggggaacacaaacattcagtcattagcttc

SEQ ID NO: 882916 - DNA, 691 bp, Homo sapiens
gcctgcttgttacctctgtgtatgagtgcgagagactggagaccgcactattgtcggaacagatatgttcgtgagccattgtgttagcccacactgttgcttaagcctaaggggtggtaatgagcatgggcggcccacagccttaaagtcttcctgcagtccacaatgtgcatgagggtcactcaaattcagtgtgtaaacactaacacagctgtccagtcttatgcaaccatgcaaacaaatagaccaccaccaccaccaacaaaaaacccatcactctggccagtgagcatgatcttcttgccagtctgggctcctggaactaggacctggaatggggatcagggacaactccataggaacagagctcagagctccttgtgacatctggtcaacctcacccactgagtagaatattgaaaagtgtccccccggaagagaactggggmtcagttcagactcagatgcttcacataaaatgcactgaattctcagatatgggagaagggcttagaaaatgtgaaaatgacacacaaaggcataaaactttgttaatctcagaccagggaaggggcctggtttgcatggacttaagaaaagtagtcttgataataaagctctaatgttaaagggctgatgaacggacataaaccttggtcaatgttaatctctttcaacagtgcttaaaatt

SEQ ID NO: 882917 - DNA, 658 bp, Homo sapiens
aaaagaactagatgtagcatttgatacaaaggtcaccactgctatattgcttacaaattacgaatttaatagcacttctgtcttcctctttacccctaccatccatataggactagtgtgaaagaaagacctgttcttctggcaggttgaatataaaacactggagtttttgtttaaatgaaaatcgtttcatttttcatttctgaaatcaaaccaatggcctctcagtggttcaattaatgcatatgaaaacttgatggaagctgtaacttactactgctgttacgttattctttagraaatatgatattttaaaatacattttcaatttaccacattctatgctaaaatattttaaactaaaattttctatctatcaaagattatagccaatcatcaagtaattaagagaatctgtaatataagtcaacaagtcaagaagatcaaaaagaagaaaaactgtgatccctgctctgtcctatgtagttgtgggttcagtgagaggtatgctttcaaaaaacaatcattaataaattatgaagaaatcaccatttagactgccctctagtgtttgtaaattcaaacccagattggatgtgaagcagtgaagagaccagagaacacataacccatgtcactgagtatccactgctggctc

SEQ ID NO: 882918 - DNA, 658 bp, Homo sapiens
aaaagaactagatgtagcatttgatacaaaggtcaccactgctatattgcttacaaattacgaatttaatagcacttctgtcttcctctttacccctaccatccatataggactagtgtgaaagaaagacctgttcttctggcaggttgaatataaaacactggagtttttgtttaaatgaaaatcgtttcatttttcatttctgaaatcaaaccaatggcctctcagtggttcaattaatgcatatgaaaacttgatggaagctgtaacttactactgctgttacgttattctttaggaaatatgatattttaaaatacattttcaatttaccacattctatgctaaaatattttaaactaaaattttctatctatcaaagattatrgccaatcatcaagtaattaagagaatctgtaatataagtcaacaagtcaagaagatcaaaaagaagaaaaactgtgatccctgctctgtcctatgtagttgtgggttcagtgagaggtatgctttcaaaaaacaatcattaataaattatgaagaaatcaccatttagactgccctctagtgtttgtaaattcaaacccagattggatgtgaagcagtgaagagaccagagaacacataacccatgtcactgagtatccactgctggctc

SEQ ID NO: 882919 - DNA, 607 bp, Homo sapiens
aacaaaaaagtatctagttctcatatttgagacatttttactctcagaaagtcaatgttgtgcctttagtctctgcttttatgatgcaggaatgtggagagtgatgggcaggggtgaagtattcaggtagctacacaattgactcacattaccagaactaagttggaaccataatgttttcaagaggtttttgagttaaggtctgaattgctaccgtttcacctcagcagaactgaacacttacttaattttatgtgtaatttcattaaatagcacttaatacctacaataaactatgttggaaatggctaagcagagagataaatttaaggcagcttatgactttatcattatcaggtacaaaggaagaagactatttctttatatataattgaatttacattttatgcyataacagtcgaaatgagaattgttagtcatttaaagaggcactttaaagattaacttaatgacacatattttgactatttaaagaggcctaaaagaacaaaggggagttttatttggaaaaatctcttacttctttgtagccattatcagaatgtattaatggggctttgtgctggataaataggtttgtgtgggt

SEQ ID NO: 882920 - DNA, 607 bp, Homo sapiens
aacacagacaagtgttcaaatgcaaactttgtcatttttacgtcattgatttttaatatacacgtctattcagctttttcttaattagggatttgggtataactatgctctttaggactttctctgtctacctgcttggcataatatcctgggaccaattgtgaaaaaaatctgtgatggagcattgataaagaaatccctggatgttcagaaacaatttggttgtttctggcttataaaactcaagaactactttaatgagaagtagagggtagaaagtgtggagagcttgtatatgtaccaaaattgtggatagacaaaccaaaaaattgacattttaggcaaagtgacattttggatgaatatwtaaacaagagagttaaagtcatatttaaatgagaagctgaagcagaaaaaaaaaatcaaaacaaaaaaatgaattaaaagcacaaataaagggaagatgctaggactgaaaatcccaagagtaaggtagctaaacctaagtcagaacagtcagaagtacactagaggaaagtaagtgagtgatatggtttggctgtgtccccacccaaatctcatcttgaattgtagctcccacaattcc

SEQ ID NO: 882921 - DNA, 607 bp, Homo sapiens
aacacagacaagtgttcaaatgcaaactttgtcatttttacgtcattgatttttaatatacacgtctattcagctttttcttaattagggatttgggtataactatgctctttaggactttctctgtctacctgcttggcataatatcctgggaccaattgtgaaaaaaatctgtgatggagcattgataaagaaatccctggatgttcagaaacaatttggttgtttctggcttataaaactcaagaactactttaatgagaagtagagggtagaaagtgtggagagcttgtatatgtaccaaaattgtggatagacaaaccaaaaaattgacattttaggcaaagtgacattttggatgaatatataaacaagagagttaaagtcatatttaaatgagaagctgaagcagaaaaaaaaaatcaaaacaaaaaaatgaattaaaakcacaaataaagggaagatgctaggactgaaaatcccaagagtaaggtagctaaacctaagtcagaacagtcagaagtacactagaggaaagtaagtgagtgatatggtttggctgtgtccccacccaaatctcatcttgaattgtagctcccacaattcc

SEQ ID NO: 882922 - DNA, 653 bp, Homo sapiens
tcaaatgaatttaaaatttctttttttaactttttttataatgttaactttttttgtttttttagattcagtgggtacacatgcaagtgtgctatatgggtatatggcatgatgctgaggtttcaggtatgaatgcggtcccgagcagagtacccagtrggtagtttttcaatacttgccccttcctcctctgccccttctagcagtcctcagtgtctgttgctacctctttatgtccatgagtactcagcgtttatctcctacttacaagggagaacatcaggtatttctgttcctgtgttaatttgcttagaacaatggccccaactgaatccatgtctctacaaaggacgtgaatttgatcgtttttatggctaagtagcattccatggtgtctatgtccacattgtctttatccaatccactgttgatgggcacctacattatgtcttttctattgtgaatagtgctgcaatgaacatataagggcatgtgtctttttgatagaatgatttattttcctttaaatatatacccagtaatgggattgttgggtcaaatggtagttttgttttaaattctttgagaaatctccaaacagcattccaaagtggctgaaataatttacagtcccaccaacagtgtataagcat

SEQ ID NO: 882923 - DNA, 594 bp, Homo sapiens
agattgctttatctatttgggctcctctttggttcctataaaatttaaaatagtttttttctaattctgtaaaatatgaccttggaagtttgataggaatagtgttgaatctgtagactgctttaggccatatgtccattttaataacattgacttttctaattcatgagcatagaatatttttccatttatttgtgtactctgtggtgtctttcagcggtgttttgtataatattctccttacagacatctttcaccttcttggttagatgtattcctaggtaactyagttttttgtggctattgtaaataggattgcattcttgatttgactcttagcttgaacaccattggtgtatagaaatgctactgatttttgtactttgcttttatatcctgaaacttttttctcatttgtctgaatcatctaggatttgttttagcagtgtcttgtagtccctttgtagagatccttcacctcctgggttagatgtattcctggatatttgcttacgtttttggtagctattgtaaatgggattgtattcttgatttggctctcatctcgaacattactgatgtatagaaatgcta

SEQ ID NO: 882924 - DNA, 648 bp, Homo sapiens
tgattatatcatggctacctactaaaatactaaaggaccaagtgttgatattaccaatgtactttgcaaagaatttcttgaaaaaagacatggagagagatggcaaagtgttaacaactggtgaattgttaacataagtaaagtttctacaggtatttataatattattcttttaattttctattagttttattttttaaaaatatatatatrggggaaaattctaaagttaaatttaacccaagtcctaatctaatgtctgcaaatctattaataagatctgtgttcatgaactttaactgtgttttgaattccgattacagccttctctataccaagccttttctttctagcattacaagcaaagtggtttttaagaaaaaacacataaagataccacatttgttttaactatgtttctatgactccgatccaggtcctttttttaacagttattttcaccctgacgaattcctacaactgtcaaaatgaaatctcaaccttattttcactaaatgttttctttttatatctcttatgtttcagaagactacttccattaactgagacttcttccattaactgaactgaaagaggagacttgaactactctctctctatatatatatacacacatatatacgtgtg

SEQ ID NO: 882925 - DNA, 648 bp, Homo sapiens
tgattatatcatggctacctactaaaatactaaaggaccaagtgttgatattaccaatgtactttgcaaagaatttcttgaaaaaagacatggagagagatggcaaagtgttaacaactggtgaattgttaacataagtaaagtttctacaggtatttataatattattcttttaattttctattagttttattttttaaaaatatatatatgggggaaaattctaaagttaaatttaacccaagtcctaatctaatgtctgcaaatctattaataagatctgtgttcatgaactttaactgtgttttgaattcygattacagccttctctataccaagccttttctttctagcattacaagcaaagtggtttttaagaaaaaacacataaagataccacatttgttttaactatgtttctatgactccgatccaggtcctttttttaacagttattttcaccctgacgaattcctacaactgtcaaaatgaaatctcaaccttattttcactaaatgttttctttttatatctcttatgtttcagaagactacttccattaactgagacttcttccattaactgaactgaaagaggagacttgaactactctctctctatatatatatacacacatatatacgtgtg

SEQ ID NO: 882926 - DNA, 564 bp, Homo sapiens
tcactctggtctgtaatcacagtattccctcacaatggccaacacatgagaattttaaaccaataatgagaaatggaaccataagaaatagagaacaatagaaatatgtagcaaaaccaaagttacttaacatacattagcacaatcaatttaattagaaaaggaaaatattatagcataaatattattctaatgaagaaatttgcataggaatgaaattttgatgaagctccttaatttaacatgagagaaaatgatatgaatgaaataaataggcaaatactcttgtgtagcaggttgggaagagctaagttctgttgcctgtgagatagatctgtattataggccatttttgttatatccaagctttactggacatattcactgtagtttggggaatatgaaagaacactggactsaggttctgacctctaacttgttataagatctataacaaattatttcaagaaatgtgttgacctgaggtatctcacttataaaaatgagggcggtagctagataagttagtatcacatattgttttgttaccgaattccttttttc

SEQ ID NO: 882927 - DNA, 583 bp, Homo sapiens
aggttgggaagagctaagttctgttgcctgtgagatagatctgtattataggccatttttgttatatccaagctttactggacatattcactgtagtttggggaatatgaaagaacactggactcaggttctgacctctaacttgttataagatctataacaaattatttcaagaaatgtgttgacctgaggtatctcacttataaaaatgagggcggtagctagataagttagtatcacatattgttttgttaccgaattccttttttcaagtgaattcttaggttgatttcaaataagtaatgctaatgaaattkcagcagaataaatatgaaaaactaaaaacttccttctcctctgagctcttagatttatattttagagcatgtacagccttaaaacatgggaaaatgatactgaactgaaatatattttagcatttttcatactgtattcctaatgtcataactcttgaaagtgatgtttaaaaaagaattctctggttaataatatcattaaataatgaataccgcatctccctttttgagcgttacaatacatacatcaagttaagaaatcaatc

SEQ ID NO: 882928 - DNA, 632 bp, Homo sapiens
gtttcaaatacagaaagaaggcaatataagagatagaaattacacagcaaatcctaccatatcttttcttacttacattgctttcctatgttaaccagccactcatgttgaaaatgataatatagaaggaaagggaaagaaaggtgatatggttggctgtgtccccacccaaatctcaagtcaaattatatctcccagaactcccacgtgttgtgggagggacccaggaggaggtcattgaacmatgggggccagtctttccatcctagtttcatgacagtgaataagtctcacgagatccaatgggtttatcaggtgtttccacttttgcttcttcctcattttctcttgccgccaccatgtaagaagtgcctttcacctcctgccatgattctgaagcctcctcagccatgtggaactgtaagtccaattaaacctctttttgttcccagtctcgggtatgtctttatcagcaagtgaaaatggactaattcaatagagcaaccagggttctttttcctttcagtccttccttaattatcagtaggctgaaagtagaaagtattagaatgtgtgcatatcaaaaagtgatatgaatacagttgcattagtttagggtagtgtttgcactg

SEQ ID NO: 882929 - DNA, 632 bp, Homo sapiens
gtttcaaatacagaaagaaggcaatataagagatagaaattacacagcaaatcctaccatatcttttcttacttacattgctttcctatgttaaccagccactcatgttgaaaatgataatatagaaggaaagggaaagaaaggtgatatggttggctgtgtccccacccaaatctcaagtcaaattatatctcccagaactcccacgtgttgtgggagggacccaggaggaggtcattgaacaatgggggccagtctttccatcctagtttcatgacagtgaataagtctcacgagatccaatgggtttatcaggtgtttccacttttgcttcttcctcattttctcttgccgccaccatgtaagaagtgcctttcacctcctgccatgattctgaagcctcctcagccatgtggaactgtaagtccaattaaacctctttttgttcccagtctygggtatgtctttatcagcaagtgaaaatggactaattcaatagagcaaccagggttctttttcctttcagtccttccttaattatcagtaggctgaaagtagaaagtattagaatgtgtgcatatcaaaaagtgatatgaatacagttgcattagtttagggtagtgtttgcactg

SEQ ID NO: 882930 - DNA, 617 bp, Homo sapiens
cttggctctatgagaagaacaaactggatccctccattcaatgatcaaaaagttcaccagaaatggtcccatgggcatgtagcatctgcactcagtaatgggaactgatagtgaaattgtagtctacatggcacatggtgtgctattaacagttcctggccaggtgttgtggctcacgcctgtaatcccagcactttgggaagctgaggggggtggatcacttgaggtcaggagttcaagaccagcctgaccaacatggtgaaaccccatctctactaaaaataaaaaaaattaaccgggcgtggtggcacacgcctgtaatcccagctactcaggaggctgaggcaggagaattgcctgggaggcagagattgcagtgagctgagattgtgctgstgcactccagcctgggcaacagagtgagactccattttaaaaaaacaaaaacaaaaacaaaaaaaacccaaaaacttcccttggcaaaaggtgtgccactgcatggtttggttgcttaaaagtcatctcctaaatccaaccctgactgaaagaaatagtgtaagatggtggctgtgccaatggcagagctctgtggtaagacgtatacaaaagacatagtg

SEQ ID NO: 882931 - DNA, 617 bp, Homo sapiens
cttggctctatgagaagaacaaactggatccctccattcaatgatcaaaaagttcaccagaaatggtcccatgggcatgtagcatctgcactcagtaatgggaactgatagtgaaattgtagtctacatggcacatggtgtgctattaacagttcctggccaggtgttgtggctcacgcctgtaatcccagcactttgggaagctgaggggggtggatcacttgaggtcaggagttcaagaccagcctgaccaacatggtgaaaccccatctctactaaaaataaaaaaaattaaccgggcgtggtggcacacgcctgtaatcccagctactcaggaggctgaggcaggagaattgcctgggaggcagagattgcagtgagctgagattgtgctggtgcactccagcctgggcaacagagtgagactccatyttaaaaaaacaaaaacaaaaacaaaaaaaacccaaaaacttcccttggcaaaaggtgtgccactgcatggtttggttgcttaaaagtcatctcctaaatccaaccctgactgaaagaaatagtgtaagatggtggctgtgccaatggcagagctctgtggtaagacgtatacaaaagacatagtg

SEQ ID NO: 882932 - DNA, 578 bp, Homo sapiens
tgcttgtatgaattagcagtaaactttttcacttgttcacttgctacagctttaagcaatacatgtttaatcagaaacaggctaattgtttttcagatttgtgttgtggtctcttggcttcctgaggaggcataaataaaaccactaagccacatcataaaatactttatttgctttgaggtattggttattattattatgagtgatatacattcagaagaatggacacgctaaaaracaactgcgtcttatgtttcttaactgagtgtaaatttctggttgtcctacagaacaataaacttttgaagactgaatttatgcagtttcaaggcaaaaattagacatcaaagttgagttgaatggtagagaggtcaagtagtggagacgtgggagtattattctggggtgattttgggctgtctttctggatatatatgaattgagtcattagctgttatttgaacttgaaaccataatctgaatgcatggtacttaggattgatgtgacctcaatttccttttaacagtgttgaaactggggtctctggtcatcagactttgtcatcttctatctatat

SEQ ID NO: 882933 - DNA, 578 bp, Homo sapiens
tgcttgtatgaattagcagtaaactttttcacttgttcacttgctacagctttaagcaatacatgtttaatcagaaacaggctaattgtttttcagatttgtgttgtggtctcttggcttcctgaggaggcataaataaaaccactaagccacatcataaaatactttatttgctttgaggtattggttattattattatgagtgatatacattcagaagaatggacacgctaaaaaacaactgcgtcttatgtttcttaactgagtgtaaatttctggttgtcctacagaacaataaacttttgaagactgaatttatgcagtttcaaggcaaaaattagacatcaaagttgagttgaatggtagagaggtcaagtagtggagacgtgggagtattattctggggtgattttgggctgtctttctggatatatrtgaattgagtcattagctgttatttgaacttgaaaccataatctgaatgcatggtacttaggattgatgtgacctcaatttccttttaacagtgttgaaactggggtctctggtcatcagactttgtcatcttctatctatat

SEQ ID NO: 882934 - DNA, 649 bp, Homo sapiens
gttaaccacaaggttaagcctcgataaacttcccagctattagtgcacatttctataggtgtcacctccttggtgatcaccatccatactgctttaagttcagcccattggctactttgcccacacccggtttcaaaccatatggtgtcagtactaggttggattgcaacagtggtccaggcagcagtaccacctcagctaracccatttgtgtaccatgccccattgggaatggagggatgtccttctttaaatggtaaaggctcaaattctaggggtgcctcaggccccatggccttatcttgcataggactgcagctcccaagacttctaagggacttgtgctcagtgtactctgctgctccaagtaggcactccactttgccaaagtggatgtctcccccatcccagtccagggggtcattatccatgaatgcactcatcctgctattgggtaagttgtctgcatgaagattgtaaccaatcctgccaagctctcatgaacctgaagggcagcacatgcagttactaactgctgctctatcaaggaataccagagctcagctccctttcatagttgggatcaaaagcctactggtgttctcaagcactccgtgtgctgccacaggccccagctgaaaccatctgt

SEQ ID NO: 882935 - DNA, 520 bp, Homo sapiens
cccacccagagaatgaggatttattttaaatgccaaagatttcacagatgaacacatactagttatttactttttatatctgtgactaggaaaatacattttcacctcaagacactttgcaagcattattaacttccgtttgttaactttgagcttccaagggcctatatttcattgaaccacttgcaattacccatagctactcaactccatttctccatttctgagaggacaggaaaggagaggagaagcatgggagaagcgaggcaaggtgagaaaagggagaaaaggagaagagaggagaggagattgagctgctctttaaaaaacagctatagcattatgcccttaaagataatttattctattaatctctatsttttctttcacataagttttatatcacatataacaacaaaaaatgaaattcagtaaataattgggtgattcttatatgtggcttcctgtacctgtacctatgtacctaaccaagtatgaataattctgacattatcacaac

SEQ ID NO: 882936 - DNA, 624 bp, Homo sapiens
cccttggcttaaattattatcatgtccagttgtcttaaagtttatttctttagatctaatttatcttctaggagccatactgcctatttgtgtcttttarataactcacaactcctgcaacttaacatatgttacaaaatgaactaatgatctttcttataaacgtaattttccactattttctgatttggtaaaaattttcactattcattaaggtacacaagccagaaacttagacgtcatccttgacatcttaatttcttcactcctcatataaaatgatattttctttttcctgtatcatcaatatttcctctcttctgggcattttcttctatatacaaacattctggaatcttccatgtttttaaaaaaagtccttccttggttctacttttctgtccagttattgggcacatttctcagcttttaattttttttgaaaaaaagtcttgacagtggttatattttctcaccaactctgtttctttttctccctttctctcaaccctacattagtttggttggtttttttttctccaaacttctacccaaattgtcctgagtaaggcctgatgacctccatgttgtcaaatccaatagtcagttttcaatcttgatctt

SEQ ID NO: 882937 - DNA, 624 bp, Homo sapiens
cccttggcttaaattattatcatgtccagttgtcttaaagtttatttctttagatctaatttatcttctaggagccatactgcctatttgtgtcttttaaataactcacaactcctgcaacttaacatatgttacaaaatgaactaatgatctttcttataaacgtaattttccactattttctgatttggtaaarattttcactattcattaaggtacacaagccagaaacttagacgtcatccttgacatcttaatttcttcactcctcatataaaatgatattttctttttcctgtatcatcaatatttcctctcttctgggcattttcttctatatacaaacattctggaatcttccatgtttttaaaaaaagtccttccttggttctacttttctgtccagttattgggcacatttctcagcttttaattttttttgaaaaaaagtcttgacagtggttatattttctcaccaactctgtttctttttctccctttctctcaaccctacattagtttggttggtttttttttctccaaacttctacccaaattgtcctgagtaaggcctgatgacctccatgttgtcaaatccaatagtcagttttcaatcttgatctt

SEQ ID NO: 882938 - DNA, 576 bp, Homo sapiens
tatttcactctgtcagtgttttgaaaggaaatacctgttacagattggaaaggtgctgaaaaataggaaagactcttaattgggacactaatttattcaataacagtttgttgccatccaatgaactatgacaacaatgcctcggttacatctttggacatttattgataaaggtaactatggcaacaaaagaagaggtcaggagaatcctagccagcgtgttcctgactgctttgtttagatcagcgttcgcacttcagtcaggcctctgttagggttatgaggcatcttccccaagtgacggcatagttgcttcagataatgctcagatgagttctgacggcgtggaacagtggtcttaacactctcatyttctgtaagaatacaaatttctacttttctagaaagatatttagcaccattgtcaagatttcttaaaatgttttttatacccaagcctttcatctttatatctaagcatctatcctaagaaaagaattagagatatgtgaaagatttatgtgtgaatattcacaggcattttttaaaataaaaataaaaatgtgctaaagacat

SEQ ID NO: 882939 - DNA, 586 bp, Homo sapiens
attaggaggatgcagggaagagcaattaccagagtccacgagagagaccacatgtgaaatcaagtccacagagccccaggcaggctgccactgagagctctgaatccagatttcagcccggtgggggcagagacctgagggagagaagtgggaagtggtgaaggaggacacggcaacaaacagggataggcttgagaaatctggacactatcatcatcaacaggatgtggctgtgtgatctgaatgggcaggcctgttggctgaatgcatcagcggcatgttggacaccttatgctcattcaagattccyctccctctgtcaggaagagtatggctggctccctgcatcattctgggtgagctacctctcttgaccactccagtggtcctgtgcacccttgccagcatcccagggctgggacctgtctttatgcctacttgagctgatgaattatcccctggggaacctccatagaggttgggctatgtgtgtgggttgctgactgatgatcaacagctgagactcaccaggaatgccaatgatcagtggaaggtggtagtggggctgcatggaggggaaattgga

SEQ ID NO: 882940 - DNA, 610 bp, Homo sapiens
cctgtgatcacaagggtctgtttattgaaatgaaataggtgaatggttggaactcttgactaagagttacttaaaatatactctcctcagctttgttaaacagttttatgtggtagatacaaaacttcaaagggaggaaaactctgaaatatcattaatctactctaatgatttatgaatttaagtagacttcttataatattttcatttgggtggagtataaatttaaataytaaaaataattatgcatatttattttatctttatataatacaaattctatggctagtttagaagaatttactgaatgaataatattattaattttatctgtcagttatacacatgaatatttattagcatgaataattatttttattttaaacaatggtgactcatagaaactacctgctttgatactagtagaagccacacaagtgagttacatttttctgaatactaatattatgtcaactgaatatcaaattgttgacaaaatatttctaagtggaaaacaaaatatgaagacaaaggagtgaaatacgctagaaaatctaggacaagaacttgagtgtcttgattcctagctcagacatatatataaatgtga

SEQ ID NO: 882941 - DNA, 623 bp, Homo sapiens
ggagtaaagcatttaatgtgattttatgaatttcagttatgtcaacatttctaaatacgttctcagaataaatgtatgtagtgttttgaactgtaaaaatcatgtatatttacagggataactttctgcaaggattttagayatgacattataggaaggcttacataacgatgtaagtgggtcatatttaaagacttaatactcaaaaggtagattacctatgaagatttaagaaaatttgaattaaacatttctaattgaaaaaattccatggggacattaatcacaatcagtgcataatgaagaatattggtatatattaaaagcataattgttgacttttaaaagagttttaagttcctctgaacattgatgttcactaaactggagttaattagttagctttctctatatatagattagttaatagttgattagtcaagtattataaatattcccagaagtggtgctgctgtcttacagtgtcttcaagaaatgtgaagtcaagtcaggttatggcttatgtttttaagtagtaaattatgtatcagttctaaaatagagttcagcttaattgttaaatagtataaatcagcaaattgattccttcaatgcatatgtgc

SEQ ID NO: 882942 - DNA, 610 bp, Homo sapiens
tgcacatcttacctcaaaaaaaaaaaaaagaaaagaaacttattaaaagataaagtctgagttaaaagtgggttcacactaatgatttttagtttggtacttctattgttaaaagagggattgcttatatgggtgtgtttatgtgtaaaaagctagttaaggtcgaacctttatttattttttttttgagacagagtctcactctgtcacccaggctgatgtgcagtggcacaatcacaactcactgtagcctcaaactcgtagaatcaagggatcctgctatgtcaacatmccaagtagctggaactacaggcatgcaccaccgcgcctgattaattaaaaaaaaaatttaataaagatgtggtctcactatgctgcccaggctgctctcaaactcctgacctcaaatgatcctcctgccttgtcattccaaagtgatgggattacacaggcttaagccattgtgctcagccaagattttaccttcaatgagcacacattttataccacaaaaaataataataaataacaaagtctgtgtgagaaatgagttgaagtatagataacacaaaattggcatgttattagttgttgttgagcctgggtaaca

SEQ ID NO: 882943 - DNA, 431 bp, Homo sapiens
ctggacatcaacttagtacacatagtccaatttatccgaaccttacagaactcactgtttccatttacataacttacataactgtcaagctgaaatcactctcaaatttttttaattcaaaattttaatttaatttaatmatatttatttattcattaattaatttattttgaaaataattttaacttgtattttacattcaggggtacatgtgccagtttgttacatgggtatatctcataatgctgagttttggggtatgaatgatcccatcatccagatgctgatttggtatgatttgactctgtgtccccacccaaatctcatgttgaattgtaattcccaatgtagggggaatgacatggtgggaggtgattagctcatgagggcagatttcccccttgttgttcttagatggtaagtgagttctc

SEQ ID NO: 882944 - DNA, 619 bp, Homo sapiens
tgtattctgcaaatttactcaagttattacttctaatagtttttttggtggatgtattaggccattctcacattgctataaaaaaaaatcagtgaccggttaatttgtaaaggaaatagatttaattggttcatggttctacaggctgtacagaaagcatagcactggcttctgcttctggggaagcctctggcaactgacaaggtgaaaaataaatccgatgcttgcacatcacatggtaagtgygagggcagagtgtaagtgctacacacttgtagataaccagctctcgtgaaaacttactattgtgggaatggcaccaaaggaaatgatgctaaactcttcatggaaatcctgccctcttgattcaatcacctccccactaggcccacttccaacattgaggattacatttcagtataagattttggtgggaacacacacccaaactatatcattttgccctggccattccaaatctcatatccttctcatatttcaaaatacaatcatgacttcccaataattcccaaagtcttaactcatttcagccttaactcaaaagtcaaaagtctcatctaagacaaagctagtttattcctcctataagcctgtaaaa

SEQ ID NO: 882945 - DNA, 619 bp, Homo sapiens
tgtattctgcaaatttactcaagttattacttctaatagtttttttggtggatgtattaggccattctcacattgctataaaaaaaaatcagtgaccggttaatttgtaaaggaaatagatttaattggttcatggttctacaggctgtacagaaagcatagcactggcttctgcttctggggaagcctctggcaactgacaaggtgaaaaataaatccgatgcttgcacatcacatggtaagtgcgagggcagagtgtaagtgctacacacttgtagataaccagctctcgtgaaaacttactattgtgggaatggcaccaaaggaaatgatgctraactcttcatggaaatcctgccctcttgattcaatcacctccccactaggcccacttccaacattgaggattacatttcagtataagattttggtgggaacacacacccaaactatatcattttgccctggccattccaaatctcatatccttctcatatttcaaaatacaatcatgacttcccaataattcccaaagtcttaactcatttcagccttaactcaaaagtcaaaagtctcatctaagacaaagctagtttattcctcctataagcctgtaaaa

SEQ ID NO: 882946 - DNA, 619 bp, Homo sapiens
tgtattctgcaaatttactcaagttattacttctaatagtttttttggtggatgtattaggccattctcacattgctataaaaaaaaatcagtgaccggttaatttgtaaaggaaatagatttaattggttcatggttctacaggctgtacagaaagcatagcactggcttctgcttctggggaagcctctggcaactgacaaggtgaaaaataaatccgatgcttgcacatcacatggtaagtgcgagggcagagtgtaagtgctacacacttgtagataaccagctctcgtgaaaacttactattgtgggaatggcaccaaaggaaatgatgctaaactcttcatggaaatcctgccctcttgattcaatcacctccccactaggcccacttccaacattgaggattacatttcagtrtaagattttggtgggaacacacacccaaactatatcattttgccctggccattccaaatctcatatccttctcatatttcaaaatacaatcatgacttcccaataattcccaaagtcttaactcatttcagccttaactcaaaagtcaaaagtctcatctaagacaaagctagtttattcctcctataagcctgtaaaa

SEQ ID NO: 882947 - DNA, 579 bp, Homo sapiens
tccacccctgcagcatgcttctgtctgcacaccctggcttgttcacacatcctttgaaacaaaggtggaagatcccaagtctcaactcttgcattttgtaaacccacaggcctaacaccacatggaagctaccaaggcttatggcttgcaccctctgaagcagtgactggagttgtaactggatcaatttgaccwacacctggagctgaagcaatggtcaggatgcagggagccatgttccaaagctacccaaggcagcagatcctgggcctgatcccagaaactattctcttcttttaggcctcaaggcctgtgattgggggctgcctttcagatttctaaaatgccttcaattcctctttcccattgtcttggctatcaacacttgctttttttttaggttatacaaatacctctaacaagtcgttgctccatagcgtgcttgagttcctctcttataaaatctttttattttttaggcacaggactaggctgcaaagtttttaagcttttacactatgcttcccttgtaagtataagttacaacttatatattttttttgctagatcatgtgagca

SEQ ID NO: 882948 - DNA, 574 bp, Homo sapiens
agctatttctgcaaagaactcaaacaaatttacaagaaaaaaacaaacaaccccagtgggtgaaggatatgaacagacacttctcaaaagaagacatttatgcagccaacagacacatgaaaaaatgctcatcatcactgaccatcagagaaatgcaaatcaaaaccacaatgagataccatctcacaccagttagaatggtgatcattaaaaagtcaggaaacaacaggtgctggagaggatgtggagaaataggaacacttttacattgttggtgggactgtaaactagttcaaccactgtggaagacagtgtggckattcctcaaggatctagaactagaaatagcatttgacccagccatcccattactgggtatatatccaaaggattataaatcatgctgctataaaaaaatggaggctttctaaatagatcttcattaatgttgaggttttaagtcttggtctcagccaaaaggaattcctcgcatacccaggagggatgaaacacttgcattgtcgcgttagatattcttagagagaaagaggaccacgcgtaatggaaaattgct

SEQ ID NO: 882949 - DNA, 614 bp, Homo sapiens
tcgactagattggattgaaggatgcctagatggctggtggagtattgtttctgggtgtgtctgtgagggtgttgccagaagagactgacatttgagtcagtggactggagagaaagatccaccttcagtgtgggtgggtaccatccgatcggctgccagtgcagctagaccaaatgcaggtggaagaaggtgcgataagctggcttgctgtgtcttctggctgccttctttctcccatgctggatgcctcctcccatccctcctgcccttggacatcagattccaggttcttcagyctttggaactcaggaacttgcaacagtggctcagactttggccacagtctgaagcctgcactgtcagcttttctggtttgagcctttcagactgagccactaccagcttctctctctctcaatttgcagacagcctatcctgggactttgccttgtaatggtgtgagccaactcttcctaatatattcccttatatatatacatacatatatcctacttgttctgtccctctggagaaccctgactaatatacttggacacatgaaaaattattaagaagagatgtctattcttaatgcattaagaatactgtaaaat

SEQ ID NO: 882950 - DNA, 652 bp, Homo sapiens
ctttcctggcacttatccaatggctctaacacccaatctgggcagcctgtccggcttactgtctccatctctccactcttgcttatgtacttcaacacagactctttatttctttacttttatttctgttttctttactttagggaggacctgggagtttaccaggaagctcaaattcttcctgtatagaagctaggaaaatagtgaagattgtgactatccatactcgaataattttatcctataacatctcaacagattttgtctctaagaattctattgtctcaaataaacccagaagttagcactttaacatgggagccttttcaaatggtagagtctcaaggccacatctgactccagagatcatggtgttcctacaacactgagatgatgataggaactacagttgaaaacagatctttctccccacatcaccttgatcaagtcaataaatgttagtatatgccaggtactgggctwggtagtaggaacacagagataagcaagacaagatccttatccctgaagaagtcacagttcagtgtagtatttctaaaattgcattccttagaatgaaagtgacccttgtaaaaataatccatggaccaaataccttttggaatgtggcatgctcaatctccttttggac

SEQ ID NO: 882951 - DNA, 667 bp, Homo sapiens
ccccaaatgagcagaagcattgagggtttcctggatagaattactgatggactgtttgttcaagggtaagttagagtatgttaagtcagagcaaggtattataacttgaaagttgaaacatggagaaaaaaaaaaaggagtattattgatatttggtaccaagaaagggatcagagcgaaatttgtctcgcgtggctgcccaatatcctctggatattcttgctcataataatgtttgctccacatcatgaattcttccttttcaaagggaatttcagaaaactcatatcctttgcagctaaggagcaggcatgcggtctgcyctcctcttctcaggccacacaagacttcactgtggaagtgagcaatgaggaaaaacaggctatgtgtggacattcatttttccagtataggcagtgagaaaggtatccagatttggggatgttaggataaattgcaataaaattaaatccttcgtatcctagatgttacagtcaggaaaacattgtggtatccagtaagtagatggtgacaattgcctcataagcccagttctaagaaaatgttctgcagtcaacagcatgtcaatggctgttttctgaccagaccagttctgcaacatagttttggacattgttcccaaaagcttagcctcaagcttatttct

SEQ ID NO: 882952 - DNA, 644 bp, Homo sapiens
aagaaaagggaaccaggtatgcctgctcccctctttctagatgggtagccattcatcttcagtctgtatccctttcaaatgcatcctgaacctctgggactcctttaaaaggcaccttctttttgcctttcttctcctctgttctctcttcactaataggtaattgtgtctccatactacaaggcactctcctcagatgcatcctccaaactagaaagagttrgtttcccaaaccttaaactggttagcttaggattgggctcaggggaaggggacccagaagcccaacgtgccagcaaaagggtaaagttttttttgccagtcaggcttttggcctccctctacgtgtgcaaactggcaaaaggcctcaggatctttgagctgtccttaccctcccttcatttcgttttgatacatagtttctaataacctggtttgtctgttcttgccttcaggccattaaactctaaacaatcatgcaagcagagcctctgacaatggccctttctgctgtgaacccttagatgggcctctgccgtttccccaaaacagcgccccctctcagcaggaagcagttaaggtcagtcttcatccttatccttaatctaaacggcagctggatgtacctctttagagggaggaat

SEQ ID NO: 882953 - DNA, 644 bp, Homo sapiens
aagaaaagggaaccaggtatgcctgctcccctctttctagatgggtagccattcatcttcagtctgtatccctttcaaatgcatcctgaacctctgggactcctttaaaaggcaccttctttttgcctttcttctcctctgttctctcttcactaataggtaattgtgtctccatactacaaggcactctcctcagatgcatcctccaaactagaaagagttggtttcccaaaccttaaactggttagcttaggattgggctcaggggaaggggacccagaagcccaacgtgccagcaaaagggtaaagktttttttgccagtcaggcttttggcctccctctacgtgtgcaaactggcaaaaggcctcaggatctttgagctgtccttaccctcccttcatttcgttttgatacatagtttctaataacctggtttgtctgttcttgccttcaggccattaaactctaaacaatcatgcaagcagagcctctgacaatggccctttctgctgtgaacccttagatgggcctctgccgtttccccaaaacagcgccccctctcagcaggaagcagttaaggtcagtcttcatccttatccttaatctaaacggcagctggatgtacctctttagagggaggaat

SEQ ID NO: 882954 - DNA, 557 bp, Homo sapiens
tttgggcagtatggccacattaatgaaattgattcttccaatccatgagcatggaatgtttttccatctgtttgtgtcttctatgatttcttttagcagtgttttgtggttccccttgtagatatatttcatctccttggttagatgtattcctaagtattttatatacttctattttttcaggctattgtaaatgagatttccttcttgatttggctcgcaagttgaacattattggtgtacagaaatgctactgatttctrtacattgatttaatgacctgaaactttactgaagttgtttctgagttctaggaggcttttggtggcgtctttgagttttttaggaatagaatcatattgtctgcaaagagagatagtttgatttcttcttttcctattaagatgcattttatttctttctcttgcctgattgctgtggctagcacttccagtactatgttgaataggagtagtaagagtgggcatctttgtcttgttccagttcgcaagggtaatgctttcagtttttgcccattcagtatgatattggctgtg

SEQ ID NO: 882955 - DNA, 703 bp, Homo sapiens
acctgaaactttactgaagttgtttctgagttctaggaggcttttggtggcgtctttgagttttttaggaatagaatcatattgtctgcaaagagagatagtttgatttcttcttttcctattaagatgcattttatttctttctcttgcctgattgctgtggctagcacttccagtactatgttgaataggagtagtaagagtgggcatctttgtcttgttccagttcgcaagggtaatgctttcagtttttgcccattcagtatgatattggctgtggttttatcatagatggctcttattatttagaggtatgttcttcagtgcctactttcttgaagttttttatcatgaagggatgttggattatagcaaaagctttttctacatctagtgagatgattctaaggctttttaaaaatcctatttatgtggtgaatcacatttgtatttgctcatgttggaccaaatttgcatgccagaatgaagcctacttgatcatrgtaaattaaccttttgatgtgctgttgaatttggtttgctggtattatgttcaggatttttgcctctatgttcatcagggatattggcctgttgatttctttttttttattgtgtgtttgtcaggtttggtatcagggtgatgcacagaatgagtttgggaggagttgctcctcttcaattttttggaatagttcagtag

SEQ ID NO: 882956 - DNA, 620 bp, Homo sapiens
ctttttgcagtttctgtttactaccttcttattcattatgagtttattttcctattatttgtggagcatggttaaaatagccactttaaaatctttgttaattcccacatttggctcatcttggaattggtctcagataattgctttttgtcttcagaatgagtcacattttattgggtttccatatagcgtgtaatttggggttgtatgatatgcaagtattgatgttattgtatgmagagcttcaatcctgttatagttttctgaagggtattgatttatttgttttagcaggcaattagttatactcaaatttaaaactatcccctgggtagcagctcgaatctcagttcagttcttttatctttgtgataatttgtgtctgctccatcaagaatatacacatgacatatacctcagaattacatgacgtgatctcacttggaattttatcaagtgcatattcatctacaattcttacttcttcttaatataatgatttactatcatgaaatgttctccttcatctctggtaactctttttgtctgaaagtttagtttgtctcatattaataaattcaagggtcaaccagaaatttgggtagtgtttatatacagat

SEQ ID NO: 882957 - DNA, 620 bp, Homo sapiens
ctttttgcagtttctgtttactaccttcttattcattatgagtttattttcctattatttgtggagcatggttaaaatagccactttaaaatctttgttaattcccacatttggctcatcttggaattggtctcagataattgctttttgtcttcagaatgagtcacattttattgggtttccatatagcgtgtaatttggggttgtatgatatgcaagtattgatgttattgtatgaagagcttcaatcctgttatagttttctgaagggtattgatttatttgttttagcaggcaattakttatactcaaatttaaaactatcccctgggtagcagctcgaatctcagttcagttcttttatctttgtgataatttgtgtctgctccatcaagaatatacacatgacatatacctcagaattacatgacgtgatctcacttggaattttatcaagtgcatattcatctacaattcttacttcttcttaatataatgatttactatcatgaaatgttctccttcatctctggtaactctttttgtctgaaagtttagtttgtctcatattaataaattcaagggtcaaccagaaatttgggtagtgtttatatacagat

SEQ ID NO: 882958 - DNA, 620 bp, Homo sapiens
ctttttgcagtttctgtttactaccttcttattcattatgagtttattttcctattatttgtggagcatggttaaaatagccactttaaaatctttgttaattcccacatttggctcatcttggaattggtctcagataattgctttttgtcttcagaatgagtcacattttattgggtttccatatagcgtgtaatttggggttgtatgatatgcaagtattgatgttattgtatgaagagcttcaatcctgttatagttttctgaagggtattgatttatttgttttagcaggcaattagttatactcaaatttaaaactatcccytgggtagcagctcgaatctcagttcagttcttttatctttgtgataatttgtgtctgctccatcaagaatatacacatgacatatacctcagaattacatgacgtgatctcacttggaattttatcaagtgcatattcatctacaattcttacttcttcttaatataatgatttactatcatgaaatgttctccttcatctctggtaactctttttgtctgaaagtttagtttgtctcatattaataaattcaagggtcaaccagaaatttgggtagtgtttatatacagat

SEQ ID NO: 882959 - DNA, 644 bp, Homo sapiens
ctacctttcagaagactgctacctcttcggagtcctcagtggcaggatgcacagagcttttatagagggtctaagcaggcaggtattcctaggatacctacaccaaggacaagaaattcagatgattatttcagcagtgatccagatggctctaggtacaatttcattaggaacgttcaccatgaatactgagcattgccacacaggtaytgttaaaagcgcagaatgaaggtacatatgtgatttttgcaggcattgtcattaatctgtacattggagactgtggctcaaaagggtgtaagtggttcatacatgatcacacaagaaaaggggcagaaccatgccttaattattcatttctgattcctagtccagggttgtttcagccacatcatctgatcctcctcaagaactggaaagtcctggcactggggctttccattttgcaaaaagatgaggctgacccgtgagtctggtgggaagagtctttctctggttttctggtggtctatgccaagtcacctgtctgaagtgtcctgtgtggccagtttactcactttcccttgaaactctggtgtccacagaatctgaaggaatctgacaagcaaagaaacatgggtttttttggtcccactggcctgagt

SEQ ID NO: 882960 - DNA, 644 bp, Homo sapiens
ctacctttcagaagactgctacctcttcggagtcctcagtggcaggatgcacagagcttttatagagggtctaagcaggcaggtattcctaggatacctacaccaaggacaagaaattcagatgattatttcagcagtgatccagatggctctaggtacaatttcattaggaacgttcaccatgaatactgagcattgccacacaggtactgttaaaagsgcagaatgaaggtacatatgtgatttttgcaggcattgtcattaatctgtacattggagactgtggctcaaaagggtgtaagtggttcatacatgatcacacaagaaaaggggcagaaccatgccttaattattcatttctgattcctagtccagggttgtttcagccacatcatctgatcctcctcaagaactggaaagtcctggcactggggctttccattttgcaaaaagatgaggctgacccgtgagtctggtgggaagagtctttctctggttttctggtggtctatgccaagtcacctgtctgaagtgtcctgtgtggccagtttactcactttcccttgaaactctggtgtccacagaatctgaaggaatctgacaagcaaagaaacatgggtttttttggtcccactggcctgagt

SEQ ID NO: 882961 - DNA, 606 bp, Homo sapiens
tcaatttaaaaaaatatatacaaatggacaaaaatgtcttagaactgagaaggctactaaatattaaaaaaaaatttctgatatttccatacatgaagatgttatttgcagaaattaataggcaggctgtatgtcaggaaagtttctggctctcagggatgggctgaggcctttagatgtgaatcgaactacatctctggttttatgtttggaagaccayagggaattccagtgctccaaggacgctccgagggcctacacaactgtcatcaagcatgttaggacatcctagagagtagttcccaaaacttctaggcttcagaatcttgacaaagtcatgggtgggcatatcctgccctcacggataaccctacagttgagtagaaggatgctggaatgcacagaattgacaccagtgaatctggagttctctgtagtaatgagcaacacaaatatctcaccaacagtcccactgttatccgagtctgccttagtcaatgtaaactcctaatgagaccatgtctagacagtattgatctcccaccagaaaaaaaaaaagaactcagagtgtgacttcttttctagcttagcccaaatgacacccta

SEQ ID NO: 882962 - DNA, 601 bp, Homo sapiens
ttgtgatggtctggaagtgaacatgcagtatctctgagatataggtatgcctgcattttaagtctcagtgtgacattattgttctactatggttattttactgtgttttacttacacttcaagaaattcactagagggttggtttgacatataacacattttttcccatttaagtaatggcaaactgtctcaaggaaatcatttttgggtaatacatctgatcatcaggaatcaattagtaacatcaaacaaggggtgtctatatttttttctcagcatgttccttatcttttctttgtttgcttgtttgtttgttttctattttacatgtctcrtttaatcctggaaaaatgctataaagtagctagctgattctatcttacagatgagggcactgagattcagagaggtcagtagctggctttattatcttcttcactgtggctgcaataaaaaataaccacaaactttgtggctctcacagctctggaagccagaagcccaaaattaagatgtttaagagcaaagatccctccagaggctctaggagggattccattccttgccactttcagcttctggtggttggtgggactcttgt

SEQ ID NO: 882963 - DNA, 579 bp, Homo sapiens
ttgaaagaaaaagatttctttaggcaatataggcattttcacaatattgattctatccatccctgaacatgggatatgtttccatttgtttgcgtcatctatgatttccttaagtagtgttttgtagttttccttgtagtggtctttcacctccttggttaggtatatttctaactattttatataagaacattttgccttgccttacatacagagattttctcccacatttattttttaaaattgttattattttacatttaattctatgatccactttgagttaatttttgtatgaagttatgagatttagatcratgtcgattttttttcccaatggatgtctaatgctctagcatcatttgttgaaaggctggacttccttcattaagttgcttttgcatctttgtcaaaaatcatttgagcctatttatggaagtctatttctgggtcctctattctgttccattttgtatattcttctgccaaaaccatgttggtttgattactatagctatatagccctaatattgggtggagtgatatatatatatatatatatatatatatatatatata

SEQ ID NO: 882964 - DNA, 579 bp, Homo sapiens
ttgaaagaaaaagatttctttaggcaatataggcattttcacaatattgattctatccatccctgaacatgggatatgtttccatttgtttgcgtcatctatgatttccttaagtagtgttttgtagttttccttgtagtggtctttcacctccttggttaggtatatttctaactattttatataagaacattttgccttgccttacatacagagattttctcccacatttattttttaaaattgttattattttacatttaattctatgatccactttgagttaatttttgtatgaagttatgagatttagatcgatgtcsattttttttcccaatggatgtctaatgctctagcatcatttgttgaaaggctggacttccttcattaagttgcttttgcatctttgtcaaaaatcatttgagcctatttatggaagtctatttctgggtcctctattctgttccattttgtatattcttctgccaaaaccatgttggtttgattactatagctatatagccctaatattgggtggagtgatatatatatatatatatatatatatatatatatata

SEQ ID NO: 882965 - DNA, 595 bp, Homo sapiens
attgccactgcccccagcctggccaggaatattatttatgccaccctttcacagctgtatcaatctcccatgaaacattcagagcctccttgttaataaactacattatgagccggatgcattgtctggataaactgcattgtccaaaacactgccccattattacagaaaatgcagaatgtaattagtattcttctttgcataarctgcagcttccaaaaatggtgccatattataaagccttaattaataaacaagagttgggccatgaccagttacacttatctgaattttatattgtgaagaaaggccactgttcaaattccgtttacaaatatctaaattctggctagcctacatgaagatagtctaaacagaaagcctgagaattctgtgttgctaatagcattgtgttggtacaccaacaatagcaagccattaactgctgggacataaaccatcctgagaaatgttcagagtggaaggatgataacattgtatttcagctgcatcgtatggtgcaattcttctatttgttcatatgcatttcccatttaatagatggaggaaccagggtggcttttcatatctctgt

SEQ ID NO: 882966 - DNA, 588 bp, Homo sapiens
cagcacgttgcctgatcatcttcagcaagtggtctggcagaagcatgcaggtaaggatgccctgaagcaggctgtcaagaaaactgaccaatgagaaaggtgttttgtgctccacagctgaagccaattctgctgggacatcccaagacagactccactcggactcaactgataatacacactttacatctgtcactatctgcccaggcatattgactttgtaacattccccccaggcacttcaagtccagtttcgactctgtgacttttgcctgtggtcactttgcctgaaatgccctttctccttctccttcttatccattcattaggatctagcaaaatgtacctcctttgaaaagcactttctgtagccctcaggcacaagtkgggatggctgtgttggaccagaaaaagcaaccattgaaatttccaaactgaatctgtactttgatttatttcagtgtggtataatgtatggtataatatatggcaatgttttccaagtctgactgtacatcacagtgacctgggggacttttgaaaaatagattcccaggctcccctccaattaagacagcaggtcagaag

SEQ ID NO: 882967 - DNA, 664 bp, Homo sapiens
tagatagtgtgcaagctttctgatggcagaggctaagacgttatcatgtttgtatccccagcccctagcacaccatgaaacacaaaatgcccaataaatttttgctgaataaataaaaaaatacaatacttgatacccaactccaaggcactttcagtgtagttagtaaagatagaacattttgaaacataacacagcacagggcaatatgaaagaaaataaaaaattaaataaatctgttataagcaacaaagcaggtatttagagaaggcaaagattacttttagctggggtgacaggagcaacagaatcaacgacaattcaatgtgtgttcatgacacaagtcctgtgttagttgttttcaacaacaaccctgtaacttgataatattatccccattaacaaatgtggaacccaaggttcaragaggtaagtgatttttcaaggttatataatcagcaatgccaggatttgaatgatgaatctaagatttcaaaacactgagaatggaaaggtgggtatcccaggtagagtaaaaacagaaacagaaaaaaatgtgcaagtgcatctcagtgtaatgtatgtcctggggattaaaaacaaatcaacttgatataatctattataggaatgctaaggatgctgatcctagcaagtaagctgt

SEQ ID NO: 882968 - DNA, 613 bp, Homo sapiens
ctttatttcagagacagtaagatttcattgttactctacaggacttagaaataaatgcatgcatgtactcacacacaaaatctctcgataattttgcatataatacagtttttgtgctctatgccaacaaagaacagaatgtttagtaaatcacagagaaacacttttatttcttgagactgagatatgtgtggcttctctacttttctaggaattacatttaaaatgtaagaggacaagacctcattcaaccttttatgcctackttagtgatcagggtgaaacatataagaatattgcaacaccaaagctgtgtgtcactactcagctaatggtacctataaagaaacttctcttaattagctttaccctgaactaacttcctttgctctgccatgtataattaaatatgttagcaagacagaaatgtgagatgtagcagctttcacacccaaatttccgactccaaatttataaaaagtgtggatttttttttagttgaaagcccatcatgaagtattttacttttactctaaaaactttcaaaattacattaaaagaagaaaaagaaaatgggcaggaaaattagtaatgagagatgaattttcagaga

SEQ ID NO: 882969 - DNA, 577 bp, Homo sapiens
agtttaattttaggaaatcatcttgggtgggcctaacttaaccagtttgaacactttaaaagaagactgagaaagtcttgtacttggtgttggctgccagctgagatcttggctgagactgtcagctagaactctattttttaaattttattgtttaaattgacacacagtcgatgtacatagttttgaggtacatgtgataatgtaatacattcatattacttagcattgggatatccatcaccttaaatatttgtcttttctttatgctagatacatttcaattattttcttccrtcaactagaactcttataactcacggctagccactccacgtgatttggcttctctcacagcatggctgttggattccaaagaaaagcatcccaggagagggtaagtgggtgtagagggggaggaagcaggggtggggagcacacaccaacatgcatgaggtgaatgctattcactccacctgcactgagtgcatcctactctattctctatcctagtttcaacagaaggaagagaaaacagactccacctcctgatagtgtatgacaagaatctggaaca

SEQ ID NO: 882970 - DNA, 589 bp, Homo sapiens
gccatttaaccaccactatgtataacaacacgtatgttccactgctgattttaccaacagaggccagtctcacggtgggaaacgtggctcccaatggtatcttatataccaaatgatcgtctatggtagatttcaatcatcattctaaattctacattgtgggtttgtatttctgagtgccaatacaaaccacaatactatctattttttaagagatgggrtctcactatactgcccaggctggccttgaactcctaggctcaagtgatcctcccacttcagcctcccaagtagaatatcttaaagtccagggccattcagaggaagagagatgctacactgggtagataatcagaagaaaagaatcatttaacaaccaccctaccccccaaaaaaccctttctctctgcaaaatggaagggccatctagaaagaaacagaatcattcatacatatttattttaaaaccaataattaaccacctattgcagtactgaagttcatggcctacatgggatttattatactgattagtccacttctgtgtatatttaacctatctcataactttttttaaacagtcaatact

SEQ ID NO: 882971 - DNA, 649 bp, Homo sapiens
aaggcaacatgctgaaactgtccatggtgtaggacacagatggacagagaagacacagggttgaatgtacacagagggacaccaacagtacctgcactatacatccaagatcaaacagcttctaaattgtgggactaggatttgaactgctatccatccaagtcaaaagtgtgtgcttttttcaatccttgggataaaggaccatgtgaagtrcctgatgcacggaactagcttgattaactttagctgcaattgtggtattgcacactgtgttcatagaagggtctctccctggccagcagtcatccagtatgatggcaacaaatccaactaaaggatccatgggattaaaaaggtcagattgtgtggatttcagatgattctcatgctatcaatcctcccgccataatttgcacaaaagcctggcagtcttgctccatttctcagagcagaatctgctggggatcgggagattaatcagacttcattaattctgcaaaataaaccatgacatgtttacccgtgcacttagaggcattatcataaatcaccaaaattaaatctcacctgtctaagtagaggagcagcctgcaacagaaggtcacagcatcaatggcttcttgatggcttcatttctttctggggcctt

SEQ ID NO: 882972 - DNA, 649 bp, Homo sapiens
aaggcaacatgctgaaactgtccatggtgtaggacacagatggacagagaagacacagggttgaatgtacacagagggacaccaacagtacctgcactatacatccaagatcaaacagcttctaaattgtgggactaggatttgaactgctatccatccaagtcaaaagtgtgtgcttttttcaatccttgggataaaggaccatgtgaagtgcctgatgcacggaactagcttgattaactttagctgcaattgkggtattgcacactgtgttcatagaagggtctctccctggccagcagtcatccagtatgatggcaacaaatccaactaaaggatccatgggattaaaaaggtcagattgtgtggatttcagatgattctcatgctatcaatcctcccgccataatttgcacaaaagcctggcagtcttgctccatttctcagagcagaatctgctggggatcgggagattaatcagacttcattaattctgcaaaataaaccatgacatgtttacccgtgcacttagaggcattatcataaatcaccaaaattaaatctcacctgtctaagtagaggagcagcctgcaacagaaggtcacagcatcaatggcttcttgatggcttcatttctttctggggcctt

SEQ ID NO: 882973 - DNA, 682 bp, Homo sapiens
ggtggtggatgcaaggactctcacatagcattaaatttcctggtgagcaaattctctcatatgaaatgcttctattcttctgtttatatcaaagagaatgtctggatttggtactaattgctctttactcaagctctaatatccttttctctctctctctttttcaacatattcaaagtctagggaacacaaatatatgcacttaaagtgtaagagtattcacttgttttttaatcatatttttatatcacttgtatttttgttaaatgtcctggttttccaattatggtccttatattaactttcctttaaaaaattaacttcattaaaaaaccatgtatcaaggaatactatgcagccacacaaaatgagaacatgttctttgcaagaacatggatggagttggaagccactayccctatcaagctgatacaggacaagaaaaccaaatactgcatgttctcacttgtaagtgggggctaaatgatgataatacatggacatatagaagggaacaacagacactgaggtctttgggaaggcagaggttgggaggaaggagaggatcaggaaaaataactaagaagtacttggctcaatacctgggtgacaaaataatccatacaacaaccccccgccgccaagacacaagtttgcctgtataacaaacctgtacatgtac

SEQ ID NO: 882974 - DNA, 636 bp, Homo sapiens
aagtagtagttcacatatattttatcaatgaaataattgtcctgtggggcaggccttaactagcaatgtgctgctatagtcccttcctaggcccataggagagaaaggaagaggatatataattaaagattgcaccttttctattgagtccagggttggctttacaatcccttacaaaaaaaaaaaaggctctatgcaaccaatatattaaaagtttgcaactcaaggaaacctattgtaattcttaataaaatcagcccttcttttgcaggaatcaccctaatcggagcaagctgggattaagatgaaagagatggtcaaaatcatcgaagtcagtaacataacttaatacaactttgaaatttgttatgcttctttcaattaattaacatggcaatcagaaagactgtaggtgagggaggatacaaatggagaaggaatattacttacaactggagaactccaaggggcaggagtgttcatccattggaaarttgtgcaattgtaattggcactcagcatcaattgtcaacctaagtagaaagatattaaacataagatggattttagacataattttaaattgtaaatttgcacaattttaaatgattgtttttctagagaatatctcacatt

SEQ ID NO: 882975 - DNA, 630 bp, Homo sapiens
ttttgtgggaggaattacaagagaattaatcagaatttactattggaagaaggtgagaaaatacaaatttagtttttatattttatactatcatgctatttacatttttcttcataaatatatattcttttcatttatttctagaaaatatgttaacagtggatttcccagcatggagattatccatcccctccttgatttttattctatagtagagagaacacagcaacagaaaatatgcattcttgcaaaaatatttaaaatcctggatcctatgccatcatggtccatatgggcatttgcagacasggagacaaggttcaaggaaagtggtttatttgggaggtgatcccagaggcactggcagaggagcaggggagtgagacagagaaggaaagtgcattgtttctccaattcactggattttcatccccactaggatgaagctgtaagtcagtgtggcacatgtgcctcagagtcaacccataggagggtacactggcgaggggtgtggggcagggagctgctcccaaggagtgttaactctctggcccttcaaacctgccagaggtttggggagagcaggctctggcagccagagagaatcctcagggagcagaaagccagttg

SEQ ID NO: 882976 - DNA, 598 bp, Homo sapiens
gttgtttaaattctcccactaaagtaggaataaacaaacttattgctaaggctattgtgagaaacacatttgctaatagtaggcaaagtgttttgtcatctttcgaacacagagtatagaaaaagtggtacatagagctttttgaggacagtcgatttgaagaataacttctgtgacattggtaggtgatattcctgttgagtgatttttttttcctttgttaaaaggctaccttcagscttcaggagtaatagtaaagtagccaatcttatgcttgtttctactaatattaatgcatccatgaaagccagtaatacactattacagtcacccactgttagagccagtaatacattattagagctcacatatttgcattagtaaaattatgctgttttgttcaactcaatttctgaggaacagactaattacataccaacaggttttgtcagaaggtaacaaaatattcttttatatgtacttaatgtttgtatagagtatggttgtgacactaacagatctaatttaccttttgcagaagtcccatttcaggagaaattttaaaatgtgaattcatattccattcttagctctcatg

SEQ ID NO: 882977 - DNA, 670 bp, Homo sapiens
gctaagcagtataatttaggttatctaacaaagccatttatgtaatagtcttattccactgtaaaaacactaaaaccctttcaagtcctaacatgatattctagctcctccttcctctcaagcagattttgatgtgcataattctggttttggaataacatgccctctgagaacacagtaaaaaaagaaaggagtctttcagaagccacacaggcccaattttccatagtataatgaagtcgcaatgtcactgycatttctccacttctgcaggggaagccaagactgctttttgctcactgacctatagctttgggtcagtctttgaatgtggacacactgccaagctagctgggagttgccaggattacacaaaccagcattgcaaatgggggttgtgttgatttaagagaaaaggccacagaagccacatctttcttacttcctgcgtaatatcctctgctctgaaattttgaagaagtttctagaactactcataagaacatttctgtttctgggtacacctcctagctgaccaaaaattatgaacaataggaaatttaagagccagtatgcaaattaattaatttttattaagtatctattggattcttagcaagaagaggagctatgaatggaaaattacacagtaaaaaaacatttttatcta

SEQ ID NO: 882978 - DNA, 582 bp, Homo sapiens
aattaaattcttctctactgcaatgccatagtttcagtggatttatgctgtttgcgtagttggcaggaaaacctgttgggcaaatacaatatggtctagaactgaggaataattccctacatcaaatgtgtatgataaataaggagaaagacatgggagggrgatgacaggtgttagtttacagccagattctgaagcatttggatggcatgtgttatgggttgaactatatggccaaaaaagatatgttgaattcctgacccccagcacctcagaatgtgaccctctttggaaatacgattgttgccaacataattagtttagttaagatgaggtcatatgaagcagggtgaacccttaatccaataaaaccagtgtccttgaaagaagagggaaacttggacacccacatgcacaaagggatgaccatataagaacaaacagggagagactggccatgtgaagatggaggcaggaagtggaattatgccaccatgaatcaaggaatgcctaatgcccagggctatcagaagctggaagaaacaaggaaggagtctctcctagaggctttgaaaagagcat

SEQ ID NO: 882979 - DNA, 582 bp, Homo sapiens
aattaaattcttctctactgcaatgccatagtttcagtggatttatgctgtttgcgtagttggcaggaaaacctgttgggcaaatacaatatggtctagaactgaggaataattccctacatcaaatgtgtatgataaataaggagaaagacatgggagggagatgacaggtgttagtttacagccagattctgaagcatttggatggcatgtgttatgggttgaactatatggccaaaaaagatatgttgaattcctgacccccagcacctcagaatgtgaccctctttggaaatacgattgttgccaayataattagtttagttaagatgaggtcatatgaagcagggtgaacccttaatccaataaaaccagtgtccttgaaagaagagggaaacttggacacccacatgcacaaagggatgaccatataagaacaaacagggagagactggccatgtgaagatggaggcaggaagtggaattatgccaccatgaatcaaggaatgcctaatgcccagggctatcagaagctggaagaaacaaggaaggagtctctcctagaggctttgaaaagagcat

SEQ ID NO: 882980 - DNA, 615 bp, Homo sapiens
cgctgtgcgtggccatgaaaaaatatttttacatagctactatattcatagaatttgaccttcaaaagatagaaaacgcagtgcaaaatgcccttcacacttccatttctggtttcccaggatccatctctggagatgaccactgttacaagtttctcgtgaatcctttcagagatgtttcatgcctatagaagcatcctgtgtgaacgtgtgcctgtgtgttggggggagggtgtgtgtgtataatacctccactttatcctatttacaaagggttgtataccatacaaactgttttgcatcttagattttgtggggagtggagatgagactttttataggaaaaattttaagaacacttatattatgaaaagattaattttattaacaaaagttctatgttggttaatttgtattttgtccttttttttaaaaaaagatttccttttgtagctgtttcarttggctttgctgtaaataaaaaggtatgattttttaaacgtatagttgattatatgccttgctctcattttctgagaaaaagtaaatgtgttttcataataaattcaggtttgtctgtatatttgattatataactgcattattttgaatata

SEQ ID NO: 882981 - DNA, 628 bp, Homo sapiens
aaatgtctctcttcctcctattacaaacctcttgtcactgtgtaagatgcaccaagctcccctcctttcatataattctcatacctgttggatgagtatacatgaagataatttccagaaaaatcagccttgctgatttggttcatcattaccaaccaccttgtgccactcggcagacagtacttaagatccaggcaaaatggaaataaaatttctccctagaagctacaagttgttgccaggtgtggtggctctygcctataatcccagtactttgggaggccaaggtggcaggatcacttgaggccaggagttcaagatcagcttgggcaacacagcaagaccttgttgctaagaaaaaaaaaaaaaaaaaaaaaagcagcagagacctatagtcccagctacttgggaggctaaggcaggaggattacttggatcagtagtacaaggctgcagtgagccatgactgcaccactgcactcctccagattatgagttctttgtcctaggaaattatgttcctgcgtgttttggtttcagtgctttagccaccacctgaagatactgtatattttcgaaacttaatatttttttccacaccagccaggttgaaaagtttaagttgctt

SEQ ID NO: 882982 - DNA, 641 bp, Homo sapiens
acaagcctcaaatcatagggtatgaactctcccagcctgaatggttgagacttgctggggttgagagaaagtcctctctggcctcggtctgatatctttcatcagaggatgagccaagattgaacatggaggccaagggccctggaacgtgaaatgccttggatgatctggaggagaagctgcagtggccaggacagcacctgccagactgctgtgtctctgtgcccagcctggtggctggggcgtgctccttgtgtttctctgtgacccctgcctccctcagcacctttcagagttgggctcctggagatgcatttcckgcatgaatggcaccagaggccttaagtgagggatgcccttgtcttggctcctgtttaccccatctcttatttctccccagaagctccttggggctacctcatgtcttccctgggctccatttaccaacctagcctgccctctcaggtaccttcccaaaattcaggtggtctggactctctcttttctttcaaagctcactttctatatttgtttcctattgatgtcacaaaaaatgaacacagatttagtagctgaaaagacaacaaatttattctcttttagttccgtaggttagacatccaacactagcctcatggggc

SEQ ID NO: 882983 - DNA, 641 bp, Homo sapiens
acaagcctcaaatcatagggtatgaactctcccagcctgaatggttgagacttgctggggttgagagaaagtcctctctggcctcggtctgatatctttcatcagaggatgagccaagattgaacatggaggccaagggccctggaacgtgaaatgccttggatgatctggaggagaagctgcagtggccaggacagcacctgccagactgctgtgtctctgtgcccagcctggtggctggggcgtgctccttgtgtttctctgtgacccctgcctccctcagcacctttcagagttgggctcctggagatgcatttccggmatgaatggcaccagaggccttaagtgagggatgcccttgtcttggctcctgtttaccccatctcttatttctccccagaagctccttggggctacctcatgtcttccctgggctccatttaccaacctagcctgccctctcaggtaccttcccaaaattcaggtggtctggactctctcttttctttcaaagctcactttctatatttgtttcctattgatgtcacaaaaaatgaacacagatttagtagctgaaaagacaacaaatttattctcttttagttccgtaggttagacatccaacactagcctcatggggc

SEQ ID NO: 882984 - DNA, 672 bp, Homo sapiens
acatgacctacatgtgcatggggtctcttattctctctctcagttgcaatcattcacagccttttcactcatgtttgccaccagtctgttttctgcactaatcctgcagcttatatcacaactagaaacctcattatcattgcagctgagggctggaattcgtctcaattttgtaggaccrtgttccagagatgagcctaggacttcctaacactctttttcccatttttgaaactaattaatttattttagggtgtttgtaaaaagttcagacatgtaataattgtaaatgtgtatggggtccagagtgacgtttcaatacatgtgtacatttgatgctgcagcttcccccagaccctcaccaagtgtcccagttcaatgtctaggtttctaccttaggtcccccttctgacctcagctacttaatagcacagaggtcctgtttagattcctggattagtggtgcacagggcactacacaattcccatttagattcctggattagtggtacacacagcactacaccattccaagtgatgctcttcatgctgcagtgcgtgtgaatgttgtttttgggagttgcacttgaaccaactaagtgaccttcagccctcttgccaatatcccaatagtcctattgtaggaggggggttatgccttttcatcccaga

SEQ ID NO: 882985 - DNA, 632 bp, Homo sapiens
aatgtggattactcagttcttggaagtgtgttagcctgcactgcagagaccatcactctctctctcctctggttcccgtttgcccagctatcacccttaattgatttatgggggaccctgctcttctttatgaccttgcctctcatgttctctcaagttagtttctttttgtaaaactatacctttgctaatgaaataccaccaatggacgctataaggtactcttgaaacatgtaatacaacacattatatactgcccaaaggggtagtactaactacaaaggatgaaaaaactacgactactgtaaaagtttacttttaggaatgtgttttttctccttatgttttaatctcaaaaaaggtttacactccgatccctttatttcaatctacatattcttaaactgctaaatgtctagaaataattataatacaactaatgtttactcagtatttacyatggcacaacaccagaaaagctttttatgtgtcatctcattttattgctatggcaaacttacaggagagatattatcattatgccaatttcacagatgaggaagttaaaccatcattagactaattctaattttaaaagcctagtttgcacattatgcactatttatacatgg

SEQ ID NO: 882986 - DNA, 585 bp, Homo sapiens
aagatcagaatgaaaccaaaagttaattttttaaagaataaataagatttatagacttataactagactaataaagaaaaaagggagaagatccaaataaacacaatcagaaatgacaaagggagcattaccattgatcccacaaaaatacaaaaaaaaaaaaaaccctcagagaccattaggaacacttttatgcacacaaactagaaaacctagaagaaatagataaattcctggaaacatacaacctcttaagataaaaccaggaagaaactgaatacctgaacagaccaataacaaattctgaaattgaatcagtaataaacagcctaccaagcaaaaaaaaaaaaaaaaaaagcccccggaccagaacgattcacagccaaattytaccagatgtatacagaagaactggcaccagtcctattgaaattataaaatattgaaagggagagactcctctctaactcattctatgaggccagaatcattttgataccaaaatctagcagagacaccacaaaaaaaaaaatttaggccaatgtgcctaatgaacatagatgcacaaaccctcaacaaaatgct

SEQ ID NO: 882987 - DNA, 663 bp, Homo sapiens
gactgctggtctagaaggaagagacagacattacaaaatacaatgaacgacaggcacaataatagaaaaacacagatgataaaacataggaaaagagagggaagtgccaggaaatgctttgagtagaaaaaggctcaagagtgtgattatagaccttctttctgactaaatatgcttgttatttctactgtgacaagactaccccaggctggggtgagaggcatcatgtgaggccatctcttcccagaatcccaaatgggatcttctcatttgatttcttacccttcacaccctcccctggattgaaagggataacactcaactgtgtttccctcctggatraaactactctaatgcaatatcttctctttctctcgatcacagtaagcctgcaggtccttgcagattattgcaagcatgattgagcagaaggaaggttgaagtaatgctcttgagtgtccctctgcttcagtgtggcaggagaggggcttagaagtccccgtgtgccatgcagaggtttccaaaggcagggaaattaagagccagtgagattgcagtgggggcttctatagcaagtggccgaggtttgatggggtctacagtgcctaaaagagccagatgacatcaaggcagcaagaaagaccactgtggaggctcttgcag

SEQ ID NO: 882988 - DNA, 663 bp, Homo sapiens
gactgctggtctagaaggaagagacagacattacaaaatacaatgaacgacaggcacaataatagaaaaacacagatgataaaacataggaaaagagagggaagtgccaggaaatgctttgagtagaaaaaggctcaagagtgtgattatagaccttctttctgactaaatatgcttgttatttctactgtgacaagactaccccaggctggggtgagaggcatcatgtgaggccatctcttcccagaatcccaaatgggatcttctcatttgatttcttacccttcacaccctcccctggattgaaagggataacactcaactgtgtttccctcctggataaaactactctaatgcaatatcttctctttctctsgatcacagtaagcctgcaggtccttgcagattattgcaagcatgattgagcagaaggaaggttgaagtaatgctcttgagtgtccctctgcttcagtgtggcaggagaggggcttagaagtccccgtgtgccatgcagaggtttccaaaggcagggaaattaagagccagtgagattgcagtgggggcttctatagcaagtggccgaggtttgatggggtctacagtgcctaaaagagccagatgacatcaaggcagcaagaaagaccactgtggaggctcttgcag

SEQ ID NO: 882989 - DNA, 663 bp, Homo sapiens
gactgctggtctagaaggaagagacagacattacaaaatacaatgaacgacaggcacaataatagaaaaacacagatgataaaacataggaaaagagagggaagtgccaggaaatgctttgagtagaaaaaggctcaagagtgtgattatagaccttctttctgactaaatatgcttgttatttctactgtgacaagactaccccaggctggggtgagaggcatcatgtgaggccatctcttcccagaatcccaaatgggatcttctcatttgatttcttacccttcacaccctcccctggattgaaagggataacactcaactgtgtttccctcctggataaaactactctaatgcaatatcttctctttctctcgatcacagtaagcctgcaggtccttgcagattaytgcaagcatgattgagcagaaggaaggttgaagtaatgctcttgagtgtccctctgcttcagtgtggcaggagaggggcttagaagtccccgtgtgccatgcagaggtttccaaaggcagggaaattaagagccagtgagattgcagtgggggcttctatagcaagtggccgaggtttgatggggtctacagtgcctaaaagagccagatgacatcaaggcagcaagaaagaccactgtggaggctcttgcag

SEQ ID NO: 882990 - DNA, 583 bp, Homo sapiens
gttgaatatagatagaagatgacaaagtctgatgaccagagaccccagtttcaacactgttaaaaggaaattgaggtcacatcaatcctaagtaccatgcattcagattatggtttcaagttcaaataacagctaatgactcaattcayatatatccagaaagacagcccaaaatcaccccagaataatactcccacgtctccactacttgacctctctaccattcaactcaactttgatgtctaatttttgccttgaaactgcataaattcagtcttcaaaagtttattgttctgtaggacaaccagaaatttacactcagttaagaaacataagacgcagttgtcttttagcgtgtccattcttctgaatgtatatcactcataataataataaccaatacctcaaagcaaataaagtattttatgatgtggcttagtggttttatttatgcctcctcaggaagccaagagaccacaacacaaatctgaaaaacaattagcctgtttctgattaaacatgtattgcttaaagctgtagcaagtgaacaagtgaaaaagtttactgctaattcatacaagca

SEQ ID NO: 882991 - DNA, 620 bp, Homo sapiens
gttctagttgcactgactgttgaaaactgacatctgagttggaaaggagagaaatgtttaaaatagagacatgttgaactcaccaaataaggagggaaagaagagagaagaagaagaaaagaaataagaatgtatgtttctgcaagttcaacaattaygtgtgttaacgcaggagcttaaagtaggagctctggagtacacagactcagagcaccatgaacatagttgggaggcacagcaggttaacagagatacggagtgaagagatagctggaggatgcatggcctataggatctattgcttggaagaagtcaggagggcacaagacaagctgagactgcagtgaaagacctgaattttccaccttgagaggatgagctatagtgaagtgccttcatttgcccaagccctcaaagctaactcagaagttaactccttaatacagttttctttaatgtccagattcaagacaccctttgctctttactcttccccagtacttttcctctgcatactcttataaatatggtagccatgaatctcattctgcaaacccaatttttttaactttaaaatttttaggctttaaatccagcattttaaaaacttttgatctaat

SEQ ID NO: 882992 - DNA, 582 bp, Homo sapiens
taaaaaacataaatatgtaagctccacacctgaacaactgaatcagaatttctgggcgtactattaaatctctacaggtaattctgataagcagccaaagttggaaaatatttaggcctgagtgatttctgtttgtttcagaatgtaaaacaaacaaacaaacaatctaatcactgactactgtttttcttgttcacttttaaaacattaagtagacatagtctgaattgaccacttgagtttctgccaaatttcacagcagacatattcttgcctgacatggtcaaaaaagttattttatgattcaaatcccttccaccccatcagacggatagtagaaygaacattaaccctgaaaacatcttcctctgagtcaaggtttctcgccattggcagtattgacattttgggttggataattctttactgtagggtctgtcctgtgcataataggataggtagaatccctgccctctacccacacaatgtgagtagcatacctcctatccccagttgtgacgactaaaaatgtctcccatcgtggctgactgccccatggagggcaaaatcaagggcaaaatg

SEQ ID NO: 882993 - DNA, 583 bp, Homo sapiens
cagggctctataaaaatacagcaaagagaggccatttcatttgaggaaatgttatatgtagatatttttaacttgagtctagaaaattttctagaagtataaatatgtagcttaaatatgtttcttaaagatcactggataactaaaactgatggcttgcctcacatccttgtyttaagattcacctgcttaatacccaggaactcctgaaatttaaatacttgattaaacattaagacacctgaaaattaaaagtttaatgtaatcatctgacctcaaattatgccaaaaataaaactgctccttttctaaaatgattaataaaaaagatggcaatgaaaaattgtaacacaaaaagcagatgggtatcgattcacttctcttccaaacaaagtctttgcaactcagctttctcattgtaaatgtagagttttacaaatccttacctacttttcaaatttaactggaaaataaattgaaatgatgtatgtgaaagtattaaaactatgagccatatcagtgcaatatgatgaagagttgaggtaatttgaaaatatttagcctggagaaaagaagactcaca

SEQ ID NO: 882994 - DNA, 665 bp, Homo sapiens
ataaatgtgcatttaattcatatttctacaaaactgatttgtatgaaaagttaaatctttttgaaaaaaccgttccccgagattctttagctctagatgtactaaaatttatattttgaaataatttatcagaaaataaattcattaaaagtataaattgtgttgtaccaataaataaattcccagataagcaagccagaaaaattatgcaatgaatcattatatcccaccaataaagttttataacatattctgttgtcaccaaaaatattactgtttgcatttataagtttatgtttactcatttattactattgcccttattgcatgttataaataaaatatttttacatgaaaaggctttatattaaggttttggtccagttttgctaaaatataaattccaaaaccctatgctgaattaagtgtgaatccactgttatgccaaccattcgaatcagaatcacctggaattcttattaaatatacaaatcccttggcctcaccccaaacctattctgtcaaasccccttgggaaggcagggctgcagggaaacatgagcatttgcctttataatgagctcccaaagttcctttaaccacacttcctttatttgctttttgaagaaagggcactgcgtgttaattttgcattttcccccaca

SEQ ID NO: 882995 - DNA, 612 bp, Homo sapiens
agcaccatccaatcagctgagggcccagatagaacaaaaaggcagaagaaaatcagattcactctctctcttctggagctgaaacaactttcttttcctgccataggacatcaggaccccaggttctctggtcttgggactctgagacttgcaccaggaatcctgcccaggctctcaggcctttggactcagactgagctacttcactggctttcctggttctccagcttgaagatggcagatcgtgggacttctcagcctccataattgagtgagccaattccctggtaagtcccctctcacgtatttatatstatatccttatactatttgttctgtttctctgaaaaaccctgaagaacacagcagtaaaataacctggggctagcgaccacagagagtaacaagaaggtggaaggagtgtaccagactctggaggggacacttggaagagattcatgccctacccaaggtggggccatctgtagagggatgcagacaacccagggaaggacacaccctgacctcactcttctcttgccatctgattacctggcagtgccttctattggccaaacccaacagaagccagagaagaaaggtgaccattga

SEQ ID NO: 882996 - DNA, 616 bp, Homo sapiens
ggcagcagggagggcaatgtgttgacacaggttaaggctacagtcaggaaggccagctaggaatttttggtacaagtccaggcaagagataatgctgagctggactaggttgatgcagcatgtggacagcagatgtttaaattaatcatactgtgagtagtaataagcatttagtgctttaccaaattatctcagtgaacactccaaatttctattttttccaagaaaaagaataaattgacagattgtccagatttattccacaataaaggaaagttatgaaatatgatgctatttctggtttcttatttacagttaagttcatgttcaacttaaccaaaagaatcttagggaaagttgaagtgataatgcttaattaggaggtacatggcagtacagttagagtgaagaaaagaagaagtgagacagagaagtytaagaagcaaattcaaggtgatataccaagtgggccactgcttatggctctaaaaaaaaaaaaacactgtacctcagaacaacccaacagatggaaaattgtgggggaaatttatctgtgagctcactcatgtctcctgtctcctgttggctaaaggtcattccagagaaaatttacaac

SEQ ID NO: 882997 - DNA, 602 bp, Homo sapiens
gatttgcttgatttatttctggtttgcttgatctattttgatcaagttaaccagatagctgccaatagccatttttaatatgtgtcacagtgccacagatgtgttggggcagcaactgctggtttccccatgtcctgtttagtactttcctttgttgcatatagacaaatraaatagaagccaagaacatctggaaaccatcagtaaataacagtttggaaatttctgcttcatttggacttgtcatacttcagaaaagactattcataatataattaaatttacattttaatttcttctggaaagttcatctacttgataatctcttaaaccatttatttttaattttcattgtcatcatcccaatttagcaataactgcacttaaccctctctacctcctcaaatgtacacatctggtctccagttataataggtttcttcctaaaacttagaatggagaatcttattccctacattataagcctctaaagtcttccaatggtgtattgaaaaaatattcaagctcattagttataaattcaaaattcaccatatgctggaaactgtttgttcttacctctatctcatcttttcacaata

SEQ ID NO: 882998 - DNA, 610 bp, Homo sapiens
tctatgtatatgcctatctatttatctatgtatctatctttcatctatctgcctttctaccatctaattttcttctgcatatctaccaattatctatctatctatgtatatgcctatctatcgtctatctgcctatctgtctatctattatctatctatgtatctatcgatcgatccatccatccaccccattaggctgtacctgatgggggcagcatcatgttcctcacatggtcaagcatggctgtgtgccaggggccttcaagcaacatttaaagctaaagccaacgatagaaaccataattaataatattttcagacaggttgccaaataacatacatgtaagygaagaccagatgcatttcaaaaatgttcaagaaattgaatgtgaataaattcattgcttaaaagagaatagcaaatggtgcatgctgtgtgatatggtaacgacaacagcaatactagcagtggtcatctatcaagtgctagttatatgctaaagactgtgttaaatgttttgacatccatcaccttactgcatcttcccaaaaccacaggaggtagatatgattatctcaggaaactgaaactcctgaagttacatagaaa

SEQ ID NO: 882999 - DNA, 577 bp, Homo sapiens
ttttaaaagcttgattattcttgacagggcacagaggaatgtccttcactacgtatgccaggatgaagtgaatttataagcccacaagtagatctgataagcatgcagaaatcatttgtattatgtgcataaaacagtgcccgattaaaggacagtcacattttcttctgacaaaatgtctgtggcactccagaaaacaggctttattttttaaggtttacctcataatgaaamaaagtttgaagtggaaactcttaaaatgcacaggtaggagatgcaatgatacaatccaatgcaataaaataaaataaaaccatgaatgagcacatttggaagaatgaattctccagttaaagtaggccgggcacggtggctcaagcctgtaatcccagacctttgggaggctgaggcgggaggatcacgagggcaggagattgagaccatcctggtcaacacggtgaaaccccgtctctactaaaaatacaaaaaattagccgggcgcggtggcgggcgcctgtagtcccagctactggggaggctgaggcagaagaatagcgtaaacccggggggtggagct

SEQ ID NO: 883000 - DNA, 605 bp, Homo sapiens
tatagccatgtgcctccatgctcagataattatttgtattttttgtagagacagggtttgtcatgttgcccaggctggtctggaaatcctgagctcaagcaatccgcccgctgcggcttctcaaagtgctgagatcatagtcatgagacataacgtcagctcagcttttatttttaggaagagattgcaaagaattggtatcattttttttctttaagagttggtagatttcactagtgcaaacactggtgcctgatgctatcttttttggaaggttattaattattgagtcaatttctttcattgatataggcccattcagaatatctgtttctccttatacaaatcttgatagtytgtgtccttcaagaaattagtttatttcatccaagtattcaaatttatggctacagggcttttcataaccctattatccctttaattattatccttttaacatctatgaaagcattcctgatgagttctcttttatttccaatattaataattcatgtcttctttttgcttgatagccaggttagaggtttaccaattttattgacatttttaaagaaccagattttagttttgctgattttctctac

SEQ ID NO: 883001 - DNA, 540 bp, Homo sapiens
accatgtgagcacacaatgagtatgcagctacctgcaagccaaggagaggccaaacttgccaacacttagtcttggacttccagcctccagaatgtgtgaaaatacatttatgttgtttttgttacccagtctgtggattttgttacggcagcctgaacagactaatccatgcttcattccatccacatttgttcaattgagaccagcaggctcaccatgcataaaaaccatggcagatcttgttaaactcccaacttcccaagccccagcccagacattctaattcagttggtccaagactgrgattcagaatgtgggtgacttcagaactccgcctagagaaacagatttcacagcttggcagagtgagcaaagccagcacacagcaggtgcttaataaatgctttctgaatggatgggttaatggatgaacacgctctttcaaataaaagagtacaaagccaaactcagataactttatgacatttctcacttcagcaagcagtgtttggtgagtcaagtggtttatctgtagttgg

SEQ ID NO: 883002 - DNA, 656 bp, Homo sapiens
cctattctaacaaggggaccatggtggcactttgtatacctggttatcagcataagctcagatcctgtatccactaatactgaaagattatgggtatacccccttccccagtagacagttatctttgtagaagtaatttacctaagctggtaattcaggctcttctctgaagttctgcgactctttttttttttttttttttttaagacggagtctcgctctttcgcccaggctggagtgcagtggtgctattttggctcactgcaagctccgcctcccgggttcacaccattctcctgcctcagcctcccaagtagccgggactacaggtgcacaccaccgtgcctagctaactttttgtatttttagtagagacggggtttcaccgtgttagccaaggtggtctcaatctcctgacctcgtgatccacccamctcggcctcccaaagtgctaggattacaggcgtgagccacctcacccggccgaagttctgcaactcttacaattaatgcttgtgaagaatattcagctcttcttgccctctagtttaaggagacgagagtctctttaaacatgcccccaaggaggccctctgattttcacactttgctttacattggtgattgattgtccttaccctgtcattttctctcat

SEQ ID NO: 883003 - DNA, 654 bp, Homo sapiens
tgcaagaaagagccaatctcagtttatcttaattcattattgcagatatctatggctatataataaaccattcctaaattttgtgacttcaaacaacaacagtttattatttcttataatcctgagggttggcaggatggttcttctgttgcatgtagtttaaaaagtcactggctcagctatttttggctgggagctcagctggggccagagagtccaggatggtctctcatctcccagggtctctttccactggcttmtcatcatctagtagtatggctcatacttcccagagggaacattacaagaggataagctgcagtgtgcaaatggtcatcacacctcttttcacatattgcttgctaaaaatcccactggccaaagcatgtgacatggccaagcccacagccattgtgagagttgactatgcaagggcatggatactgggaagggtgcttcctggggccaccaatgcaacagtctacctgccatattaatgaaattttgttgtagaatacacaagactggagaaggacaggaagatgtctcaacctcagtcactagtgtggcaaacttcacagagaattggaacattgtttggggtaccaagagatttacaggcctggtgattataatgcaagagtagtaggtgct

SEQ ID NO: 883004 - DNA, 691 bp, Homo sapiens
cttcagccttcgtgactatgtagactagtatttctaggtgccatcagtagactaacccagcgaatttgaatcttgtcttgaagtggacaaaagataagcagctcccactcacatggtatttgaatggcttgctctgagcaaaactttccactgcctttgacaggtggcatttatcacctagtttaaaaatagtcagttttcaggcatttgataatttcctttgatgttagattaaccaggaaaattatgtaaaatcactgyttttcttactactgaaaagcatttgttaattagcaggtgacccaagcactgtttaaggaggtatatccagacagtaaactcctggcagttaggagtgacatctgagccagctctgctgcagacctgtgaatagaagctctgcctctgaagccaccagatttgcacctgtgtcactcccagaaaagcacaaggaattgaactgagtcactcctaagaatcccctcccccactccctatggccactattccttggatgtggaattccaggcttccttccattatcccaaattctatatactcccagagcctgaaggatcattcagaggtgaatctggtccaaataaaaaatgattatgataataattttaaaatagctgatgttattgaaccattataacattggtatacactgagaattttatagtaatta

SEQ ID NO: 883005 - DNA, 627 bp, Homo sapiens
cacccttcaatttattattttattgctacagcaggagaaacagaggacaagaaatgtttttgtcttaaactctttgttaaacaaaatgtacctaattcttctgagggtttttttttttgttttagatggagtctcgctctgtcacccaggctggagtgcagtggcacaatctcagctcactgcagcctctgcctcccgggttcaggtgattctcctgcctcagcttcccgagtaactgagattacaggtgcaaaccaccamgcctggctaattttcgtatttttagtagagacagggttttgccatgttggccagactggtcttgaactcctcacctcaggtgatccacccaccttggcctcccaaagtgctgggattacagacatgagccaccaagcccggcttgggttattgtttaaacagtccttttcccgggaactaatggcttaaaaccataaatttgcaaccaccaaccaaacccccatcttaaccaataatttgattaacatgatgaaccgatgttctttctttgaagctctgcctccacattttcctgcctttttctgcctgagggagctccagacttttaaccataattttgcatttcatgaaatgttagatcaagca

SEQ ID NO: 883006 - DNA, 627 bp, Homo sapiens
cacccttcaatttattattttattgctacagcaggagaaacagaggacaagaaatgtttttgtcttaaactctttgttaaacaaaatgtacctaattcttctgagggtttttttttttgttttagatggagtctcgctctgtcacccaggctggagtgcagtggcacaatctcagctcactgcagcctctgcctcccgggttcaggtgattctcctgcctcagcttcccgagtaactgagattacaggtgcaaaccaccacgcctggctaattttcgtatttttartagagacagggttttgccatgttggccagactggtcttgaactcctcacctcaggtgatccacccaccttggcctcccaaagtgctgggattacagacatgagccaccaagcccggcttgggttattgtttaaacagtccttttcccgggaactaatggcttaaaaccataaatttgcaaccaccaaccaaacccccatcttaaccaataatttgattaacatgatgaaccgatgttctttctttgaagctctgcctccacattttcctgcctttttctgcctgagggagctccagacttttaaccataattttgcatttcatgaaatgttagatcaagca

SEQ ID NO: 883007 - DNA, 629 bp, Homo sapiens
cattttctccctactgtaaaatatatgcacccaagaaggtatcaggtgattgaaataggaccctgagaatgtttgtctatctttgcgtgctggtctcttgtgtaattcaggatgggaaaaaaccctcaggcctggacagcatccattgttttataccttgaacagcgaagtctcaacagatgttttcattacctttctacaaataagcagaaatatgacctctttaatcaccaaagactgctcaaatccttgtcagtmttttaagacactcgtttttatttggatagggagtttttcttttgattttacctaaagccagtgaaaggggaaggaaaaacaaaaacaggtagagcatttaaaagagcccaagcatgctgcagatttcattaagaatggaagaaaggtcatggcattttccagatgagaccctcaatttgacatagtagtacagagtagatatgtgttagttttagcaaagtggctataggcctcactctctattagaaggaatgctgtattctggtcgaaatcatttgtgtggttcacctacagctgacctaaaattgtggtgcctaaatattgccctgttgcttgtcaatgaccctggaagaactctgtggccttctctt

SEQ ID NO: 883008 - DNA, 597 bp, Homo sapiens
tctcaagagggcaccttcacagcaaaagggatttgagttttctatcattatctagatactgtaaattaaccactagtgttttagttatatttcatatattatatataaatatatacatgcatacatttaatgacatatttactccaactaaccttgcaatagataatcaaataaattattcaactaaataaatcaactatcacagtaatttaaaaacagagcttagatcacgcatcagctcaacacaggtgaactaaaatttatttccattagatgagaaactctttgaaggtaagaggtgtaaattctataaattctatattctttgtagtatcttgaccctaagcaaagtaaagaatcaaaacatgagtaaaaatmgtatggaaattgcatatccagtttctacacctgatttaaatcacctgctcgtgtgatcaagggcaagtccttttgcttctctgagcctccatctttacctgtacaataagggaatttgaataaattatttctaaaattcccccacctctgtgactctacaatagttccggttaatagcacttcaattttacctttaaaaagtttgcccaattgcactga

SEQ ID NO: 883009 - DNA, 638 bp, Homo sapiens
cactggaaatctcaaggcaaaatgaagcagttggatacaaattatatgaatcaatatagctcagtcattgcaaaatatctcttgtggaaaaatttcagaacagccctactaaaaatactaattttcatgatatggccttactaatatggacttctagaaaaggaaattaatacagagggtataaaaagcatgtccgtaacaagaattaatttaaaaataagcttgatgatgtaaagaaggcaaaaacttgatagggatccacgtatagctactgtcttaaagttcataatttaagaaaaacataaaggcctcagttcccagaatgctaaaaatacagtagccttatatacatatatagccttagtcactccaaaaggcttcatgtgcttttgaaactattacataaggtaaattttgattaartgactttatttatagtttctgattgagaatgcatgagacacacacttccatctactcaagaatgtttgtgtaagtaaatatacttcaaaatatcagaaacactttaagcagctccttgaaaacgctatatgacaaagtacatgactaacttaaagactaataatattttcattaataaaatctagtactttatcacaattttagttatctccata

SEQ ID NO: 883010 - DNA, 607 bp, Homo sapiens
aatatcaggcaattgcctagttaaacagatgggccttgcagcccaccctaaaagccagcaaacatgggctttatttaattaaaaagggaaacaaatttctgaggtgtagacacacacacagagagacatacacacacaatctctgaccggggtcaatcccagaataaaaatattgattcttgctttctcattaggttttatgaatgtccaaccatatactatccactggattgaaagaactaaatgagatcattcagtgctgtatactcagaccaaatctctatgggaaatagctgaactcatttcctttctytcaagtaagagagaacatttacatctgaattaacccagattcaactcttctccatctgacattgaagagtaggtgttttccaattttcttcctatttctaccccctgctccgttatcctctgctgctttgcactcttatcccacccactactccatacttacgcaataaactctcagttgtacataaccaaactcaacatctgattttgcctaaatttcagactaaaataatccactagaaactcaaatttaatatgaccaatatcatcattaagaaagaggagactataaaga

SEQ ID NO: 883011 - DNA, 411 bp, Homo sapiens
tagggctggggcaaatgccaccagtctctttgctaaaacacagcaagagtcacccttattccaattcccaacaagttcctcatctccatctgagatcagctaagcctggacttcattgtccatatcactatcagcatgttactcaaagccattcaacaagtctctaggaagttccaaagtttcccacatcttcctgtcttctgagccttccaaactgttccaacctctgcctgttacccagttccaaagtttcttccacatttttcrgtgtctttacagcagtgccccactctactggtaccaatttactgtattagtccattctcatattgttataaagaactgcccaagactgggcaatttataaaggaaaggggattaattgactcatagttccacatggctgggaag

SEQ ID NO: 883012 - DNA, 622 bp, Homo sapiens
gagagtttggtgaagaataaaaaagaattgttttttttatgtaatattactattgctatatggttataaataatttttactttttttagctagcttctttatttggatgctgcttttccctagcaaagcttcctgcatgatacaactgaagttaagcactctgccacaggcatgttaaagcaaaaacaaacaaacaaacaaaacccagacaaaaacaaaaacaaacaaaaaaacccacaaaaacacttcattgcagaaaaagggtaccagtaataccaacaacccttcctcaacttttgtttctctagacaattaatatatttaatggttctgaaaattargtttacttttttctggacaatagctctgcaaattatatatctaactactgtatttaaattgtagttaggtgtgaaggaagcatgctaacagaatagatagatttataactacagcagcactaatctgtatccagtatccagagctagtactttttatactactaccacagccatccaaaataacctggccatctattcatcattagtccatttccccataaatcttaaatggaggtatgcattgccataattagccaacacaattaataatgtattttttc

SEQ ID NO: 883013 - DNA, 622 bp, Homo sapiens
gagagtttggtgaagaataaaaaagaattgttttttttatgtaatattactattgctatatggttataaataatttttactttttttagctagcttctttatttggatgctgcttttccctagcaaagcttcctgcatgatacaactgaagttaagcactctgccacaggcatgttaaagcaaaaacaaacaaacaaacaaaacccagacaaaaacaaaaacaaacaaaaaaacccacaaaaacacttcattgcagaaaaagggtaccagtaataccaacaacccttcctcaacttttgtttctctagacaattaatatatttaatggttctgaaaattaggtttacttttttctggacaatagctctgcaaattatatatctaactactgtatttaaattgtagttargtgtgaaggaagcatgctaacagaatagatagatttataactacagcagcactaatctgtatccagtatccagagctagtactttttatactactaccacagccatccaaaataacctggccatctattcatcattagtccatttccccataaatcttaaatggaggtatgcattgccataattagccaacacaattaataatgtattttttc

SEQ ID NO: 883014 - DNA, 642 bp, Homo sapiens
catatttgtccctgctatcccagtctaagcagggaagaagctgttattgttttgtttactcctagataatcagagtctcatctagtgctggaaacatagtagctcaatacattaactattcattgttagtatactaattcttgttgctaaatcaataccctttttattagtccatggtaatatggtatggtatggaatgcttttaattaaatggcaactctagatggcatgtcaattaacttatttttgctcatcctttttaggtttgcaggaatcaaagatgtgtgagttcttcatacttgggttatgattgtactactgacaaatgcaatgatagaggtgtaagtagcagtactatgaggtgaaaatagaaatcattgagcctaattttaggaaactgcattgctacacacacacacacacaygcacacacacacacacacacaccaaaacatataggaaaattggccttagctgacctacatattattttataattctacttgaacatatataaatctagttgcttatcttataaggtgatatttctccttcttttaggtatgcaataacaaaaagcactgtcactgtagtgcttcatatttacctccagattgctcagttcaatcagatctatggcct

SEQ ID NO: 883015 - DNA, 568 bp, Homo sapiens
tgattattagtttttctttgcagatgctttttaggttaattaagaagccccatttgtccatttttactttcgttgcatttgtttttgaggtctttgagtcataaattatttgcctataccaatgtccagaaaaggttttcagtaagaayttttatactttcaagtcttacatttaagttgttaacctgtcttgagttaattcttgtatatgttgaaatacatagattttttcttctgcatgtggctatccaactttctcagcaccatttattgaatagggtgagtgtggatcatttttgacagattttaaatgttatataaatggaattatactgcatgcacattgttttctgactttgttcattattactgacttttgaaattcacagatgttgttgcttatagttgcaaaatgtttattctaattgatgcatactatacctttgcatagaaatagcaggtattaatttctgatattctgacagacatttgggtagtttgaaatttggggtattatgaatagtgctgctgtgaatattctacagcatgtcttttggtcaacattatg

SEQ ID NO: 883016 - DNA, 635 bp, Homo sapiens
gaacattagtaaatatttccagtgattttcctaagtggttgtatccattatattcctattagtagtaaatgagtgtcttcatttttgcttatctttggtatttttcttcttttcatagttattcctcatataaaatgaaatgcaaacaccactgtacagttggatgaaagctcayaaatgtaaaccccatgaggcaaatattttaaatattttttgttttgatgtgttagttttttcatttaatataaagtgtttctaatattttatttgataaagaatgggtttaactagtgcccgagagttggcaacaaaatagtgtaaattcttttataaattattttaattttgttattttaacagctttactgagagatgattgacatgaaataactgcccacactttaagtgcataatttgataggttttgttatttgtgtaccgccatgaaaccataaaaatgcaaacaatgcatatatccataatccatacacatttcccaagcccattgatcctgccatgttgctactccccacacaggcagtcactaatctggtctgcattctttcattataaattagctttcattttttatacttatatataaatagaacaagactgtatgtattctttgtagt

SEQ ID NO: 883017 - DNA, 644 bp, Homo sapiens
cagacttatatcagacaaaatagactgtcaaaaagtgtcacagtagacaaagtctttatgttatgataaaacagtcaatgcaccagaaaggtatgacatctgagcacccaacatctgaccacataagtatataaagcaaacagtgactgaactaaacggagaaatagatatcaatacaatgatggtaggagacttcaatgtcacatgttcaataatatataaaatatcccaacagaagatcaataagaaaacagagagtttgaatcatactaaacaccaaatggacctaacatacatacacgaaatattccactcaacagcagcaaaatgcgtgttgctctcaagttcacacagctctttctccaggacagatcaaatgttatatcataaaaataaaagttaacaaatttaagaagattgaaatcagaataagtatcttctcagatcacaagsggatgaaagtagaaatcaatagcaaaaggaaaacttgaaaatttacagaatgtgggaatgaaacaaaacactagtgaacaatctttgtgtcaaagaagaaaacaaaatggaaacaaatacctcaagacaaatgaatatgaatatgcaacatgccaaaaattatgggctgcagcaaaagcagcactaacagg

SEQ ID NO: 883018 - DNA, 599 bp, Homo sapiens
cccaaaatgaaatcgtctaatgtttgcacctacttataggtttggattcaagaaacataagacaaaaaattcgccagagttttgttaatgtattctcataatacttaacattttgaaagcagcattacatatattttaatacagacatcatattggtaaaccaactctgaaaattacaaaatgaaaactaaaacaatcatccttattagtagcatttgccamtttccatggtgtaaatattctcaccacggtcagtttcaagctaccaacacgatgtcactgaatccagattttggaagaaacaggcaaaatctgctctcatgagctgctcgctaagggcatgtctagcacccaactatttaatcaccatgaatacaaacagctacatatgtagacagatcacattatggtgactcaaatattatgagcagtgctgcatgatgtttcaagatggtattgagaccttggtaaaagactggaacaaaacaccacacaatcttcccttgatttagaaggcccctgcatttctggaagacccagtgcacgttgtgtatctgtataagcacagggaattctggggtcagatcaatggaaacaag

SEQ ID NO: 883019 - DNA, 599 bp, Homo sapiens
cccaaaatgaaatcgtctaatgtttgcacctacttataggtttggattcaagaaacataagacaaaaaattcgccagagttttgttaatgtattctcataatacttaacattttgaaagcagcattacatatattttaatacagacatcatattggtaaaccaactctgaaaattacaaaatgaaaactaaaacaatcatccttattagtagcatttgccactttccatggtgtaaatattctcaccacggtcagtttcaagctaccaacacgatgtcactgaatccagattttggaagaaacwggcaaaatctgctctcatgagctgctcgctaagggcatgtctagcacccaactatttaatcaccatgaatacaaacagctacatatgtagacagatcacattatggtgactcaaatattatgagcagtgctgcatgatgtttcaagatggtattgagaccttggtaaaagactggaacaaaacaccacacaatcttcccttgatttagaaggcccctgcatttctggaagacccagtgcacgttgtgtatctgtataagcacagggaattctggggtcagatcaatggaaacaag

SEQ ID NO: 883020 - DNA, 617 bp, Homo sapiens
ttaccctttggttagatcccctaaagcactcagcccatggtgtgacataaaccaagtaatgcctgcatgcaaacaaagctggcttcacaaagttgcagaatgtagtaggcacctggttaaggaaaattctacccacaaattattttgcccccaacgggcactttaacagggaacacattttttccccctttttacattaaatatctgaatgttggggaaggggagatgtttgttctaaagttaatcctaatggtaaagttaaaggtccaataatgtgtttatactgtaatggacagttttgctctttctcattgctgaactttatgcaagggcctggtgcttatttgggcacaactccagaggccttcattcttactgtcaccggagtgcgtggccctgccaggtcgtgtataacctgtgctatacctgtatgtgtacctgtgtgtgtaggccactgargccctggtatttggtttagtttgtttcttgctttgctgctgcttggcttattgattctctaaaagaatacaagggagaaaagtcccagagagatgtttcagagtttcaggacagtagcaatgaagacagtattcatgcagaagtttacaaaagttaga

SEQ ID NO: 883021 - DNA, 655 bp, Homo sapiens
tcttcaggagactcacctaacacataaggactcacataaagtaaaggggtggaaaaaaatactccatgcaaatgaacaccaaaagtgagcaggagtagctattcttatatcagacaaaacaaactttaaagcaacagcagttaaaaaagacaaaaagggacattatataatgataaaaggactagtccaacaggaaaatatcacagttctaaatatatatgcacctaacactggagctcccaaatttataaaacaattactactagatctaagaaatgagatagaaagcaacacaataatagtgggggtgtttagtactccactgacagcactagactggtcatcaagacaggaagtcaacaaagaarcaatgcacttaaactataccctacaacaaatggacttaacagatatttacagaacattctacccaacaaatgcagaatgcacattctattcatcagcacatggaacattgtccaatatagaccatatgataggctacaaaagaagtcccagtaaatttaagaaaataaaaattatatcaagtactctctcagatcacagtagaataaaattggaaatcaaccccaaaaggcaacctcaaaatcatgaaatatgtggaaattaaataacttgctcctgaatgatcagg

SEQ ID NO: 883022 - DNA, 624 bp, Homo sapiens
ctaatatacaaatttctgagatgaagcaatacaattgctatatatctttactcacattacttattatttcattaagatcatttccaaaataactcctgggtcaaaagtcttacagaattctaaagttcttgaagtcttgattcatattaataaattgtcccaaagaaagttagaatcatcaacttactctccaccagcaagttaggaaattacccatttcctggcactctcttctattctcggaagtaacatattttcaatrctggcagttgaattggtgaagaatagtattgccatggtttaatacaatctttttttaaaaagggtaattatttctgttgctgatattagtttcagacttctgactgatttatagacctgattctcctccctagagcagcgtgtgccctgctaaggacaggctacaagatgtgctgtctgccttctaggaaggtggctccatctggatgcaaaagaaaggatgggttgggggagggagtgagcagccctgggaaatgtccctggctcagcagctctttctcagcaacaattctgcagtgtagaacaggaagcatgcatgcttttgggggcagctagccaccttgtgacagctgtttactaact

SEQ ID NO: 883023 - DNA, 577 bp, Homo sapiens
taatttcttgtatattttcaaatagctacaagagaggatttttgaatgttaccaacataacaaaaaatgataaatgtttgaggtgaacagatatgctgattaccctgattgatttacacattgtatacatgtatatcmctcttataaataagtacaattatatgtcaattaaaatttaaaaaaaaattttaagaacacggaaactaggtgtagtggcacatgcctgtagtcccagctacctgagaggctaaggtggtaggatctcttgagctcaagagtttttggccagcctgggcaacatagtgagaccctacctctttttaataaaaaaaaaaaaaaaaaaaaagaggaagaagaagaatatggaatcctgaaaatgaggaaccaaagaaataagcattttctgtatttaaccaacacttagtcagaatgagattagtattactagagtgatatatattctctcttgtgaagtgggaaagggttttctggttcttctatcacttaaatgattaccaaactcttagatgattcttgaagtctctcaagaaaacatgtgatttctaactatatatat

SEQ ID NO: 883024 - DNA, 665 bp, Homo sapiens
cctaactctgctggtcaggactttcagtatgatgttgaatagaagtggagaatgggcatccttgtcttgttccagaaaagctgtaaactttttcccattcagtatgatgttagcagtgggtttgtcatatatgttctgcattattctgtgatacattccttctatgtctaatttgttttaagtatttttatgaagggatgttgaattgtgtcggatgtttttttctgcatctatcaaagtgatcatatatatggttttcatcctttattttgttaatgcgacttatcacatttattgatttgtgtatgttgaaccatccttacattcctgggatgattctaacttaaccatggtgaataatcttttcaatgtgcagttgaattcagtttgctagtattttgatgaggatttttgtatctctgtttatcagggatattggcctgtagttttgtagttgttgctgaatctttgtctagtgttggtatcgggataatgctggccttgtaatatgattttagaagtagtctstccctttaatttctctaaagagtttgaaaagaatttggtattagatcttttttaaatttttggtagaaattcagcattgaggccatcaggtcctgggctttcgtttgatgggagactttctattactgattcaatct

SEQ ID NO: 883025 - DNA, 596 bp, Homo sapiens
attacagagggagcaggttcaaattaaagtgatattcaagtaaaaagagtctccaggttggaaggtggtttaaacccaacaatgccaaagtaataggtggattggtttttcccctctcatccacgtatgcacctggaccgagacaatgccgtatctaaccgaaaagcaacttagccaggcatggcggctcatgcctgtaatctcaacactttcagaggccaagacaggcacatcacttgaggtgaggagttcgagaccagtctggccatgtagtagatggccatttagtagagacagtgaaaccccatctctactaaactgcaaaaattaccctggcatggtggtgggtgcctgtaattccagctactggggaggctgaagcaggagaattgcttgaacctgggaagcggaggttcaagcsattctcctagttcagtgagctgagatcacgccactgcactccagcctgggcaacagagtgagacgcctcaaaaaaaaaatgaatgaataaaaagaaaagcaacttagaaactgtaactattttccccaacagtctcagggaacacggcctcttttccatggaggcttcttgatgc

SEQ ID NO: 883026 - DNA, 603 bp, Homo sapiens
gccaaaaatcactccactctccagtaacttgaaaaattagccaatatcactgctgaaatgcatcctacaattgttttagacatatcagttctactaatttgcataaagcagtacggaagaagtccctgcaatccaaaccctttccagaatgtatcagtcacgttgtttctcaggactgctttcaaataagattagtaccttttgactagacctggcaatagaaagtgggtaacatcacaaaacaattaggttatttccagtgggtcaacgaaataagttagttcctcagaagctgaatgaagtttgcagtgtgtggtgttggaatgccatctgatccaaactcccactgaatgggtaggagaatyttttacaccatgtccccaacagatggccagtctccactttaacattttcagtgtgcaacacatacaacccacgcatttacagaatggcccatttctgttttccaacagctccagtgtttaggttgtgtcagtatcacacagttttctccctctctacatttttattcatctgatggtttcactcccctactctaaacacagataactctctagtggcttcagaagaaatctaaacgcc

SEQ ID NO: 883027 - DNA, 603 bp, Homo sapiens
gccaaaaatcactccactctccagtaacttgaaaaattagccaatatcactgctgaaatgcatcctacaattgttttagacatatcagttctactaatttgcataaagcagtacggaagaagtccctgcaatccaaaccctttccagaatgtatcagtcacgttgtttctcaggactgctttcaaataagattagtaccttttgactagacctggcaatagaaagtgggtaacatcacaaaacaattaggttatttccagtgggtcaacgaaataagttagttcctcagaagctgaatgaagtttgcagtgtgtggtgttggaatgccatctgatccaaactcccactgaatgggtaggagaattttytacaccatgtccccaacagatggccagtctccactttaacattttcagtgtgcaacacatacaacccacgcatttacagaatggcccatttctgttttccaacagctccagtgtttaggttgtgtcagtatcacacagttttctccctctctacatttttattcatctgatggtttcactcccctactctaaacacagataactctctagtggcttcagaagaaatctaaacgcc

SEQ ID NO: 883028 - DNA, 684 bp, Homo sapiens
atgctactgtgaaatcattttaatcttcacattcaagtttcaggcctgctactgtttgaatgtaccccccaaaaagtacatgtgttgacattttaatccgcaatgcaacagtcttcacaagttggacttttaagaggtgatttgctcatgaggactttgcccttataaatggattaagatcattatcgtgggaatggattagttactgtgggagtgaactcctgatacaacagtaagttctaccctcacacttgcatctgtttcctgccttcagccatgggaggacccccaccagaacgctggtgctgtgctctgaggccttctaccctccagaactgtgagccaaattaacttctgttctttataaacaacagtctgtggtattstgttatacagcagaaaacagactaaaacaaggccctataagagttaaaggagaactcagtcgtgtttatagtcacaagcaatcctaccatgtgtcacttcacacaacggtcccaatattgctgccaacctgagagaccatctattgaccattcatttccatcctgaggtgacagaatggctaccaagccaaagggaatggagtggaaagagcaagtaaatccatacaatgccacctttttcttgttaccctcccaccatccctacttgctaaagtagtatcaccagcacttccatttt

SEQ ID NO: 883029 - DNA, 603 bp, Homo sapiens
atggtgtatatgtgccacattttcttaatccagtctatcattgttggacatttgggttggttccaagtctttgctattgtgaatagtgccacaataaacatacgtatgcatgtgtctttatagcagcatgatttatagttctttgggtatatacccagtaatgggatggctgggtcaaatggtatttctagttccagatccctgaggaatcaccgcactgacttccacaatggttgaactagtttacagtcccaccaacagtgtaaaagtgttcctatttctccacatcctctccagcacctgttgtttcctgactttttaatgatagccattctaactggtgtgagatggtatctcattgtggttttgatttgcatttcyctgatggccagtgatgatgagcatttttttcatgtgtcttttggctgcataaatgtcttcttttgagaagtgtcttttgaattgtcttttacaacctggtgaaaagcttatgacatgtaagtgaccatttaaatcagtgatacctgatgagaactttgctgcacataaaaatcaccaatggagcttaataaaaatatagcccaataggctatagccctcact

SEQ ID NO: 883030 - DNA, 618 bp, Homo sapiens
aaaatttgtgtgactcgctttattatgatacttgggggtctggaacaaaaccagcaataactccagaaatacaagtatgcttgcatttttcatatttcatttcattattgctttacttacctgtctctaagaatagagtgtatagccatccaaggtcagaggctgtgttttatttatcctcatttctggcatatagttgaagctaaacatatttacagagtgaataaacaacaggatttcttacaaccctatgtttaacttgtgattcaccacaaaagtccacttttttgctttctatagctttgcccaagcatttcataggcaggattaacctagctatatcatatatatatatatatatatatatatatatatatatatatatatatatatatatytcattcacacatatttttaaaaactcattctacattatcctccaaacattgtattattgccaaaagttgttgattcatatccaaccaattaagccatttcttggaaatatgttaagtacagttaatgatgtcacttattaaaattaaatttattgaagttttatgtatatccatttattgacagttttgtagtcttttctggcataagacatgtgttggg

SEQ ID NO: 883031 - DNA, 643 bp, Homo sapiens
tttcatgcataattattgtgagaaattattttttaattacagttttccagaagagaaaataatctaaagcaaatttacagaatgtggcaatgatttatgcttttaaaaacaggttttcaagacatttcccttattggaacaattatttttgcataaataatttaaaaacagtaaagagattctctattgttttaatagaagttttagttttgaaaaaaaacaaggcagccatgcttttgaatttacaatgaaactatcatttttgtcatttatttgtgtawgtaggatacaatatattattactcatgaaatgcacaaagtacagacaatgaacgcaaattggtgaatttatgcctgttatttgatgtataattaatgttgttaggcttttcttattgtaaatttatttacaataagaaatacaggtacatttatccataaataaatcatgtacaaatgataaaatctgtatttaatagataaaatctgtatttaataaaatgacagaagagtttaccaaatctatactacttacctgtgtcgacaaccccgagagctaatgacccaaaagttgccactgtaattgtctaaactctatttagtaggaaattcaagtcaccatatgaactatttattttttatt

SEQ ID NO: 883032 - DNA, 628 bp, Homo sapiens
atggtaacccacacacattctgattattggcaaacattcatatagataaatctcccttttgcttgataatgagtgaccatataaaaaaatcaaagcaaaatacaaaaggataagaatctacaggaacaaactgtccaattaaagaatcaatggaagaatttgacctgcagcgacaaattgttcaattgatccaatatatgtaaccgtaatctgaagcctaagaaacagtacagtagaataaataaaaatgctggatttcagaggaaggacacatttttgaaagtgttctcttccatgaaaccaaagamgatttaaagaaccaatttggcatcttcaataagatgcacagaatagggattgggctgaacctatgggcatggtgggctccaaaatccaaggcaggtagttgtggttgagacctatgctcctgtagttagtgttcccttgcaagtatttcatgcaagacggagaccagaaacaaaaccatggcctgaagtcaggttgtagagaggcctaagttacctctgagaggaagctgaggctgaaagaaatggaactatgttgttggctagacagagtttatagagtcctctgggctcagggaagtgaaaggaaaaaggagtcttct

SEQ ID NO: 883033 - DNA, 645 bp, Homo sapiens
catggctcaccttgaccctgcttttaggcagagcttctccaatctatcagcctctccatttgacagccatttgctccctttaattttttttttagtatcatttacctgaatttgtgaaatatagaaaagcattagatatagacttgcaatgctctgtcctaaatagtaaaatgtaaggtcatttctttctttttttttttttggacacagagtctcactctgtcacccaggctggagtgcagtcatgcgatctcggctcactgcaacctctgcctcccargttcaagcgattctcctgcctcagtctcccaagtacctgggattacaggtgcctgccaccacacccggctaatgttttgtatttttagtagaaacggggtttcactatgttggccaggctggtcttgaactcctgatctcaggcgatccacccaccttggcctcccaaagtgctggcattatagtcgtgagccaccacgcacggccagaatgtaaggtcatttctaatagaactttcctcttccttatttgctccccttcctggaaagatatttagcttgttcttatcttagtacttcttttctacctctaaaactatgtagtgaagtatgatcaatcaagcttaaaatatcttagttgcaaagg

SEQ ID NO: 883034 - DNA, 639 bp, Homo sapiens
ctcaccttgaccctgcttttaggcagagcttctccaatctatcagcctctccatttgacagccatttgctccctttaattttttttttagtatcatttacctgaatttgtgaaatatagaaaagcattagatatagacttgcaatgctctgtcctaaatagtaaaatgtaaggtcatttctttcttttttttttttggacacagagtctcactctgtcacccaggctggagtgcagtcatgcgatctcggctcactgcaacctctgcctcccargttcaagcgattctcctgcctcagtctcccaagtacctgggattacaggtgcctgccaccacacccggctaatgttttgtatttttagtagaaacggggtttcactatgttggccaggctggtcttgaactcctgatctcaggcgatccacccaccttggcctcccaaagtgctggcattatagtcgtgagccaccacgcacggccagaatgtaaggtcatttctaatagaactttcctcttccttatttgctccccttcctggaaagatatttagcttgttcttatcttagtacttcttttctacctctaaaactatgtagtgaagtatgatcaatcaagcttaaaatatcttagttgcaaagg

SEQ ID NO: 883035 - DNA, 636 bp, Homo sapiens
tgtaatcccagctactcagaggctgaggtaggagaatcacttgaacccaggaggcagaggttgcagtgagccaagaccgtgccattgcactctagcctgggcaacaagagcaaaactgtctcaagaaaaaagaaaaagctaaaaaagtaaaattttctttgtagcaaacaagatttattaacatattcaatgttatccattttatgagttaaaacttataataatttaaatcataatagtactaattttagacaggcttctgacttgatgatggatgrtgttgttttgtgattttttaatagataatttgaactagttcttagtgaagaaattaaagaagaaactcactaaatgacataaccaagctatttaatgctatttaattaattttaatttaatgctaccaagctattattgcctagatagagttctaaattctatgaattatgaaaattagtactggtaccaataaaataaatataatttaaattttagctttctcatatattttataaaattacaattgctatgatcactgaatgtgccattcatataaatgtgtcttgggctgaacacaccataaagaaacagattatttgccttatgtatatcttaaaatgtggaaatgtcttattc

SEQ ID NO: 883036 - DNA, 564 bp, Homo sapiens
tgacactaattgggctgtgaaaagatacctcaacatccttgcttgagtggtatcaggaaaggccaggcagagagctatgatttgatcccaactggatgaagaatgttaccaaactacagttcccatcaaaatcccagcaagattttttgtagatatagacaaagtcattctaatttgcatataattagagaaaaaactttaagagctaacaaatatttggggaaataaagggagactaaagtgggagggatcagtytacccattcccaaaacacatactatatagctttttatgcagtttatttcataaaataaacaagtattttgttattggaaaattagatggacagatagatagatgagtggaatagaagagggaatcaagaaatacacctgcacaaatactcccactggcttttggcaaaggtgcaaaaccatctgaatggctgaatggagaaatgacagccttccaacaggtacagccagagcaatcatacatttattaactcataatagaccatacgctaaataaaaaagtgtaaaattataaaactttttgaaaaca

SEQ ID NO: 883037 - DNA, 572 bp, Homo sapiens
agcagccatttatagatctcccccaaggaatgccttccttccccagggtattaattattaatattccttgctaggaaaagaatatagtgatatcttccctacttccatatccatttataggctctctgcaagaagaaaaatatggctytattttgcccaaccctgcaggcagtcagaccttatggttgtcttcccttgttccctaaaatcgctgttattctgttctttttcaaggtgcactgatttcatattgttcaaacacataagttttacaaccaatttgtacagttaacacaattatcatagtggccctgaggtgatgtacatcctcagcttacaaagataataggattaagagattaaattaagacaggcataagaaattatgaaagtattttttgggaactggtaaatgtccatgaaatcttcacaatttatgttcttttgccatggcttcagccagtccctccatttggggtccctgacttcccacaacaaagtaatcttttggtttgttgattttctctactttgttcatctctgttccaatctttattatttccttcctctaa

SEQ ID NO: 883038 - DNA, 572 bp, Homo sapiens
agcagccatttatagatctcccccaaggaatgccttccttccccagggtattaattattaatattccttgctaggaaaagaatatagtgatatcttccctacttccatatccatttataggctctctgcaagaagaaaaatatggctttattytgcccaaccctgcaggcagtcagaccttatggttgtcttcccttgttccctaaaatcgctgttattctgttctttttcaaggtgcactgatttcatattgttcaaacacataagttttacaaccaatttgtacagttaacacaattatcatagtggccctgaggtgatgtacatcctcagcttacaaagataataggattaagagattaaattaagacaggcataagaaattatgaaagtattttttgggaactggtaaatgtccatgaaatcttcacaatttatgttcttttgccatggcttcagccagtccctccatttggggtccctgacttcccacaacaaagtaatcttttggtttgttgattttctctactttgttcatctctgttccaatctttattatttccttcctctaa

SEQ ID NO: 883039 - DNA, 634 bp, Homo sapiens
tattcaacataatattggaaattctggccagggcaatcaggtaagagaaataaataatggggcatttgaataggaagagaggaagtcaaattgtctctgcagatgacatgattctatatttagaaaaccccatggtctcaatcgtcacagtccaaaaactccttaagctgataagtaacttcaggaaagtctcaggatacaaaatcaatgtgcaaaaattacaagcattcctatacaccagcactggacaagaagagagccaaatcatgaatgaactcccattcacaactgctacaaagagaataacatatctagaaatacagcttacaagagacgtgaagaacctcttcaaggagaactacaaaccactgctcaatgaagtaagagaggagacaaamaaatggaaaaacattccatcctcatggataggaagaatcaatatcatgaaaatggccatattgcccaaagtaacttatagattcaatgctatttccatcaaactaccattgactttcttcacagagttagagaaaatactttaaatttcatatggaaccaaaaaagaacccatatagccaagacaattctaagcaaaaagaacaaacctggaggcatcagactacctgacttcaaa

SEQ ID NO: 883040 - DNA, 671 bp, Homo sapiens
ataaacactacaaatgaaatataccacaaattaaaactatataccaagaaacctcagtggctgcctcaggaggatcattgactcccacaatgatcataatcacaactacagtaaacacagtcagctcaaccagaaaggttagactctcattttggaagtagtacaatacaactgggagattccatgactatctcgactaccttcattctttatcaatcaaagggattttctgcagcatgcctatgttaccacattgattttgtggaaattcaaccttgataaatatctttgatttgcaatggcttkcacaagaacataaattaccttaatctgatgaaactgactactgtcaatgcacaaaacaatcattggatatttatagataaattagatgcatgtaaaagaaggaatatcggaagataatatactcattgcctaaacattaaaaggtatttatcatatattttaagtaccactaattgttatggtgataaaagaaatttaactatttcttttaagtctttgcttattctctgaaatatatttcagcctgggaactctgaaaattcattataagacataggcttagatggaagttgtttacttgggaaattattttaggaagcagtagtgagtaacagaagatatcaaacaagaacagatggaaaatt

SEQ ID NO: 883041 - DNA, 640 bp, Homo sapiens
gacccagagggaggtaattgaatcatgggggtgggtttttccggtgatgttctcaagatagtgaataggtctcatgagatctgatggttttatgaagggcaattatcctgcacatgctctcttgcctgccaccatgtaggacawgtctttgtccctccttcaccttctgccgtgcgtgtgaggcctccctagccatgtggaactgtgagtccattaaacttctttttctttataaattaccgagcctcgggtatttcttcataggaatataaaatggactaatacaaatgcacataaaataaatatactatcttaagcacttttaaatgtatggtttagtagtgttaagtatttttatgtggttgtgaatcaacatccagaactttttaatcttacaaaactaaaactctatacctgttagaaaacaactcccatttctcctccacccggatcaccattctacttttcgtttacatgactttgattactgtagatacttcatataagtggaatcatggtatttgtttttttgtgactagcttattttacttagcaaaatgtcctcaagtttcatctatgttataacatgtattattataattctcttcctgtttaaggctaaatattgtcccattgtatg

SEQ ID NO: 883042 - DNA, 574 bp, Homo sapiens
taaatttaataactgaatacagttaattttaattttaaaataataaacactttaattgtattatttagttatataatcatattttatttatttatttatttttgagatggaagctagctctgttgctcaggctggagtgcagtggcgccatcttggctcactgcaacctccacctccctggttcaagcaattctcctgcctcagcctcccgagtggctgagactacaggctcacaccaccacgcacagataatttttgtatttttagtagagacagggattcactgtgttggccaggctggtctcgaactcctgacctygtgatccgccagcctcggcctcccaaagtgctgggattacagacataagccaccatgcccaaccttattttatttatttaaatgcacatgtacacatttatattaagattatttaagtctaaataaatttaacttttaaaaattaattaaattcaagagaaatttgaagatgtatcatgtataatgaacatttgaacaaaagtaatattcactgcctgtgttaaaagtacaatcaaacaattaatttactaaaaa

SEQ ID NO: 883043 - DNA, 589 bp, Homo sapiens
aaaactaaaacaagtctgtgttaatcagttcaggctaccatgatgaaataccatagactgggtggcttgaacaacatgaattcatttctcacagttcgggaggctgggaagtcctcagtcaagatgctggctgatctggtttccrgaaagggctctcttagcagcttgcagagggctgcctcctggctgtgtccttccatggtgggaggagagagaagggtaggggaaacaagctctctggtgtctcttataagggcacttgtcccatcacaagggcccctgatgacctcatctaaacccaattacttccccaaaatcccacatccaaatactgtcacatggggggtgaaggcttcaacacatgaattttgggggagacaaaattcagtccatagcaaatttgtttccaggacatctgctgttaaagaaaggtgaaaggaagctcttcaaacagaagtgaaataacagacgaaggtgtggaacttcagaaaggaaaagagaacaacaaaatgggttaaaataggagtaaatactcttctcctcatgagctttttcattttctcatgaggtttttaaaccatatttgatg

SEQ ID NO: 883044 - DNA, 631 bp, Homo sapiens
tgcttcaaatgccagtgttgtagtttaaatagttaattgtaactaaaatacaactacaccagcctgacaggtccctaagctgttaatcacccaattacctacttactatggatgtgttttatatttttaactgggagaaagctttragcagggggaataaaaaagaaaaaaaaaggaaagaatatgaaaaagcacaagagcttttgagaaagaggacacccagagagaacatcacataatttacaattggcctcagaccaatccagggtgcaaggaagccattcttctgtatcctcggcaaccaatctgaaaatttccccataaaccggcttcctgcccatgtgtaattcgtgcttatcaattaaaatcccattaccttatgcaacatgtgtatgtcatgtcctctggcagctggatgtgctgaatgtaaagccaggcctgacctaaataacctgaaactctttgcaaacacatttttatgtggattagaaaaatacttcagaagatttataggtcactgatagaaatatgtttttatggaggctcccactttaatctaggcctggtttagacacatgtttcttctgaaaaatttaatttgcacatccctgtctactggaatgtcacaaca

SEQ ID NO: 883045 - DNA, 621 bp, Homo sapiens
ctactgaactggttaagcaatttttagtactgcttataccagactcaaagcagctgtggaaaatgtaaatgactttcaattctgactgctgcttacataagcagactgtcacgtatattggagttcacaccctgggtactttattcctagaggggcaagtcaaagaaagactacatacacttttatttttagaaccacagctgtgtatgtgtgtgtgtgtgtgtgtgtgtgtgtgtgtgtgtgygcgcgcgcgcacgcgcgtgtgtgtgtgtgtgtgttctactctgaattccaaaagaaagataccactttggagagttatttcagtgaaaaaatgtctagtcctttaatttgacatttgccatgaatgctgggtaaaacttactcctgttagccttcacttcagtatcccctaagttaggcagtaataattcttcttacctttcattcactagggaatgtgtggcttaattttatttttctccctagcaattgttagaaaataaaaaatgaaatgtagaaaaattattacaaatgaaccaacagaaactaagaaacatttccaagctatgttatttttaaggtaaatgagggtagactctaacagcaaagcacttccgt

SEQ ID NO: 883046 - DNA, 621 bp, Homo sapiens
ctactgaactggttaagcaatttttagtactgcttataccagactcaaagcagctgtggaaaatgtaaatgactttcaattctgactgctgcttacataagcagactgtcacgtatattggagttcacaccctgggtactttattcctagaggggcaagtcaaagaaagactacatacacttttatttttagaaccacagctgtgtatgtgtgtgtgtgtgtgtgtgtgtgtgtgtgtgtgtgcgcgcgcgygcacgcgcgtgtgtgtgtgtgtgtgttctactctgaattccaaaagaaagataccactttggagagttatttcagtgaaaaaatgtctagtcctttaatttgacatttgccatgaatgctgggtaaaacttactcctgttagccttcacttcagtatcccctaagttaggcagtaataattcttcttacctttcattcactagggaatgtgtggcttaattttatttttctccctagcaattgttagaaaataaaaaatgaaatgtagaaaaattattacaaatgaaccaacagaaactaagaaacatttccaagctatgttatttttaaggtaaatgagggtagactctaacagcaaagcacttccgt

SEQ ID NO: 883047 - DNA, 627 bp, Homo sapiens
aaagtactatataaaggtgggtgtataaattaggtaccttttaaaggaaaattattattctgttattccttgactcataaatctctgtattgcaggagggctctatggatagcttatatgagccaatcccagagcaacaagctaaccaagaaaacatgtctagtagaactgattctcctatcccaccctttggagagagtgaacaaacaccaaacaatctcttcgtggtgagtgaagcattgactggagtggatttttttttctctattatagttctagaatctcttgcctaatgatacytattaatacagcaaaaattcactgttctcagaaagttattccttttcctttagtttctgcttttctctttcttgttgtcttttttatgattttgacttattaatatgaaccaccatttattgaatgtgcactagatgattatataagttaacacaatcctcaaagcaaccttatgactataaataattatatcattttctagatttggaagttgcgagaaagaaaggcaagataagatactaaaggctataaactattaagtgttaaagttggcatttaaacagatacatatctgaatcagtagtttctggcaaatcaggtggtggt

SEQ ID NO: 883048 - DNA, 627 bp, Homo sapiens
aaagtactatataaaggtgggtgtataaattaggtaccttttaaaggaaaattattattctgttattccttgactcataaatctctgtattgcaggagggctctatggatagcttatatgagccaatcccagagcaacaagctaaccaagaaaacatgtctagtagaactgattctcctatcccaccctttggagagagtgaacaaacaccaaacaatctcttcgtggtgagtgaagcattgactggagtggatttttttttctctattatagttctagaatctcttgcctaatgatacctattaatacagcaaaaattcactgttctcagaaagttattccttttcctttagtttctgcttttctctttcttgttgtcttttttatgattttgrcttattaatatgaaccaccatttattgaatgtgcactagatgattatataagttaacacaatcctcaaagcaaccttatgactataaataattatatcattttctagatttggaagttgcgagaaagaaaggcaagataagatactaaaggctataaactattaagtgttaaagttggcatttaaacagatacatatctgaatcagtagtttctggcaaatcaggtggtggt

SEQ ID NO: 883049 - DNA, 740 bp, Homo sapiens
aaataaatggatcagtgaaggttcattactcaagctaaagaaagtcttaataataatggagagccaatgatgcagcggataaaattgtcagctttggatttgagcagttgtggattctctttctagctctgtcacttagaagctatatgaccttggaaagttgcttcaagtcttgcagtctctatttccttacactgtagaacaaggtgaataatgttccgtataaatttgccaaattcaactgtggaaaacagaatctactcttgctactagaagcaggcaggatttagcatagaagttagagaacgctcagaagggctgattttcactctacagtagggactgaaaatcatagccttaggcagcccgtaattgtatcatgcacgagctaaaaatascttttatatttttaaaagtatatttaaaaacagaaacaaaaataaaggagacagtagaatgcaatagaaactgtgtctcacaaacctaaaatatttctatctgattttcacagaaaaagtttgctaacccctgccctagagctacactgtacaaccacaggtggcaattgagtacttgaaaagtgactagtccaaatgcagatggacaataagtgtaaaatatataatatgttttacagacttcatataaaaaatgagtaaaacataggttattaataattttgtaatgatgatttgatgaagtgataatatttgatatattttaggtaaaaaggaaatttt

SEQ ID NO: 883050 - DNA, 575 bp, Homo sapiens
tcattacaaggtatggagaaaaatacaaacacatgatttatttttttttcatagcagaaataaatattttagattcatctaggtgtaagttagaaaattaaacataattgaattgaatttatataaacattccttgggtgcttayattatgtgagatactgggctaaaaatttaattgaatgagcgagttcctgttcttcagcaatctggtgaagaaatacaacctaaggtgacattaccgttcactttaacagtgaggtatctggacagtgttctggaagactgcagagactgatgtaaagcaaaagtaaatgaaggagcctaggacaggctccatggaaatatgacttagctgacttttttttgagacagagtctctgttccccaggctggagtgcactggcgtgatctaggctcactgcaagctccgcctcccgggttcacgccattctcctgcctcagcctcccaagtagctgggaatacaggtgcccgccaccacgcccgacttagctgacttttaaaccatgtgacaaaaaatagtcagcaaagaacagaaaaagatttaagcaaggac

SEQ ID NO: 883051 - DNA, 658 bp, Homo sapiens
aggctttgcaggaatccctgtatcctgaacacaagaggataagaggcttgtgaggagctgttctctggccctctccccatcactgccgtttcttccctgggaggctgtcatgaaatgctttctcatcacctttggtggcctgaaggtatgcaccattctttttcaccttctcaggatatagctgcgcaccacacaactgctcagctgtagccaagaattggctccttcatgaggaagtatgccacacctttgtgtggcactcatcggctctttttgttttggtgtcatcctttttggtatgtaggatgaggaccagggagctggcacctttggctactcttctttttgctatatatgtaagtagtagacaatctaaatctgaaagtgccttcttgtatctttactagctgagtcmatcagctcatattaactcatttaatcctaaaaattaaatagtgctttttatacatgtgagtaaactgagatacaaatgttgcataggtcatcctgctaagtggtagaaccccaatttaaaccaagatagtcttaccatggagcctgcactcaacccctgcactaagctgccttttatggttatgcaaatattgtaaaaaagaaaggaaatccacgaggctatatcaaagacagataatagcaa

SEQ ID NO: 883052 - DNA, 571 bp, Homo sapiens
cggctgcagtcttcacaaacactgtacacttaggctatgctaaatttataaaatatttttctttctttaataagaaattaaccttagcttattgtaactttttaactttataagcttattaattttcttcaacttttgattcttgyaataacttaaaacacaaacacattgtacagctacacaaaaatatctcctttctttatatccttattccataagcagtttattttttaatttttttttttttttttactttttaaacattgttgttaaaaactaagatgcaaacacacccattagctcaggcctacccagggccaggatcatcaatgtcattgtcttccacctccacatcctgtctcactggaaggtctccaggagcaataacagggatggagctgtcatctcctaggctaacaatgccttcttctggaacaccttctgaaggacctgcctgaggctgtttttcagttaattttttttaaaagaaaattttttgagattttgtgattttccccacaaaattcactctgtgatttccccaccctatcagggctccttgagacccttt

SEQ ID NO: 883053 - DNA, 600 bp, Homo sapiens
ctaatgctatccctcccctagcccccaacccatgacaggccccaatgtgtgatgttaccctccttgtgtccatgtgttctcattcttcaactcccacttatgagtgaaaacatgcggtgtttggttttctcttgtgttactttgctgagaatgatggtttccagtttcatccatgtccctgcaaaggacgtgaactcatcctttttttatggctgcatagtattccatggtrtatatgtgccacatttgcttaatccagtctatcattgatgggcatttgggttggttccaagactttgctattgtgaacagtgctgcaataaacatacatgtgcatgtgtctttatagtagaatgatttataatcctttaggtatatactcagtaatgggattggtgggtcaaatggtatttctagttctagatcccgaggaatcgctgcactgtcttccacaatggttgaaataatttacactcccaccaacagtgtaaaagcattcctatttctccacatcctctccaacatctgttgtttcctgactttttaatgatcaccattctaactggcatgagatggtatctcattgtggttttgatttgc

SEQ ID NO: 883054 - DNA, 565 bp, Homo sapiens
cctactctcagaggaatcaaaaatattaataccattccaaatattttgtatgtttatattagaatcttatccataaagtaatatgatagcaaaattcacagaaaaattacttacaaacgtatgactgaatttattttaaaatgaggcttgtaaaaaatagaatattacttatttaccgaattagtttgatttytttctagatggagaaatttggaatgtgtttcctgcttatatttaaaattgtggaagctaaatagaattttctaaattacttaccaatgtgagttatccattttttatcatcaaaaacatttttgttttgcacagtttttgtcttgcatgatataactacctaagctttacatagactttaaattggaaaggtgacagcaatgacttataagattgattgagccattattttactcacaatttatgtaacattatgtatccagaatttcaggaaactgcagaggaatcggacatacatcctttcttcaacaaactaagagactagtaaaggagaagacatttacataaataactttggtagaaaatgaaagaa

SEQ ID NO: 883055 - DNA, 661 bp, Homo sapiens
aaaaaaaaaaaaggataaatagaatccttagtttcataatctaatacccaaaatgtccagcatacagtaagaaactcacaggaaaattacaacttgagtgagaaaagacaacagacagcagcacccaagtgaatcagatgttggaaataagtgataaggattttaaagcagtaattacaaaaatatttcatgtggcaatgacaaattcccctgacacaaatttaagaaacaaaaagtctgagtggacaaacaacagttatacaaaaagaaccaaatggaaattatagaactaaaaaatataacaataatacaacctgatgattgggtttaatcacrgaatggagatgacagatcgaatcaatgaatttgaaaacagatctatagaatttttccactcttaactatacagagaaaatagactgagaaaaaattaacagaatatcaagaacctgtgaacaataccaaaagatctagcatgcatattatcagaggcccagaaggagatttaaaaaaagaacattattgaaaaagtattccatgaaatgatgactgaaaagttctcaaatttgcagagtagagttttgcagtccttgggttttcagaaattaagtatagtctacttactaagggctttgaaggctcttggtcttgtttaacctaa

SEQ ID NO: 883056 - DNA, 629 bp, Homo sapiens
gtgacgtgtaggaagatagggtaagtgaaagtgacagtgatgcaggggatcactattggatggtggaggcaattctagtggagtggggagggggcaagcgggaggaggaagtgagtcaaagggaacaatgtggagagaagacttgctgcaggtgttttgataaaaagaagctgaagaaataggacagtacctagaagagaataaggggtaaaaagtgagttttgtttattaagtgaaagagaatggtgcagaatgtggatactatgctacaatttgtgtgttgygactttttaatagatagataatagagattgataagaggttagatagatagatacatacatacatacatacatacatatatagcttgtatgtgcgaaaaatatttctggaaaaattcacaaagtactaataccatgattgtttctagggaaggaaatggctggaagaaggatgaaagattatttctttttgtgcttttcaaatatgtatcatatacaggaatcatccatgcagaagtaaacaaatccttcattactcaaaatactatgtaaattatactcaactgtgaacatgacttaatttttctctattcaagttgacatatccctgtaagtgtaaaaagctgg

SEQ ID NO: 883057 - DNA, 629 bp, Homo sapiens
gtgacgtgtaggaagatagggtaagtgaaagtgacagtgatgcaggggatcactattggatggtggaggcaattctagtggagtggggagggggcaagcgggaggaggaagtgagtcaaagggaacaatgtggagagaagacttgctgcaggtgttttgataaaaagaagctgaagaaataggacagtacctagaagagaataaggggtaaaaagtgagttttgtttattaagtgaaagagaatggtgcagaatgtggatactatgctacaatttgtgtgttgcgactttttaatagatagataatagagatwgataagaggttagatagatagatacatacatacatacatacatacatatatagcttgtatgtgcgaaaaatatttctggaaaaattcacaaagtactaataccatgattgtttctagggaaggaaatggctggaagaaggatgaaagattatttctttttgtgcttttcaaatatgtatcatatacaggaatcatccatgcagaagtaaacaaatccttcattactcaaaatactatgtaaattatactcaactgtgaacatgacttaatttttctctattcaagttgacatatccctgtaagtgtaaaaagctgg

SEQ ID NO: 883058 - DNA, 629 bp, Homo sapiens
gtgacgtgtaggaagatagggtaagtgaaagtgacagtgatgcaggggatcactattggatggtggaggcaattctagtggagtggggagggggcaagcgggaggaggaagtgagtcaaagggaacaatgtggagagaagacttgctgcaggtgttttgataaaaagaagctgaagaaataggacagtacctagaagagaataaggggtaaaaagtgagttttgtttattaagtgaaagagaatggtgcagaatgtggatactatgctacaatttgtgtgttgcgactttttaatagatagataatagagattgataaraggttagatagatagatacatacatacatacatacatacatatatagcttgtatgtgcgaaaaatatttctggaaaaattcacaaagtactaataccatgattgtttctagggaaggaaatggctggaagaaggatgaaagattatttctttttgtgcttttcaaatatgtatcatatacaggaatcatccatgcagaagtaaacaaatccttcattactcaaaatactatgtaaattatactcaactgtgaacatgacttaatttttctctattcaagttgacatatccctgtaagtgtaaaaagctgg

SEQ ID NO: 883059 - DNA, 629 bp, Homo sapiens
gtgacgtgtaggaagatagggtaagtgaaagtgacagtgatgcaggggatcactattggatggtggaggcaattctagtggagtggggagggggcaagcgggaggaggaagtgagtcaaagggaacaatgtggagagaagacttgctgcaggtgttttgataaaaagaagctgaagaaataggacagtacctagaagagaataaggggtaaaaagtgagttttgtttattaagtgaaagagaatggtgcagaatgtggatactatgctacaatttgtgtgttgcgactttttaatagatagataatagagattgataagaggttagatagatagatasatacatacatacatacatacatatatagcttgtatgtgcgaaaaatatttctggaaaaattcacaaagtactaataccatgattgtttctagggaaggaaatggctggaagaaggatgaaagattatttctttttgtgcttttcaaatatgtatcatatacaggaatcatccatgcagaagtaaacaaatccttcattactcaaaatactatgtaaattatactcaactgtgaacatgacttaatttttctctattcaagttgacatatccctgtaagtgtaaaaagctgg

SEQ ID NO: 883060 - DNA, 649 bp, Homo sapiens
gtaattttattttttaagaataccataaaatctatttaagtcacatcctgtctcccagtgaaataaaagacatctcagaagggatttcattgtatccttttgggtgtgtgtgttttgtatttttgcattttcccaggaagaaatggagacagtgactcagttaatgcattatgcttatcctctcattgctccattcttggttttggtgatcatttgaaatacatggagattgtttgctcaactctctcasgctgctgcttgttaaataacagcacttgtcagccctatgtcatttttgtagtacagttacaaataaacaggactccaggcctcaccagtcaaagttaccctttggaaactaatttctccctcttccctctttacttctgctaccattgagagagaacgagagagagagagagagagaatattttggcactaataaaataatgaaagttcactcagtcttaatatttggatgtggacctctctcccattccacatccagctactccctgactcctgtatcccaatctcttacaaccataaatccgttctccatttggaaaattttgtcatttcaaaatgctatattgatagaattatagagtatgtaaactttagagattaattgtttcatcctagacat

SEQ ID NO: 883061 - DNA, 622 bp, Homo sapiens
ttcttgaatctgcaagattatgtcttttgcccaatttgggaagtttttagccattattcccttgaatactctttcaggttcactttctcccatcctgtgggcttctaatacaacacatgatggatcttttgattttgtcccacaggtgttggaggtgctatttttgttttctgtttgtttgtttattttacagtctgcattctccctgttgtttggattgggataaattttattgatatgtctttaaattcactgattctctcctttgtcatatccactctaatattaagtccattcggcaaatttatttttccattattatgttttttggttctttaatttctatttggttctttttataatttctattcatgactgggtttatttttatttgtttcaaaagaatttataattgattatagcagcatgtaygtgggctgctttaaaatccttttcgaataattccaagatctgactcatctcagtatgagccttaccttttggtgttgattgccttttctccttcagcttgattttcttgtatgagacatgatttcttggtattttgtatgttatgttagcctctggatcttatttatatcttgtattttagcaggcagtc

SEQ ID NO: 883062 - DNA, 552 bp, Homo sapiens
cttggctatagttttgtttaatgtgctgcttttctcgaatgctggttatgctaacagtgaagttgtcatgtggacatattcaggacctctggttagctaggatgttgcaggcagcagaaacagctgttgttttctccttctttggagccgacttgttctgttatgagttgctgtaatggcttgagttggttggcctccagccaggaggtggcactttcaagagagcaccagctgtggtggtagaaggggaatataagcttgccctaaattggccaggataagtattcaagtttctcaggtgatgggcggggccatagagcttccaagagattatcccttttgtatcccttcagctaccaggatrggtagagaaaaaccatcatgtggggacagggttaggtgggtttgagctgccaaactctcctcactggggcttgcagaggccattgtgggagacagcagggtggttctcaggccactggagctatggtccaaatggtattatggctacctgtactgtgttgttcaggtggcatggcaggcagggctgag

SEQ ID NO: 883063 - DNA, 552 bp, Homo sapiens
cttggctatagttttgtttaatgtgctgcttttctcgaatgctggttatgctaacagtgaagttgtcatgtggacatattcaggacctctggttagctaggatgttgcaggcagcagaaacagctgttgttttctccttctttggagccgacttgttctgttatgagttgctgtaatggcttgagttggttggcctccagccaggaggtggcactttcaagagagcaccagctgtggtggtagaaggggaatataagcttgccctaaattggccaggataagtattcaagtttctcaggtgatgggcggggccatagagcttccaagagattatcccttttgtatcccttcagctaccaggatgggtagagaaaaaccatcatgtggggacagggttaggtgggtttgagctgccaractctcctcactggggcttgcagaggccattgtgggagacagcagggtggttctcaggccactggagctatggtccaaatggtattatggctacctgtactgtgttgttcaggtggcatggcaggcagggctgag

SEQ ID NO: 883064 - DNA, 616 bp, Homo sapiens
tgattcgcaatggtgtttcagtgtggcccagagacccatagctggagcagtggtgtcttaaatagactgttcctaagacatgctgtaagcagtgttctctgctgcccctacactccttttttgggggaatggttttccaagcttcccgtaaatcctatgagctttccaattatctgctccctccaaaatatcttttcttataagttarcaatttatctgacttgcacccgagatcccaattgtgatgcatattggtacccactctttatctgatcagctgtggccagcttggttaaccatgtgatcaactttcctcagaaatagctgtatgagtgaggcaggaaaccagaggatattagagaacattaatccgaaactacaaaaagattaaaaaaaaaaaaaacagagaaaaaggtctttttgcatgcactagtttactctctataaacaaaaaagcaaaggtgcaatgactttgagggataatgaatttattctgttatcacggtgtattagtccattttcatactgctataaagaaatactcgagactgggtaatttacaaagaaaaagaggtttaggggactcacagttccacatggctggggaggcctcaca

SEQ ID NO: 883065 - DNA, 676 bp, Homo sapiens
accataagtgtatgtaacagccgcagtctgaacctggaaccatttctcccacctacggctcgcagcctttgccaagacagttcacgagaccatcctctctccctcagcatgaatcctctccacaaagtccacaaatttctcttgattttttactcctaccttctgatgcttgtatatatttgaacgtcagtggttgacattgtctaaattctttttatggaaggagaggtcttggcagttgcrgcaaggttaagagatcattctctgtatattcatcattatgcagaattcagcacacttcctgacagatagtggaaactcaataaatatttgtggattgaggaatggatgaataaattatgctccttaggccctgtgtaagtcagctggttgaagggaaggggagggtctatattctgtcacttatactcatattggacagcacagctttaatatcgtattgcttgttattgttttctactagcttgtgtcttcactttcatttaagcagagatctcctcagtctgttcactacattattctggttctcaaaaatgaagtacagtgttattctctccctatacccccaaagccagcacagaaacaatgtttccacaggtatgtcttaattaattcattcatcatttttcttgagataagagtcttgctctgttgc

SEQ ID NO: 883066 - DNA, 619 bp, Homo sapiens
agaattcacacaggggagaaaccctatgaatgtaatcaatgtggaaaaaccttcataagcaactctgttctcacaatacatcgtaaaacatatacaggtgagaaaccctatgaatgtaatgaatgtgggaaatctttctctaggagttcatatcttacaatacatcagagaactcacccaggcgagaaaccctatgaatgtaaggtatgtagmaaaaccttttgccacaagtctgatgccactaaacatcagaagactcacctagggggaaaaccctatgaatgtactcaatgtgggaaaacttttagtcgtaactcaggcctaaaagtacatcagagaacacatgcaaaggagaaaccctatgaatatactgagtgtgggaaatccttctctgagaaatcagtcctcacagtacatcagagaatacacacaggggaaaaaccttataaatgtaatgcacgtggaaaaaccttctacaataaatcagacctaaccaaacatcagagaacacacacaggtgagaagccctgtgaatgtaaggaatgtgggaaattcttctctaggaattcataccttacaatacaccagagaatgcatacaggagacaaaccctatgtgt

SEQ ID NO: 883067 - DNA, 535 bp, Homo sapiens
aaatcggttaaaatgaaaaattgtttaaaataatgttgagcacattacaaataatatgttagtgcttactgacattataattgtaattacttgtattacagcatacatgccaggaatacaaagacttggtcctatcccccctcaagcggagagattcttttttaaagaattatttaatttaaaaaaagaaagaaaagaaatgaggaatgactatgaaaatgtgtaactaatayagtaaaaccaacaaaagctgtaaataagatcaaaaaactgcaattttatgaaggattgaagtattacaaggctaagaaaaactaattttttctactccatctcctatgaactgtttgagcaaacatattttcactgattagatgttttcactgattagatattttcatgaatatattttctatgaactgtttgaacaaagacattttcactgattagatattttccctgattagatattttccctgactagatagatcaattatgtttttaaaaagacaaactatatcttgcatacctaccc

SEQ ID NO: 883068 - DNA, 535 bp, Homo sapiens
aaatcggttaaaatgaaaaattgtttaaaataatgttgagcacattacaaataatatgttagtgcttactgacattataattgtaattacttgtattacagcatacatgccaggaatacaaagacttggtcctatcccccctcaagcggagagattcttttttaaagaattatttaatttaaaaaaagaaagaaaagaaatgaggaatgactatgaaaatgtgtaactaatacagtaaaaccaacaaaagctgtaaataagatcaaaaaactgcaattttatgaaggattgaagtattacaaggctaagaaaaactaattttttctactccatctcctatgaactgtttgagcaaasatattttcactgattagatgttttcactgattagatattttcatgaatatattttctatgaactgtttgaacaaagacattttcactgattagatattttccctgattagatattttccctgactagatagatcaattatgtttttaaaaagacaaactatatcttgcatacctaccc

SEQ ID NO: 883069 - DNA, 465 bp, Homo sapiens
atgacaaagatgccaaaagctattgcaacaaaaaaaaaaaattgacaaatgtgacctaattaaatttaagagcttcttcacagcaaaagaaactatcaacagactaaacagacaacctacagaatgggagaaaatatttgcaaactatgcatcagaatctataaggagyttaaatcaataagcataaaacatacaaccccattaaaacatgggcaaagaacatgaacaggcacttttcaaatgaagacacacacgcagccaacaagcatatgaaaaaatgttcagtgtctctaatcattagagaaatgcaaatcaaaaccacaatgagataccatctcacaccagtcagaatgactattatcaaaaagtcaataaataacagattctagtgagggtgcagggaaatggaaacacttatacacagctggtgggaatgtaaattatttcacacattgtggaaagcag

SEQ ID NO: 883070 - DNA, 638 bp, Homo sapiens
attgttctatatttgacgtaactctaagttctcgtaagaaatctcaaacctgtctctaaatctcctctgttttcatctaaagattttgttagtgtatatctttgagcattcagaagtagacagttgcaactacaaattcatttcatctgttccacaatggyttggttacattgaaggattatttaacgactctataacatcctagttatattttctgagaaatttatggtccttatcgggcctcaatcaaatgtcattcatgtcttatttcacatgtagttagaaggggagtgtgtgtaaaatatggccatgaggtgactcttgcagtatctttactcatcttggaaacagaaaaaatgagctagtttcataaacttaatttctttacctcttcagttttctctacctgaaatattgaggcttctctttaactcatcttttaaagcacagaatttcctaaactttttaaaaattaaatgacttttcctgattttgcagttttcttttcccttcatgaacgttatcactgcagaaaaagcaacgcttgtactttcaagactataaaataagcccagtttataaaattattatttggaggctaaatatggaatttcagatactcactctgaaccacaaaa

SEQ ID NO: 883071 - DNA, 628 bp, Homo sapiens
gacaaaggtactctgcaaagtcagtacttttctggtattgccttttgcaatgaatggcatcaccacaggctgagtttccaatttgggagaccaggattcatgcttagcacctccctcttcttccactgccatatccagcccaccacaaagtcccatccattttacctcctaaatatctcccagattcctccacttttctccattgctcatgccatcacccagtcacagccaccatcatctctcaccgggaggacagcgagagcaaacattcacccttactccgccactctattaacagcacagaagctcatgtctctccccagcttaaagccctgcattggttcccactgcacttaggataaagtgaagtggcctctgcccacctattccgcgttgactctcaggmctccctcactcattcttgatgctccagccacaatggccaacctttagttccccaggaaaacctgtgatccccaactgggggctttgcatgtacagttcctcttgctaggatgctctttccccaggcccctccttctttactcatttaactcccattcctcctttgcatcctagcctagtagcactttctcagggaaccttccctgtccctgggaaccaaacc

SEQ ID NO: 883072 - DNA, 628 bp, Homo sapiens
gacaaaggtactctgcaaagtcagtacttttctggtattgccttttgcaatgaatggcatcaccacaggctgagtttccaatttgggagaccaggattcatgcttagcacctccctcttcttccactgccatatccagcccaccacaaagtcccatccattttacctcctaaatatctcccagattcctccacttttctccattgctcatgccatcacccagtcacagccaccatcatctctcaccgggaggacagcgagagcaaacattcacccttactccgccactctattaacagcacagaagctcatgtctctccccagcttaaagccctgcattggttcccactgcacttaggataaagtgaagtggcctctgcccacctattccgcgttgactctcaggcctccctcrctcattcttgatgctccagccacaatggccaacctttagttccccaggaaaacctgtgatccccaactgggggctttgcatgtacagttcctcttgctaggatgctctttccccaggcccctccttctttactcatttaactcccattcctcctttgcatcctagcctagtagcactttctcagggaaccttccctgtccctgggaaccaaacc

SEQ ID NO: 883073 - DNA, 669 bp, Homo sapiens
ccaacaatagacagtaaataaggtgattttaaatagaaacacacataaggtatgtgatgatcagatagtgaacatactgtgaccagaggctcctgggagcataaccctgtatttcccctaggagcaatggttcagtatttgctaattcagtgtttacagtgactttatagaagacaattactatgaataatgagaatcaactgaactgcatcacattatggtcctggagtatgaataggacccagaacagacagtaatgttaaaatataagggcctggggccaggcatgatggctcatgcctgttattctagcactttgggaggccaaggtgggcggatcacctgaggtcaggagtttgagaccagcttggccaacrtagcaaaaccccgtctctaataaaaatacaaaaattagctgggcatggtggcgggcgcctgtaatcccagcaactcaggaggctgaggcaggagaactgcttgaacctgggaggtggatgttgcagtgagccgagattgcgccactgcactccagcctgggcaacaagagcaaaactccatctcaaaaaatacatatataagggcctggatggaggttttgatgggctccaccgtgagaaactaagaaagtgtcatgcgaaataggagagcactcaactggagctggagaaa

SEQ ID NO: 883074 - DNA, 579 bp, Homo sapiens
atacagccatgaaaaagaacaagattgcatcctttacagaaacgtggatggaactggaggctgttatcctcagcaaactaacacagaaaaccaaatgccacatgttctcactaataagtgggagctaaataatgagaaytcatggacagaaagagggaaatagcagatactgaggcctacttgagggtgggggctgggaagagggagaggttcagaagagaaaaaactatctgatactatgcttagtacctgggtaattaaatactctgtacaccaaacccctgagtcatgagtttacctatataacaaacctgcacatgtactcctgaacctaaaataaacattaaaatattttacaaaaataaaataaattaacaattaaaaaaagaaaaaaatgagacaataaatagatcctgggaaaaactgtccccagaagtgttcttttaaatttgcactacagatgtaatccaagttgagtaaaatagaaaagcatggatttgctgttcctgaaagtcattcatggttaattgccgaacactttcatctgcagtgtctgtggaagggtagaaccttaagtag

SEQ ID NO: 883075 - DNA, 593 bp, Homo sapiens
ctgtttttcttcatctttccccttctaccatgttatgatgcagcatgaaggccttcaccaagtgcaggtgccatgctcttcccagcctttagaactgtgagctgaataaacttcttttctttataaattactccatccgtcatatggtgttatagcaaaagagaatggactaagacatgggacaaagattcagtaggcttattaaattatctatgtaactacagagagctagygaaccaatttcagcttaggggaaacaggaaattcggaaacaggaagcccagagaaaaatggcactggactgtgactcctattgcctcaggttagatcatctgacttcacaaggtaaaagcttctgcacacaaacctgcttcagcccttttccaccaatgggacacccttgctatgtagagtagtgcaaaactctgtcatttacttgtcatgggacattgggtaagtcactctgtattagtccatcgttttgctataaagaaatacctgaggctgggtaatttataaagaaaagaggtttaattggcttatggttctgcatgctgtacaagcatggcactggcatcttctcacttctggtg

SEQ ID NO: 883076 - DNA, 593 bp, Homo sapiens
ctgtttttcttcatctttccccttctaccatgttatgatgcagcatgaaggccttcaccaagtgcaggtgccatgctcttcccagcctttagaactgtgagctgaataaacttcttttctttataaattactccatccgtcatatggtgttatagcaaaagagaatggactaagacatgggacaaagattcagtaggcttattaaattatctatgtaactacagagagctagcgaaccaatttcagcttaggggaaacaggaaattcggaaacaggaagcccagagaaaaatggcactggactgtgactcctrttgcctcaggttagatcatctgacttcacaaggtaaaagcttctgcacacaaacctgcttcagcccttttccaccaatgggacacccttgctatgtagagtagtgcaaaactctgtcatttacttgtcatgggacattgggtaagtcactctgtattagtccatcgttttgctataaagaaatacctgaggctgggtaatttataaagaaaagaggtttaattggcttatggttctgcatgctgtacaagcatggcactggcatcttctcacttctggtg

SEQ ID NO: 883077 - DNA, 593 bp, Homo sapiens
ctgtttttcttcatctttccccttctaccatgttatgatgcagcatgaaggccttcaccaagtgcaggtgccatgctcttcccagcctttagaactgtgagctgaataaacttcttttctttataaattactccatccgtcatatggtgttatagcaaaagagaatggactaagacatgggacaaagattcagtaggcttattaaattatctatgtaactacagagagctagcgaaccaatttcagcttaggggaaacaggaaattcggaaacaggaagcccagagaaaaatggcactggactgtgactcctattgcctcaggttagatcatctgacttcacaaggtaaaagcttctgcacamaaacctgcttcagcccttttccaccaatgggacacccttgctatgtagagtagtgcaaaactctgtcatttacttgtcatgggacattgggtaagtcactctgtattagtccatcgttttgctataaagaaatacctgaggctgggtaatttataaagaaaagaggtttaattggcttatggttctgcatgctgtacaagcatggcactggcatcttctcacttctggtg

SEQ ID NO: 883078 - DNA, 649 bp, Homo sapiens
gaggtttggcagcctagaattccttatgccaaggatacaaaatgctggatataaaatccaatttccacctgcttacttgaatatctattttgaccaggtatgtaaaagacatgtacttgctgaaaatgttgtcttttacgctcaccactcacttcatgctgcttaaatatccatctttaatgaactcacctggaaactaattcactttgaaagcaaatatttaccaaaaaaatctgaggccaatagatgggtattatagaaaaaattacatgtgttctcaaagcacattttgagcctaayatacctttaaaatacccctctttttctattaaaatattatgacaaaatgttctactgttggaaaatacccaagtcccctcctctatttgtctattctatttttcactaatttcaatgaatacaataagttttttattttgaatttgttttgaacaaactagtatagggcaaaaaatgaacaaatgaaaactatgtggttagctgcctgaggtaattgcttgtaaatgtgatagtgtctaactgcataaaaatttgctataaataagaaaaaaataaatctgactctaagtagttttaaaaatccatttgaattcatcaaggagaataggaaatacattttcttttccaa

SEQ ID NO: 883079 - DNA, 593 bp, Homo sapiens
aacacttgagattcatatcctcataacttggaaggttattcttttgtttggacaaagaatactggagttttttaaatgtttgtacttcaactcatccatacttatgatataatccccaaaaagcagccagcaacccaaacctttaaggctgccaaccaggaaaaataacttagcacaacaatgatcttttctaaccataaataatggtatcttgggccaagcttcctagatagacttggattgaaacagctctttaccctagggctattaacygtataacatggatattgagaggaaaaaggcaaaaagaaaaaatgcaaaggaataaaattaattcttaaaatacctcaaattttgaataaatggggacatggacttcttgaatggtagttctgtgaattaagacaagccatttcttggtatgtgtgcagaaatcctagaagttgtgggatgcttgaaattatgtttatgactccaaaactcaagtgtgcatgtcaaatataggttgtagggacagatctcaactaatctctgtatggtatttggctctaacaccaaaataataggacctaaaagagaaacaacattaaagt

SEQ ID NO: 883080 - DNA, 593 bp, Homo sapiens
aacacttgagattcatatcctcataacttggaaggttattcttttgtttggacaaagaatactggagttttttaaatgtttgtacttcaactcatccatacttatgatataatccccaaaaagcagccagcaacccaaacctttaaggctgccaaccaggaaaaataacttagcacaacaatgatcttttctaaccataaataatggtatcttgggccaagcttcctagatagacttggattgaaacagctctttaccctagggctattaactgtataacatggatattgagaggaaaaaggcaaaaagaaaaaatgcaaaggaataaaattaattcttaaaatacctcaaattttgaataaatggggacatggacttcttgaatggtagttctgtgaattaagacaagccatttcttggtatgtgtgcagaaatcctagaagttgtgggatgcttraaattatgtttatgactccaaaactcaagtgtgcatgtcaaatataggttgtagggacagatctcaactaatctctgtatggtatttggctctaacaccaaaataataggacctaaaagagaaacaacattaaagt

SEQ ID NO: 883081 - DNA, 616 bp, Homo sapiens
ttacaagacagagacagaacagggaacattttaaccttgctcagggcatgcccttagaaactataaggattgatgatgcatcaagattaatttgatgacttgcatttcaaccaagagggcagattttcaggaacgcatattctgacttggagctgggaaaggcacaaaccctgggcccagtccatctttggggactgagaacagagagttgagaactcatcttactaataattcctgcaatattggagtgtgtgtttttaacttggagtcagacacacttttcctcacccgcagagtggacagtaaaagtaatccagaatgttgcatctgtgttagctcttcttagaagggcctggagctgctacaggaagtttctcatttggaattatgaagttctttcttctcttgggccactttctcttgcaagtccagctgggcattaccctgccccstggaatttactccaacacagaatccttcatgcttaaccccaattccactgtctgggccttcggagtcagagccaaagctcagcagcagataaagtacaaaagctagcaaggtagaatttgaagcaaactgccctggtgtatggtttttagggctgccataacaa

SEQ ID NO: 883082 - DNA, 599 bp, Homo sapiens
ttagatttctagtggtcaccaaaaaggttgaaatggtgtcaagaataaacaaagccggatgctaaagaggtaaggacagattttcatcagtaatgtactattgcaataaggaaacatgttctgtataaactgaactcagcttcaatttggagggaggtgactgttgttttaaagggagaatgagagagtagggagggggcaggtattagagtcagggaagtaaaaaattacaaaaaaaacagaaacagggaattggttcatgtaaaatccacacaactttgctaactggagcttatcagagttaggctccttccctcccacagaggctgggagacagggtccctgtattcaggtgttggctgaaacaaacagtayatccttgtgacagccttgagtgttctcaggcaagcattttatatgtgggtttagggtcattcttaggaacactactttgagctattagaaactatattagtgagtgttcaagtctttatatgccaggctgaggcctagtcaagaagagggctccaaagagcctggctagagtttggtgaaggagagaatctgttatagtgaaaatttactactctcccacacct

SEQ ID NO: 883083 - DNA, 599 bp, Homo sapiens
ttagatttctagtggtcaccaaaaaggttgaaatggtgtcaagaataaacaaagccggatgctaaagaggtaaggacagattttcatcagtaatgtactattgcaataaggaaacatgttctgtataaactgaactcagcttcaatttggagggaggtgactgttgttttaaagggagaatgagagagtagggagggggcaggtattagagtcagggaagtaaaaaattacaaaaaaaacagaaacagggaattggttcatgtaaaatccacacaactttgctaactggagcttatcagagttaggctccttccctcccacagaggctgggagacagggtccctgtattcaggtgttggctgaaacaaacagtacatccttgtgacagccttgagtgttctcaggcaagcattttatatgtgggtytagggtcattcttaggaacactactttgagctattagaaactatattagtgagtgttcaagtctttatatgccaggctgaggcctagtcaagaagagggctccaaagagcctggctagagtttggtgaaggagagaatctgttatagtgaaaatttactactctcccacacct

SEQ ID NO: 883084 - DNA, 646 bp, Homo sapiens
gtattgttcatatgctgtcaggctacaatggcagagttaaatatctgcaacagagacaatatggcacacaaagctgaaaatatttactgtctggccttgtacagggagagtctgcccaccccggtgtagataaagtataacataccatcaattaagaaaaaatgtaatgacaattataccaaaaagtagttataaaatggcagaaaaaaatcaaaggagtatcttctaaaagctattgccaaagtgattgaggcattccttgtacattatgaacctsagcatccactataaagaatatcccgttaaaagccatgcttaataattccatgcaaattgtagatgttaagacataatcatttaatcacaaatgtcttagggttacagtaacaaaagcagccagttcaagaatttacttttttatacctacattttcactatccttagagaaatatttcagctaagaaaaaaataattttcttttttgtctttttttttcttaaaaagaaggttaagtacctttggtaagtatctttcaaatatcacaagaaggcaccagcatgtatatctcagtaattttttagccttcatatattatttgtgaaataaaatacaaacacataaaacaacacaaaacaaggtataaggc

SEQ ID NO: 883085 - DNA, 548 bp, Homo sapiens
atgttgtagtgattgaatagtttttaaatattagtattttcatttcaataaaatacatttaaatgtaaaacatgatctatgcaaaaacttgtatatgaatgcttctagcagcattattcatgataaccaaaaagttcaaatcacctttcatcagctgatgaaaggatgaacaaagtgtggtatattcaaacaagaggctattattctacaataaaatggaaaaaagtatacactacaacatgatgaactttgaaaayattatactaagtcaaagaagccagtcacaaaaggccacattttgtatgcttccatctgcatgaaatgttcaaaataggcgaatccaaagtggcagaaaatagattagtgttttgccagcagctggaggagggggaggaatggggagtgactgctaattagtactgggtttctttgtggggtgatgaaaatattctggaattagatagtggtgatgattgcataacttcatgaaaatgctaacaaccattgaaatgtacactttaaaaggggggactttgtggtaatgaatt

SEQ ID NO: 883086 - DNA, 634 bp, Homo sapiens
aagtgcgtgagtcccattttctccataaccttgcgagcatgttttttttttgtctttttaataatgaccattctttttttgagatgttgctctgccacccaggctggagagcactgcctcctgggttcaagtgattctcccgcctcagcctcctgagtagctgggatttcaggcgctcgccacctcacctggctaattttttatttttatttttttttatttttaatttttttagtaaagatggggtttcaccatgttggtcaggctkgtcttgaactcctgacctcaagtgatccacacgctttggccttccaaagtgctgggattacaggaatgagccactgctcccagccaataatgaccattttaactggggtaagatgatatctcattttggttttgatttgcatttctttgataatttgtgatgttgagcaattttcataactattggccatttgtgtgtcttcttttgtgaaatgtcctttgcccacctttaaatgggattgtttgttttctactattgagttgtttgagttccttgtatattctggattatcagttccttgttagacaaacagtttgcaaatattttctctgattctgtgtgttatctcttcattttgttgattgt

SEQ ID NO: 883087 - DNA, 646 bp, Homo sapiens
tccttttttgtagctattacaaatagaattgccttcttgatttttttcaactagtttatcgtttatgtgtagaaatgctacttattttgtatattgattttgaatcctgcaagtttactcaatgtattcattagatctaagaattttttggtggagtcctcagatttttctaatttataagattatgtcatctgcataaaacaactttacttccttctttgtggtttggaggttttttatttctttctcttgtctgatttctccagctagaacttctagtgctacattaaaaaagtgtggtgaaagtggacattgtcttgctccagttcttacaggaaaggctttccgttcctcctcattcagtatgatattagccgtgggttttcaaatatggcctttattatgttgaaatatgttccttctatgcctaatttgctgagagttttcatcayaaaaggatgctgaaattcttcaaatgctgtttctgcaactaatgaggtaatcatatagtttttgttcttcattctgttgatgtgatatattatctttattgatttgcatatgttgagccatccttgcatccctgatataaatctttcctcatcatagtgtatcatctttttgatatactgttgtattaagtttg

SEQ ID NO: 883088 - DNA, 646 bp, Homo sapiens
tccttttttgtagctattacaaatagaattgccttcttgatttttttcaactagtttatcgtttatgtgtagaaatgctacttattttgtatattgattttgaatcctgcaagtttactcaatgtattcattagatctaagaattttttggtggagtcctcagatttttctaatttataagattatgtcatctgcataaaacaactttacttccttctttgtggtttggaggttttttatttctttctcttgtctgatttctccagctagaacttctagtgctacattaaaaaagtgtggtgaaagtggacattgtcttgctccagttcttacaggaaaggctttccgttcctcctcattcagtatgatattagccgtgggttttcaaatatggcctttattatgttgaaatatgttccttctatgcctaatttgctgagagttttcatcacraaaggatgctgaaattcttcaaatgctgtttctgcaactaatgaggtaatcatatagtttttgttcttcattctgttgatgtgatatattatctttattgatttgcatatgttgagccatccttgcatccctgatataaatctttcctcatcatagtgtatcatctttttgatatactgttgtattaagtttg

SEQ ID NO: 883089 - DNA, 553 bp, Homo sapiens
cttatttgtccttttagcctcagatcagccagtccagcttccaagctcaatgctgctaagtgaatgaccatacacagagcagagaactaccaagctaagcctaataaagatgagatatttcagaaataataaactatgagtgttttaagccactatgattggggatggttttttacatagcaatgaatactgaaatagaaatgaagacagtcaccaaaatcttcagagagatgatacattaaaattaaatattaaagaacacattggcattgtctcagcaggcaaggggaacaaaacagagtgaatactatgttcacaaggcatataggcaagaatgaacactgatatggtttggctttatgtcctcacccaaatctcttctcaaaktgtgatcaccaggtgtctaggaagggcccttgtcagaggtgattggaacatgcatacagtttcccccatgctgttctcatgataatgaatgagttctcacaagatctgatggttttatacaggggtcttccccctttgccctggtcggaggtgattggaacatgcg

SEQ ID NO: 883090 - DNA, 609 bp, Homo sapiens
agatccctaagtttaccaatgtttctgattttctagaaagtgatgtcttgattacatgtaaggataagctcaatgagctacagagtaggtggagagaaatgtcttgaaatgattttgtaggcattatttacacactgtcctttttatttaactgtggacttgtcttagttaattaaataagatttgcctttaaatgtaatatttcttacatattttatctgattttatcctggtaggaagtatgagaaaaaatttcataaatatagagtacatctgttaatataggttttaatgccagtttgagcatttttgaatacattttgaacagttttccagacaaaaccatcaataagcattaatattctacrtaattatccatctttgcttcatagggttataattttttaatatttctcatagaacacctttcttgaattctgaatggtgagttagaggaaattataaaagtgttttattccagtttgtacaaatttattttgctgaaacaagggttttacatatatgataaaaaggaaaaagacttcctccagatgaccatcagaattttgaacattataaacaataccatcaatatttcaattaaaaata

SEQ ID NO: 883091 - DNA, 620 bp, Homo sapiens
catttgggttggatccttgtctttgctattgtgaatagtgccacaataaacatagatgtttatttataatagaatgatttatattcctttgggcatattcccagtaatggtattgctgggtcaaattgtatttctggttctagatccttaaggaatcaccatactgtcttccacaatggttgaactaatttacattcccaccaacagtgtaaaagtgttcctatttctcctatctcttgccagcatctgtcattttttgactttttactcattctgactggcgtgagatggtatctcattgtggttttgatttgcatttctccaaggwtcagtgatgttgagctttttttcatatgttttttggacatataaatatcttcttttgagaagtttctgttcatgccctttgcccactttttgatagggttgttgtttttttcttgtaaatttatttaggttccttgtaaattctggatattagacctttctcagatgggtagattgcaaaatttttctcccattctctaggtttcctgtttgctctgatgatagtttcttttgctgtgcagaagctctttggtttaattagatcccatttgtcaattttagctttcgttgca

SEQ ID NO: 883092 - DNA, 667 bp, Homo sapiens
agtctttcaactttgtttttgattttcaatctttagctattttagcactttcgtatttccatataatttcataataaaggcctgttgggattttcactgggattcattgaatctacagcaggagtcagtaatgtacagtccatgtgtcaaattcaccccagagtctgttcttgtagtgctttcaagctaaaaatagctataattacacttttaagtggttgcaaaaaacaaacctaagcaaaaaacaaagaatgtataatagagacgatacatagcttgcaaagcctaaaatatttactatctggttcctcacagaaaaagtttgccaacctttgaccttggtcaacctggaaagaatttaacattttaacaatattggatcttctgattactggctgtgctacatttctccatttatttaaggcttcctttattttgaggataatattttgtagatttcagtgtakaaaccttccacaagttttgtcaaatttcagtcttacgtatttaatatttttatgtttttgtaaatggtattgggttttttttctatttcattttctgggcttttttgccactatatttagttttgtagtattgaaattgagtcaagtgattttgctaaactcattcattagttttactagctttttaaaaaaataaaaaa

SEQ ID NO: 883093 - DNA, 678 bp, Homo sapiens
aggagacctcccatactagcgctggaccctcaggttagaaacaaatgactagaccttgcactcaatgttctggcttttctggaggatggtaaagagactgatttctatcttatatgacttggagcactgacaggaccagtgtcagagtttggaagctgctgaaracagagatgtgcagcatattacagttgcagttctgcagacagatgccaggaagagcaatagattggaaaaagtttaagaggtcctagctcctctagttgggctgattggagtaggtcttccactgcaggaagccaggatgcaaagactgggtgagttgatcatttttacagatgctcaaatctcatcaaaaaattataaatctttcaaggaaacaaacatagccaaatcaaaggaacaaaataaaactccagaaatggaccctaagaaaacaggtatctatgagcttcctgacaaagagtttaaaataactctcatgaagatgcttaaattaaaaagaacatagacgctaattttatttaattgaaatgaaaacaaaatgaaaatatcttgtttcaggaaaacaaagcatgagcaaaatgtgaatatcaacaaagaaatagaaactacaaaaagaatccaaaattctggagctaaaaatacagtaactaaatgaaaaaattaatcagagttttc

SEQ ID NO: 883094 - DNA, 678 bp, Homo sapiens
aggagacctcccatactagcgctggaccctcaggttagaaacaaatgactagaccttgcactcaatgttctggcttttctggaggatggtaaagagactgatttctatcttatatgacttggagcactgacaggaccagtgtcagagtttggaagctgctgaagacagagatgtgcagcatattacagttgcagttctgcagacagatgccaggaagagcaatagattggaaaaagtttaagaggtcctagctcctctagttgggctgattggagtaggtcttccactgcaggaagccaggatgcaaagactgggtgagttgatcatttttacagatgctcaaatctcatcaaaaaattataaatctttcaaggaaacaaacatagccaaatcaaaggaacaaaataaaactccagaaatggaccctaagaaaacaggtatctatgagcttcctgacaaagagtttaaaataactctcatgaagatgcttaaattaaaamgaacatagacgctaattttatttaattgaaatgaaaacaaaatgaaaatatcttgtttcaggaaaacaaagcatgagcaaaatgtgaatatcaacaaagaaatagaaactacaaaaagaatccaaaattctggagctaaaaatacagtaactaaatgaaaaaattaatcagagttttc

SEQ ID NO: 883095 - DNA, 584 bp, Homo sapiens
gagctacaattcaagatgagatttgggtggggacacagccaaaccatatcactcacttactttcctctagtgtacttctgactgttctgacttaggtttagctaccttactcttgggattttcagtcctagcatcttccctttatttgtgmttttaattcatttttttgttttgattttttttttctgcttcagcttctcatttaaatatgactttaactctcttgtttatatattcatccaaaatgtcactttgcctaaaatgtcaattttttggtttgtctatccacaattttggtacatatacaagctctccacactttctaccctctacttctcattaaagtagttcttgagttttataagccagaaacaaccaaattgtttctgaacatccagggatttctttatcaatgctccatcacagatttttttcacaattggtcccaggatattatgccaagcaggtagacagagaaagtcctaaagagcatagttatacccaaatccctaattaagaaaaagctgaatagacgtgtatattaaaaatcaatgacgtaaaaatgacaaagtttgcatttgaac

SEQ ID NO: 883096 - DNA, 584 bp, Homo sapiens
gagctacaattcaagatgagatttgggtggggacacagccaaaccatatcactcacttactttcctctagtgtacttctgactgttctgacttaggtttagctaccttactcttgggattttcagtcctagcatcttccctttatttgtgcttttaattcatttttttgttttgattttttttttctgcttcagcttctcatttaaatatgactttaactctcttgtttawatattcatccaaaatgtcactttgcctaaaatgtcaattttttggtttgtctatccacaattttggtacatatacaagctctccacactttctaccctctacttctcattaaagtagttcttgagttttataagccagaaacaaccaaattgtttctgaacatccagggatttctttatcaatgctccatcacagatttttttcacaattggtcccaggatattatgccaagcaggtagacagagaaagtcctaaagagcatagttatacccaaatccctaattaagaaaaagctgaatagacgtgtatattaaaaatcaatgacgtaaaaatgacaaagtttgcatttgaac

SEQ ID NO: 883097 - DNA, 663 bp, Homo sapiens
acagaagcagtgtcaggtagagctcaatctctgaaatcagaaaaacctgctcatttaacacttacaggctctgtgaccttggccaagtcacttctctggtcctcactttcttcatatggaaattgagggttctaatatttacctcattgtgatgatgtgaggatgaaatgagagaatataagtagaagacttagttctgtgcttgatgcataattagtgctgggcaaattgcagatattatttttgtaatttcagtatctaaagggatgactctctcacatggtatgtgaaacttgtgtttgttagaatgaactgatgggagcccttcaatgggagaacttcagacataacaactggcagtgtgtgtgtrtgtgtgtgtgtgtgtgtgtgtgtgtgtgtgtgtgttagagataacagtttcagacagagaaaggatctacctggtacctttcaaatcacaaaaatgtttctgcttgcttacagtgaagcagttgcagatgatcgcccaagatcattacttttctatcattaaaatagaagctagatgtcattgaatagtgaagaaagaaagaaaatcttaaaagaaacacagaaataattcagagttcactcaaaagagtgagaagctgtagaaaatgcagtcattttaaatccctgagaaag

SEQ ID NO: 883098 - DNA, 715 bp, Homo sapiens
ataagtaccacattttctttatccagcctatcattggtgggtatttaggttgattccatgtctttgctatagtgaatagtgctgcaatgaacatacacatgcatgtgtctttataataaaaagatttctattcctttggatatatatccagtaatgggattgttgggttgaatggtatttccagctttaggtctytgaggaatcaccacactgtcttctacaatggttgaactaatttacacttccaccagcagagtataagtgttcctttttctccacaaccttaccagcatctattattttttgactttttataatagtaatagccattctgacaggtgtgagctggtatctcattgtggttttaatttgcatttctctaatgatcagtgatgttgagatttttttcatctgactgttgtctgcaggtatgtcttcttttgagaagtgtctgttcatatattttcacccactttttaatggttttgtttgtttatttcttggaaatctgtttaaattccttatagatgctgagtattagaccattgtcagatgcatagtttgcaaaaattttctcatattctgtaggttgtctgtttactctgttgatagttttgctgtgcaaatgctccgtactttaattagatcccatttgtcaatttttgcttttgttgcaattgcttttggtgtctttgtcattaaatctttgcctgtg

SEQ ID NO: 883099 - DNA, 610 bp, Homo sapiens
aaaaagtatttgcaaattattcatctgacaagggattaataaccagtatatataagaagctcaaataactctataagaaaaaatgtgcaaaatgtttgaatagctatttctcaaaagaagacacacaaatggctaacagataagaaaaggtgcttaataacattgaccatcagagaaacgcaaatcgaaagcattttagaaatgctaatatccaaaagacagtcaataacaaatgctagtgaggatgtggagaaaagggaagcattgcacactgttggtgggaaactaaattaatatagtcactgtagagaacagtttgaaggttcctcaaaaactaaaaatacaaytaccatatgatccagcaatcctactgctgggtatatacccaaaagaaaggaaataagtatattgaagagataaattcacacctgtgtttactgcagcactgtttacaataactaagatttgggagtaacctaagtgtcaaattgtggtaaatatgaacaatgtagtattattcagcagtaaaaaatgacatccagtcatttgccacagcatggatggaactggagattattatgttgagtgaaataagccaggcacagaaaga

SEQ ID NO: 883100 - DNA, 610 bp, Homo sapiens
aaaaagtatttgcaaattattcatctgacaagggattaataaccagtatatataagaagctcaaataactctataagaaaaaatgtgcaaaatgtttgaatagctatttctcaaaagaagacacacaaatggctaacagataagaaaaggtgcttaataacattgaccatcagagaaacgcaaatcgaaagcattttagaaatgctaatatccaaaagacagtcaataacaaatgctagtgaggatgtggagaaaagggaagcattgcacactgttggtgggaaactaaattaatatagtcactgtagagaacagtttgaaggttcctcaaaaactaaaaatacaactaccatatgatccagcaatcctactgctgggtatatacccaaaagaaaggaaataagtatattgaagagataaatkcacacctgtgtttactgcagcactgtttacaataactaagatttgggagtaacctaagtgtcaaattgtggtaaatatgaacaatgtagtattattcagcagtaaaaaatgacatccagtcatttgccacagcatggatggaactggagattattatgttgagtgaaataagccaggcacagaaaga

SEQ ID NO: 883101 - DNA, 629 bp, Homo sapiens
ctttcagaatagttgtaagaacagtgcaaagaactctacaaactttgtccagattccacaatttttaacattgtacatttttcttctctctctttttctgttttgagctgtttacaagttgcagacatgacggcccaaattcctgaaattttctgtttcctaaaagcaaaggaattcttctttataaccctaatacacccaacaaaataagaaaattaacgttaatgcaatactgttgtctaattcccagaacttcrgattttcccagttttccttatagtgcccattatagagtaaaataaattgtttccccttttcttcatttcttttttggtcaatgaaccaattcaggagcacacattgcatttaaaggccatacctcttagacttttgaaatctttcttcatgtatcatggccttgacttttaaaaaagatacagattttctgtggtgttttcttataatttattttcagttatgcatgtttttggcaggaataccacaaaaataatgcactgttcttagtccatcctaatagaaggcataaatatttggactattgatgatatcatttaccatttgtttaaaataatctgtcagattttcttcattttaatgttaattaataa

SEQ ID NO: 883102 - DNA, 595 bp, Homo sapiens
tgttcaaatttttattacaaattcaggggtacatgtgcaggtttattgcatgggtgtattgcataatgctggcatttgggattctggtgaacccatcacccaaagagtgaacatagatactcaataggtagtttttcaacccttgtcctcctctttcyctccccacttttagagcccccagtgtctattattttcatctttatgttcctgtgtacccacagttcagcttccacttacgagaaaatgcagtgtttgatgttctgtttctgtgttgattcacttaggataatgacctccagctgcatccatgttgctgacaaggacgtgattttttttaatgtctgtgtagtattccatggtgcatatgtaccacattttctttatccaatccatccgttatggacacttaagttgattccatgagctgatccacaaatttaagagtttagaacagagggcagccagctttttctgtaaagaattagatagtaaatatttttggctttgtgagtcatttctgttgctactatcaaactttaccattgtagtatgaatgcagccacagacaatatataaatgaaagggtgtgttgtgc

SEQ ID NO: 883103 - DNA, 592 bp, Homo sapiens
gtttgcaaaaactacctagggaagagctctaattaatctagctttcttggtatttacctacggacaaataaactgtgaatgaatgttggagtggagtgggtacgaaggtgataggagaacatgagagtttttctgcattcagtaatgcagcaatctaattgagtcataccatctcattgttcatttgctctataattaagagggaaaaatatgattatttggagatgaagacatcaagccaacgttaaacatgagaattgactagagaaaacaagatatttgttcataatcttgtgcaatgataagagcagtatttgtgaaacctaaaatggtcatcaataaatcagcaaccaggttgggtgctgtggctcacgcctgtaatcccagcactttgggaggmtgaggcggatggatcatctgaggtcaggagtttgagaccaccctggccaacatgctgaaaccccgtctctactaaaaatacaaaaattagctgggcatggtggcatacccctgtaatcccagctactcgggggactgaggcacaagaataacttgaacccaggaagtggaggttgcagtgagccaagattat

SEQ ID NO: 883104 - DNA, 613 bp, Homo sapiens
ttgtggtctaagataatttgtcatagatttaaactaatttgttaatctttaagatattctttgtaggccttatggaaaccacacacacacacacatacaaaactataaaagacacactagaaataaaaaggcaacaaataaaatcttactaccagagaatattacttatcacataagaaggtagtaggaaaggaaaaaagaaacagaagartaacaaaacaacaggaaaataagcaacaaaatgtcaatagtaagttcttacttatcaataataatactgaattcaaatggactaaattctccagttaaatggcattgagtggcagaatgggtaaaaaacaaaaacaaaagcaaaaaaaaaaaaaaaacaagacccacctatatgctgcctataagaagcccactttacctataaagacacgcacagactgagagtgaagaggtggagaaagattggtttccatgcaaccggaaaccaaaaaagagcaggaataactatttgtagatcaaataaaataaactacaagtcaaagactgtaaaaagatacaaagatataaagaatcctactcaataatgataaaggggtcaattcagtgagagaatataacaatt

SEQ ID NO: 883105 - DNA, 709 bp, Homo sapiens
gcatttttaaaattttgtatatcttaacatcacttagcattttcatcatgcctcaaaaaatttttaaacttagtatcttttttcaagatattacatctttagacagatccaaaaaaccatcatatatagtatttgaattcttacaaattattttatcacttctttgggtccagttgaggcctcttgataacaaattcaaattatgggctgcacatgacatgaagaatgtctcagaaagatcagccaaaattctactttgtaatcttccttcttaatcaatcattctaataacattatcatagtgttgtccttcataatctttctggacagaaagattttaagattttaagccttggaaaaggcttaaaaacaatatttgtttttttcagtccttcactgamgtcaaaaccatgcattttttaaaaacaccaggtataaaaacagtgaaatattaattttaacatccttgttttcttcctctgataattgaattatccacagttaatgtcattttctgctcggatttcttctcctgtacaatctagttgaactaataaatagtatttacttataatttttgtataacatttcttctctcactttactatctattaataatttgattttgatttatccattctgagtagtgataatattttgttatttttaatatatcttatattttggctattttggtctcaatttcaaa

SEQ ID NO: 883106 - DNA, 586 bp, Homo sapiens
ttcttgagtcagaaagataagccactctgattggtcagctcagcctatgtgccatttcaggttaagtttcacagactcacatcttaaatcaaagattccattgagagtgatttcttaagttatgcttctgagagaaaacagtaagggagtggggaaagctagagaaggggaaaaaagtcttgcaatttccaaaacctgatatgggagctctagagcataaattatacctcctagcatgtcatcctggggcaaagaagccctgggtgtggagagattggaaggccatcaaacttccaggcactttcagctttacatgtagacaaggcagacccagtgcccaaggtccagcctccaaagggctcaggtgcaaagccttactggcaaagcacacaaaagctgggaatgggcttacaaaactggcaaaaaggaatccygaagaatcgaagtggagcatccagtgtccactaaatttgctcagtgctttggtggggaagatacagtctcttgattaacgccaccaaaacattctcagggttagaagaagggcagttctcaagggtaagaatgtgaagccaaaaaaacaagt

SEQ ID NO: 883107 - DNA, 641 bp, Homo sapiens
aacattcaaagtccatgatcctacctcaccccttaggcttttcttttctttttttttttttttttcttttttgagacaggttcttgctctgttgcccaggctgtagtgcagtggtacaatcttagctcactgccgccttaacctcccaggctcaagcctcccacctcagccacccaagtagctgggaacacaggtgcatgccactatgcctggcttatttatttatttatttatttattatttatttttgtagagacagggtctcaatttgttgctcaagctggtcttggactcctggtcttaagtgatcctcctgccttgacctcccaaagtactgggattacaggtgtgagtcactgtgcccagcccagccttttctttggagttaatagaattctctttttatgccatttcttggagataacttggcatgtaaatattctaattaaatcttcatgtcttacagggcttgagttggggtcttctcaracctaggctgtcaacttcaacttctttgaacttctcatcccacagaatatgtaaaattaatggtccaaagctttcctaatatctatgctaagtacatctagtttcttttaggactgcacttctctgtatgtaatgagtcactatcattcaca

SEQ ID NO: 883108 - DNA, 615 bp, Homo sapiens
tcattagaaaggtctgcatgggaaatcagctttcagctgaagcaagaaggtggcagaagcatgctgtaaagagatttgcaatggagggttttgtgccatagaatgcaggttgcagaagccccaactggaaatggcaggaagaaatggacaggcagaaaagtgaggttttggactgagagtaggggagagggtagatggtcaaagggacttgaatattgggcagggactgagaatcaacaggaatgtgaggtctggtaggattagctgctttctgggatctaagtggagcaaaggtacaaattagcttctgtgccagtgttggctcagtccatagagggtgttgtcagaggcttcatgatattagcaaattgtgtttttttctcagttacccaaacagaatcttggtgggaagcttttgtggtgcctctgaagaratcattgttcagccatacacagataaagagtgagtgtcctctgggggcaggatggctctgaatcctctcaaaaggcaactatggcctgactcagtagtccttttgaagaaatcctagccaaggatgaagggacaagtctagtttcgcagctgagagaaacaagcttagttcttaagtgcaa

SEQ ID NO: 883109 - DNA, 554 bp, Homo sapiens
tagagactgccgtgtttcccaggctggtctcaaactcctgggctcaagccatcagcctgccttggcctcccaaagttctaagattatgggcatgagccactgcacctggcctgattgtattttatttttaaataagccagttcatgaataattaaatgaaaacattataataataaacagacaaaaagattgctaaataataaatctagtttataactaatrtatctatctcacttccttaaattagttttcaatgcccttaatttgtatgtgtgttaacatctctcaattttcaaaaatttttagttttttgaaaaatagcatggcaattgaaagactgatttttaaagtgaacaaaacattgactcccagaagaaaaattttaatgaacaaaacatcgatttccagaagatgaacaagttcacatgttcatatgtaatcaaaatatgtgacactaattataggtgtatttacacttttcaaacaccaatattaattcctgaatacatatgctattaagccacttttgaacacagaaaagatggctaattgat

SEQ ID NO: 883110 - DNA, 625 bp, Homo sapiens
tcattagaaaggtctgcatgggaaatcagctttcagctgaagcaagaaggtggcagaagcatgctgtaaagagatttgcaatggagggttttgtgccatagaatgcaggttgcagaagccccaactggaaatggcaggaagaaatggacaggcagaaaagtgaggttttggactgagagtaggggagagggtagatggtcaaagggacttgaatattgggcagggactgagaatcaacaggaatgtgaggtctggtaggattagctgctttctgggatctaagtggagcaaaggtacaaattagcttctgtgccagtgttggctcagtccatagagggtgttgtcagaggcttcatgatattagcaaattgtgtttttttctcagttacccaaacagaatcttggtgggaagcttttgtggtgcctctgaagaratcattgttcagccatacacagataaagagtgagtgtcctctgggggcaggatggctctgaatcctctcaaaaggcaactatggcctgactcagtagtccttttgaagaaatcctagccaaggatgaagggacaagtctagtttcgcagctgagagaaacaagcttagttcttaagtgcaagtgcagctat

SEQ ID NO: 883111 - DNA, 605 bp, Homo sapiens
aaaatagtgtaagtgctcattaaatggttagctcatgttctctttccttcttaaagtagtaggtttttcattgattgattgcttcatttgttcagaaaatatttgaataccaagacccatatctagttctggggctatggaggttttagttagacctacagctagaactacagaggaggtagatacagacaaatatattcaatactacttgctaaagactgcaatggagagaagatcagaaatttataggagcacagaggaggagcagctgcttggctgtgagggcaatgatgtcaaatttgccagttctgcctttaagcaagtcctttaggttctatggccctcaacttattatatgtaaaataaggctaataaggattttatcctcagtttttgtcacagttaaaggtggtaataaaaaggtatagacatatatacatatatttttatatggagggaaatgattggmtcatgggggaagtttcccccatgctgttctcatgatagcgagttatcatgagatctaatggttttataaatggaagtttcccctgccctcttctcttttgcctgccgccatgtacgacgtgcttgcttccccttca

SEQ ID NO: 883112 - DNA, 624 bp, Homo sapiens
tatttaagttgtttccagtgttccctatcattacatgtgctacagtgaatgtcctcatacttaaatctttctgtatatacttaatgtttgtttagtataaattctaaaaagtagaattggataggtaggagggtgaagattgatcaatgtatactatccccagtagtcaactgaactcttgccaatcctgtgtattctcgttcagaaaatgcttgtcaatttggtaagtcaaaaagggctttttgttgtagtgtattcctttagttacgacgatgttggactttcttcatatgcttatattattgacagttctttattgggcacttttaaatttatttataagttatttttaaggatagtgactctcataatgttgcacaggttgcttctcagttttgatatttgctttgtaataratttatttttaatgtccatgagttttccacttttatacagtcaaatgtatcagccttttcctctatggtttgtactttacacatatctcaccacagagcaaggaattctaagggccaaggagatgtgcctacctgcctgtttcttctagaccaagcttgtgcaacccgcggcctgtgggtcacgtgcagtccagtacagctttgaatg

SEQ ID NO: 883113 - DNA, 602 bp, Homo sapiens
tacagaagttataataagggaaagaaaatgaaagagtaatcagatgtggagtggacatttgcctttagactcatagtgtctgattaaaccccaggactggggataatagcccataagtatcctgcccaaaggtttgacatacttccccagagtttgaagccccaaatgttagaacaaagagagaaggtagtggaaactatgtacaccactagaatttggtgtgtcaaggatgcatatgcatgagtttcctataaaccaagaggacaccgtaggaagtaaccaggcttgagccagtataatgggattctacccaagagagtccaagaagtsaactagaggacacatggcctatgtcagcaaactgtgtatatatatacatatactgtatatatacatatatacatatacgtatatatatacatatactgtatatatacatacatacatatactgtatatatacatatatacatacatatacaaatatatattttaaatatatataatttatataataatataaatatataaaaatatataatataattatataatataatataattatataattaggaatataatatattatattcctaaata

SEQ ID NO: 883114 - DNA, 642 bp, Homo sapiens
tatttactgggtcaagcttgcctaaaaaatatttgggggcggggggaattctccctccagttacctttattagaatgttacaataaaatcaagccaggcacagtggcttatgcctgtaattccagcactttgggaggccaaagcaggaggattgcttgagtccaagagtttgagatcagcctgtgcaacatgatgaaactgtgtctctacaaaaaaattaggcatagtggcatgtgcctgtggtcccagctgctctggaagctgaggtgggaggatcccttgagcccagaaggtcaaggttgcagtgagccatgttgcagcagtgcactctagcctaggtgacagagtgagaccctgtctctcaaaaaaaaaaaaaaaawgtttatagaaaaacaaaatatgatattctaataaaataacttgaaacaatagtatgaacttcctatgtttttagctcttaaagaactacgaaactaaagtttacataacattggaaacatgtgctacatgtttttttttttttgcaaatcaaatctcctcttgaaactcaaatgtaggactaactgccacaatttcatttcttttaaatttggccatgtctgtactaactgctgtgatccatgtctcagttctcttaccact

SEQ ID NO: 883115 - DNA, 669 bp, Homo sapiens
ggtttgtttccatttttttttttttttttttttttgagactgagtctcactctgtcacccaggctggagtgcagtggcgcaatcttggcttactgtaacctctgcctcctgggttcaaatgattctcctgtctcagcctcctgagtagctgggactataggcactcgccaccacgccggctaatttttttattttttagtagagacggggtttcaccatgttggccaggctggtctcgaactcctgacctcaggtgatccactcagctcagcctcccaaagtgctgggattataagagtgaggcactccgcctagcctcttccaatttttgtcttattacaaatagggctactaygaacattctttacagtgtttatatggacatatgttttcatttctcttgagtaagtagcttaggagtggaatagctagattatatggtagatatgtgtttaactttttaagaaactgccaaactttcccaagtgttttttaccactttatggtcccacaagctatgtatgagtgttccaatttctcctgactggttaggattagtcttttcaattttagccattgtaataggtgtgtagtggtatttcattgtcattttaatttgcattttcctagtgaccaatgatattggcattttttcatgtgcttctttgt

SEQ ID NO: 883116 - DNA, 604 bp, Homo sapiens
tactacgaatcttctctgagtggcaaaaaccagaggtttttggagctagggctgcagttaagttgccaaggggcagagatgtaaacagttcctggtttagttaaaatattttaatttttatttttttaagcctggcctttgggtgaaggagtaaaattaggcactggggtctgggtagggggaggatactcatggrcgagtatgcaaccctagggccacagcaaccaaactgtaggggaagaggcggggcgagaggggacgaagtagagacagcaagagactcacttttgaaaggcactttcggttagaaagcattctcacatgcttatctcatcgcacacagtatcctttctgctggtctccagcatctacagacgttaaaggcccaagaggagggccaccttcacacgagattccgaggagggcctcgctacccgccagttcccgcgcctcggcagtccgccgcgagcgtacgtcactcgcccgccgccaatcggcgcccggcaggtcacctctcctcccagggcccgccgccccgcccgccgcccaggccgaggccgccagtgcccgccggccgcttccgctcccggcgcaggcgctgcag

SEQ ID NO: 883117 - DNA, 618 bp, Homo sapiens
ggaacagtcagaatgagtttggtgaggtatgctaatcaagagaggaaaggagcacaattcatttctgaattggttatcaaattcttcttgtaagtgacacgattgaaactgtcaattggctttgcaacctgctgagtccatatttctacatctgtgaaagctcagcaaatgagaccttctcagcaaaggaagagagtttcaccagcaagaaatttcatgaggtgtygcaccctgtggccaaccatttctcaagagacctgtttctgtttcacctatcaaattaccttatgattgacaggcagcttcactcattactcagatttcctatctccttggcaaatctggtcaccacaatactctttaaaaaacacgctcatgttattagtatgaaaacattcaacactagagcttgttgggactcaaagagtcccctttcccaagagcggccattcagttttcccatgttgaacccttatcaggtaggcccaaggacccttctcttcatccctgttgaaatattttacaaaagattcttctcaattgcattctatgctgccattcaaaatcacaggctatccgcactacaaaatgatgccttaaatcagatgctgtactaaa

SEQ ID NO: 883118 - DNA, 632 bp, Homo sapiens
aaccaccaccaaagcaaaaagttccttcattttcctaggaactcaactttacacccttatccttggcccttggcagtcaccaatatgctttctttctctctctctctctttttttttttttgagatggagtctcgctctgtcgcctgggttggagtgcagtggtaccatctcggctcactacaacctcctcctcctgggttctagcgattctctggccttagcctcctgggtagctgtgactaaaggcacccgccactatgactgtctaatttttgtatttttagtggagaaatagttttgccatgttggccaggcttgtcttgaactcctgacttcaagtgatccacctgcctcagcctcccaaagtgctggaattacaggcatgagccaccgtgcctggcccaatatactttctatctttataaattgttttcccttttgtagagttgcatataaatgaaatcatacagtacctattcctttaggtctgcttmtttttctcagcatgtttttgatgttcacttatgttgtagtatatattacagatttgtggtttttttgtttccaagaagtatttcattgtatggatagaccacaatttatttctatatttatctcttgatagactgtt

SEQ ID NO: 883119 - DNA, 584 bp, Homo sapiens
gatctcatctctaaagagagaaagagggaaagagataaacagagaaagaggaaagaaagaaagaaagaaagagaaagaaagaaaagaaaagaagaaagggaagggaaggggaggggaggggaggaaggaaggaaggagaaagaaaggaaggaaggaagggagggaggaaggaaggaaaggaaggaaggaaggagaaacagagaaggaaggaaggaaggaaggaaggagggagagasggacggacgcagggagggagggagggagagggagggaaagaaagaaaagaaagaaagccaagaaggctgatatatatttaacattcttattatgaataataatcttaacattcatatttaacatactttggcatattccaacccaaagagaatccacagagcagatagatttgggagtagcttatcctcactattcccactcatcctcccctaccctttgaacgtaccagctttacaataattctgtatgtgtctgaatattcatgtgtctgactctctcactaggttgtaggtactttgctaagctttgtatctttgctacataatatgatgccaattatatagcag

SEQ ID NO: 883120 - DNA, 658 bp, Homo sapiens
tgtaggtactttgctaagctttgtatctttgctacataatatgatgccaattatatagcaggatttccatgaataaatggaacggtaagatggagcttgaaaagttttccaccacatctccaactggttgcttaatgttcctgtgaatatattgcttagccattcagacaccacatatctmaaataaaattcatccgttctttaaaactttcttcccttaaggggttagtagtggtttttaacaatgtggttcatcagaaaggtggaaaaatcctaaggtccagatgtgttatggatccacgtgactattgaaaacatttaggaagagatgtggagataaaaacagtagaagtaaatatttttaggaagatagaaacgaaaattgctgggcattagctagcaagtatttgtggtctagccagaagtattaatggcatttttaaagtatttgaatatctgatgctattgaatgatagtataatggcattcccagagttatttaatattgatataaaattccagcttttgcccatttagtatgatattggctgtgggttggtcataaattgctcttattattttgagatacattccatcaatacctagtttattgaaagtttttagcatgaaggggtattgaattttattgaaggccttt

SEQ ID NO: 883121 - DNA, 658 bp, Homo sapiens
tgtaggtactttgctaagctttgtatctttgctacataatatgatgccaattatatagcaggatttccatgaataaatggaacggtaagatggagcttgaaaagttttccaccacatctccaactggttgcttaatgttcctgtgaatatattgcttagccattcagacaccacatatctaaaataaaattcatccgttctttaaaactttcttcccttaaggggttagtagtggtttttaacaatgtggttcatcagaaaggtggaaaaatcctaaggtccagatgtgttatggatccacgtgactattgaaaacatttaggaagagatgtggagataaaaacagtagaagtaaatatttttagraagatagaaacgaaaattgctgggcattagctagcaagtatttgtggtctagccagaagtattaatggcatttttaaagtatttgaatatctgatgctattgaatgatagtataatggcattcccagagttatttaatattgatataaaattccagcttttgcccatttagtatgatattggctgtgggttggtcataaattgctcttattattttgagatacattccatcaatacctagtttattgaaagtttttagcatgaaggggtattgaattttattgaaggccttt

SEQ ID NO: 883122 - DNA, 531 bp, Homo sapiens
tgtgaccagaataaaaagcaggcagaagaacgtgaaaggactagactggctgagtcttctggtctccatctttctcccgtgctggatgcttcttaccctcaaacatggaactccaagtttttccgctttgggactcttggacctttgaccacagactgaaggctgcactgttggcttccctacttttgaggttttgggacttggactagcttccttgctcctcagcttgcagatggcctattgtgggacctcaccttatgattgtgtaagttaacactcattaataaactcatatatatatgtatatatgtatawcctattagttctgtccctctagagaaccctgactaatacagacaggaatatagagcaatgtctagacagagcctgagaccctcctcacctccaaagcaccttgtgtttttctctccttccccttctttgcccaccctctccttaggaattttcagcaaatccatatcttagaaagctgcagggaggagttggcctgatgggcttgccacacttggg

SEQ ID NO: 883123 - DNA, 597 bp, Homo sapiens
tttaaaaattacatatttatatagcacccatgcaagaaacagtttttacagatagcacataatttcatttgtcttcaattcatctactgtaatgtaattagaagaaaaacgtattagtattccaattatagataaagcaaaagattagtactccgcctgagatcacacaacaaattcattctaaaattctgacttcactggagttgcttcccagaaataaaaaaagagagagagagatagagagtctttgaacagtcctagytgaaatgtagcctattcaatactaaaaattattcaaataagtagtccatccacactccataatggacagtcttcctcttggcttttttgttgttgttattataaagaagggaatatcctaaagggtcaataatcctccttctatttctccatttttctgtctccataaggcaacatcactgaatgtattaatgggcttgctcagttagggtttttaatccctcccagtttgcccagaatgttctcagttttagtactgaaagtcctgtgcccagttaacccgtcttgggcaaacctggacagtccctatcagcagtggaaataaacactgctttg

SEQ ID NO: 883124 - DNA, 677 bp, Homo sapiens
tgccagaagcttcaaacagcatccctatctgccactgccactgaaacaccactggatctgctggatcatatgacccaagtggcagagcagcttgcacagcagcctggacctgttgcagactcttttcttgttctgggccctactcaaaactagcagctttttgagtcaattggtaaacaggctggtrtaacataatgaaattggaaaatgttgcctccaaaacccaaagaggcccactaagtattgtgcctctttcttggttttaagagcagcaagatgcaagtacttatccttcaccgtagaagaaatatcctaacatgccccatgtcactggatccctaccaatttcactaaggtagaaggcccttgaattgtagtcatatttatttcctaccctctgatgcaaatgtctttccactaagtctaatgtagttcctacttcttgctcactaggtcaaatcagcataatgtcatcgatataaccaatcagtgtaatattttgtggaagggaaaggtaatcaagatccccatgaactgaattatgacatagagttggagagctgatacacaccggagatacgacaatgaaggtgtgttgctggccctgccatctgaaagcaaactgcctttatggactggtatgaaaaaaaagacatttgccagatcaattccattgc

SEQ ID NO: 883125 - DNA, 654 bp, Homo sapiens
actgtcagtgattaactgttttaagtgattcattaacatgccaggttatcttataaattaaagcattttacattattaacttttgatttcagcaacataaatgcttaaacaataaattggtctgtattacctgggttgttttctttaatggtaactaaatagaataatcctyttggtgaaaggagatctggaaccaggggaaaaaacctgtccatgacttcccgaccatttttgccaccagcccaagctgcctctattccgtgacttcctacctgtgaacaattagaaagaatgttttcttttaactcaagtttgatttagatcacaaactgaatctttttgacaagtaatatcaccaaaaaagtatatattttgcattttactgctgacgaaggagcagtcaagttgaatctaagtttcatcattttttagtgtgtaaccttggataaattagtaatcctgtttgtgaattactttcctcttttatctgtaaaattagaaaaagaatagttccatatgtacaattagaaaaataataagtggataaaaaatgtttttattaataaaaaaatatttttatccactgttaggaataaataaggaagtatatttaaagttttgagaacattgccctgcgtatatcaagggcttaat

SEQ ID NO: 883126 - DNA, 654 bp, Homo sapiens
actgtcagtgattaactgttttaagtgattcattaacatgccaggttatcttataaattaaagcattttacattattaacttttgatttcagcaacataaatgcttaaacaataaattggtctgtattacctgggttgttttctttaatggtaactaaatagaataatccttttggtgaaaggagatctggaaccaggggaaaaaacctgtccatgacttcccgaccatttytgccaccagcccaagctgcctctattccgtgacttcctacctgtgaacaattagaaagaatgttttcttttaactcaagtttgatttagatcacaaactgaatctttttgacaagtaatatcaccaaaaaagtatatattttgcattttactgctgacgaaggagcagtcaagttgaatctaagtttcatcattttttagtgtgtaaccttggataaattagtaatcctgtttgtgaattactttcctcttttatctgtaaaattagaaaaagaatagttccatatgtacaattagaaaaataataagtggataaaaaatgtttttattaataaaaaaatatttttatccactgttaggaataaataaggaagtatatttaaagttttgagaacattgccctgcgtatatcaagggcttaat

SEQ ID NO: 883127 - DNA, 654 bp, Homo sapiens
actgtcagtgattaactgttttaagtgattcattaacatgccaggttatcttataaattaaagcattttacattattaacttttgatttcagcaacataaatgcttaaacaataaattggtctgtattacctgggttgttttctttaatggtaactaaatagaataatccttttggtgaaaggagatctggaaccaggggaaaaaacctgtccatgacttcccgaccatttttgccaccagcccaagctgcctctattccgtgacttcctacctgtgaacaattagaaagaatgttttcttttaactcaagtttgatttagatcacaaactgaatctttttgacaagtaatatcaccaaaaaagtatatattttgcattttactgctgacgaaggagcagtcaagttgaatctaagtttcatcattttytagtgtgtaaccttggataaattagtaatcctgtttgtgaattactttcctcttttatctgtaaaattagaaaaagaatagttccatatgtacaattagaaaaataataagtggataaaaaatgtttttattaataaaaaaatatttttatccactgttaggaataaataaggaagtatatttaaagttttgagaacattgccctgcgtatatcaagggcttaat

SEQ ID NO: 883128 - DNA, 650 bp, Homo sapiens
ctgcctcagtctccaaatagctgggattacaggtgtgtgccaccaggcccggctaatttttgtattttcagtagagatggggtttcaccatgttggccaggctggtcttgaacccttgacctcaggtaatctgccgcctcggcctcccaaagtacaggattacaggcgtgggccattgcactcggccagttaaaaccttttgttttgcaaattttttattcatgataaaggatacatgtaatatatatgtacatttatatttgaatatatgaatataaataccatggcctgatatgaatgtgatttttagggatagatatgtgtcacagtttgtatttccatcatttaaggttcctttcctaggtcttttaataggactcaattactgacaattaggagtaaaatcagagtagwctgtgatagcagcagctgactgatgtcataggatgacattcatttgattttacaaacaaaataattgaaaatattaataattaaattttgttgtatgttttacctcttgaggtggagtcactacataggggggattaaacaccagaagatcaactttttcggtcaatcttggtagcaagcctttgacctaaatgtattcaacaacagtaagaattttacattaaactctgaattaa

SEQ ID NO: 883129 - DNA, 603 bp, Homo sapiens
cagtctcccgagtagctgggacttcaggcgtgcaccaccatgcccatttttgtatttttagtacagataggttttcaccatgttagccaggctggtcttgaactcctgatctcaggcgatcttcctgcctcggcctcccaaagtgccgggattacaggcatgagccatgcyggttctctctgttttccatttctctattttcttttttctccctttccgtgagttatttgaacattttttttttttttagaattctattttgatttatctatgacattttttgagtgtatctctttgtatagctttttcagtgactgctctaagtattacattatacatacataacgtataatgtactggtattggcatctttcccagtttgagtgaagtatagaaagcttatccctttttcatatttttaccctccatcatttataacataattgtcttaaatatttcctctatatatagttagaaccacgtcagacagtgttgttatttttgtttcaatcatcaaagataagttagaaaactcaggaagagaagaaagatctatcgcatctacccatttctttttcattttattgttcctttttctttact

SEQ ID NO: 883130 - DNA, 603 bp, Homo sapiens
cagtctcccgagtagctgggacttcaggcgtgcaccaccatgcccatttttgtatttttagtacagataggttttcaccatgttagccaggctggtcttgaactcctgatctcaggcgatcttcctgcctcggcctcccaaagtgccgggattacaggcatgagccatgctggttctctctgttttccatttctctattttcttttttctccctttccgtgagttatttgaacattttttttttttttagaattctattttgatttatctatgacattttttgagtgtatctctttgtatagctttttcagtgacwgctctaagtattacattatacatacataacgtataatgtactggtattggcatctttcccagtttgagtgaagtatagaaagcttatccctttttcatatttttaccctccatcatttataacataattgtcttaaatatttcctctatatatagttagaaccacgtcagacagtgttgttatttttgtttcaatcatcaaagataagttagaaaactcaggaagagaagaaagatctatcgcatctacccatttctttttcattttattgttcctttttctttact

SEQ ID NO: 883131 - DNA, 637 bp, Homo sapiens
aacttatgaagatttggctggatctgctgacgaccaggaacagaattccactacatcctttaccacagtctggaaagtcatttagctctggtggattcccctccttcccctcctttcctttctcccctcccaacaagtctctagcctcctccaatctccacccctctaaggctttgtttccactgagagttattaatgaaaattcatggggcttctgaactacattttagtggagactgcttggaagtggggctctgagggccttgaatggcctcagggtcacaggagtgcaactgaagctaagctggcaatgtatgaccagcaaagtgacttccagcctctccctggcccctacctctcaggcacagccttctcagggacatttggcactagttaaagaggaaagctgcatgggtttctctactgaggtctgagagcaaaaggaaaaaygcactctgcctcttgttaattccatcattctgtttcctggctttcaagtgagccagaccacagtgatcagccttcctcgaactctcctgggctctgagtgtgccccttgctggtgctgccctcacgttccacagccggccctcaagcctgcaccttgctgaggctcttgctgcctgctggccattcc

SEQ ID NO: 883132 - DNA, 605 bp, Homo sapiens
agtatagttgtgataaacacttaactaaatgactgttttatttgctttcttagaaattagaatgtttttgaaatgatttgttttttttcatctagctttacaagctatccaggaaaactgagtcaatgtcttattttttctttctacatatttttctgaagcaagcagatatgttttgcaaaaataatttacaggttgtattttattttattatttttatttttgccaagcctgtgtatcattatgtattgagtgagacttccaagagtgtcaaaattgaatagttagtggtgaaatttaccaaacgcagttagctgatggaccctgagggcctcaaataaaaatatccaaggaaaacctcttgaagcgaacttttgtgtttcttcatgatggatgtrttctttgagtatggcatgttcaggtttccagagccctgtctgaagatgaggagacttaaagaggctaccaggttaatccctccctgtaggccttggcatttctttctcagccctcctcgcagttgagcatgttggcaccatctcaatgcctacttccttcccacctcaggctggattagagagggttctctgtgatagacactcatg

SEQ ID NO: 883133 - DNA, 617 bp, Homo sapiens
atagtggctcttaaaatttctgtttgctggtgacatgtgtcacttctgcccacttttcacaagtcatacgaccaaggctgatattagtcagtgagggagtataatccttcctgaaagctgggctgtaaacacttgccaaaagtaacgccatctactacagtatctttatgatatttctgagaaatcgagccaaaattttagtcaaccggttggtgtaaactacttatacagatgttctgtacatattattattgtttagtcttcagkccctgaggattctgacgaaagtgctctaggaatctagtacattaagtcctgacttaatactgttaataggctcttggaaactgactgagtgaaaagatgaatgaatggggaaaccaatcttcccacaggctacttggtataaacaagagttaagttcctacagcatattttgatcacaaaaacatcagcaaacttctaactaaagactaaaacacttctaattttaaatattataataaatgtgagcaatgtatacatttaagaaagagtgataaaaacaagtaagacaattatttacccatttatttcagttcagggttgtgggtgtccaaaacctatgcagacagctt

SEQ ID NO: 883134 - DNA, 596 bp, Homo sapiens
ataaatgtctgttgtttgcaactaaataatcttaaatctacaggaagtgatgaaagtaagttctgatatctcgagggaattttccacttggaagagaggaaggaatagcacagttaaatggataatttataaaaagaagtgttgacctacatatttatttaggtaatggaaataccttaatatctctgaaaattatctagttattttgacctatgtgctttttaaaatgtccatattgatgataaggagtggyttttcattccggtaaattcattctgctttgaattatgtaatttaacatgtattcaaattacttctatttaaaagtacacaaattgatctcattttcacttggcattttaatttatcaatacctgtgtggatatttcacagtattttcagtacaggaaatttccttccaaacagtagagattagatacatgtattgtataagatggtatatttatattgccataaatggatacgttaaaaataatgtctacttcaagaaagattgtgggactttattttgttaaagtaatattttggatttcctacatttttatgtcattattttgaaacaaatttatatgcgt

SEQ ID NO: 883135 - DNA, 595 bp, Homo sapiens
agtgatccatagtagaaataataaaagaaaataaagctttagctatatgggaataggatggaagaaaggtaccaaaaaaggcaaagacaaaacaaaaaagggggagggggatggccattgatttgactgaatctggttaaactgcactttggcaatgataacagcatgttcccacaacagtattttccaacctcggccacactgtcctcaaatatgcagacttaccccatgctatcccccaggattgtggcaggccaggyttcactaacgcaggcctccgtgacaactgtttcagcactgactgagtggttaagttaaatattaaaagctaaaaaagccagtgcccttatacaaaggctggaatgtaacaaaagcccattaagagtttttcccagacctttcctgggccttaaagcgtgacaaaataatgaaggaattcctaacagtacccatttaggtttaaacacgttttactgggggtctgaagaaactccccaaacctccgtgatttagcaggagacaagataaaggtaatcaccccagcacctggacccatttagactaaatttactgaggctctagaagcaggtcttca

SEQ ID NO: 883136 - DNA, 637 bp, Homo sapiens
gaacaatatcagcctttagatagtgtgggcaaaactgagagtcacttccctttcagctcagctttgatttcaagttacttaaactctacctgaaaacgcttttgtgtcatatacttgtacgatgtaaatatcatccaaattaaaaatgttaaagcctcaatgtcttctttaagtatttatgaaaataaaacaagaaactatttctgattatattatcaatattgaaaaggaatggtcagtaaatatatgacattttatagtctttgatcaagaaaagaggaaggtaatttgaaagtgtttgtgttgtatttctaaccttatctgctggaatttatgtgttatctgttggaattgccagcayatataaggctatatgttttaaatagctgatttgttaaagagccatcgaaaatatgagtttgaaaataacaaaggaatttaatactacttaataaatattttagggttaaaaataagtgttacattttctttagtggcatatttaaaaagtttcatctcttatttatatctcacagtttcaacactttactgcaaactttaaatactcatggcaggaacttagcatgaacaaaacagtttgcatgtccttatttccatgataaacaaattttcccaa

SEQ ID NO: 883137 - DNA, 587 bp, Homo sapiens
ttactgtgattctggtatttcacagtgccagatttctgagttctacgtggatatgtgaagtcttactgcctagaaaactgtgagctgctagatcatcaccttaacagggaaaagctagtttctatgaaaccattttcctcacttgatcatttcaattagaaaaatggaagatcattctttgaaaataaatatttttagggggttccatcttcattttcacatttagaaagataattgaatgtaatttttcattgcatattttacctgtaaaatttttagttattattatattttactcagatggaaacataataatactacagatagcatccaattttactaaatacaagcaccttgaaaagccaacacctttaatggtacatgaaggagtgtgtcaaattaaagraaacaaaactttattattgttctcttttttgttttttacagcatgcaacctcaaagagaaaagtttgaggaaatcacttcaaggacaaaaaattgcaatgtaaagagaattatttatctccaaattccagattacccccctgcccaacccctgccagcagcaccgtccacatggtttctca

SEQ ID NO: 883138 - DNA, 618 bp, Homo sapiens
cccgggcatgtgttggaaacttaatcctcactacaacagtattgagatgtgagacctaactggcagtgtttaggtcatgagggcaccatcctcatgaatggattaatgctgctatgaaaacaggagcttgcaggagctggttttctctctcttgctcttctgccatgtgagaaacagcaattctccccsccggaggatgcagcattaaacatgccatctcagaatcagagaggccaggccctcaccagacaccagatgccagcacctttatcttagacttcttagcctctagaactatgagaaaataaaattttgttctttataaattatccagtctcagatattttgctatagcagcacaaaatggactaagtcacagttactttatgaatttttacttccccaaattctggtgttttaaatttttatattaatgttcccagatgatatacaaaaactattgagatcctaagctactttcatcgaaatacagctcttccccacctcaattgctctgtgatttttaaggcacgcaaaccctgtcagagagggtttccctctgtcttcttttaggtatattcccattagtgttattgatatcatttgcttgatcctgag

SEQ ID NO: 883139 - DNA, 576 bp, Homo sapiens
ccttcagtgaagggatcctgtcacggttctttttttttttttttttttttttttttgagacagagtctcgccctatcatccggcctggagtgcagtggcgtgatctcagctcactgtaacctctgcctcctgggttcaagagattcccctgcctcagcctcctgtgtagctgggactacaggtgtgtgccactacgcccagctaatttttgttgttttagtagagacgaggttttgtcatgttggcaaagctggtctcaaacttctggcttcaagcaatgcacccacctcggcctcccaaagtgctgagattacagrtatgagccaccctgcccagccctgtcacgtttctttaccatctctaggcacctgttagattttggttttgaaattctgtttgactgattatcatatgtgttattctgccctaaaacagtgactccagacagaaccttaagaaaatactttgcatttgtatggctctttaatcatttgtgttaagatattattctgagacattctcactatagccctaggatttgatgagctaactaggtatggacattatttcccattt

SEQ ID NO: 883140 - DNA, 649 bp, Homo sapiens
tcggtaataaaaagtttccaaacaaagaaagctgcaggactagatggcttcacctctgaattctaccaaactttcaaagaagaattaacaccaattcttcacaaactattccaaaaaattgaagagtagggaattcttccaaacttattcagaggctagcattaccctgataccaaaaccagacaaggacacaacaacaacaaaataaaactataggacaatatccctgatgaacatatatgcaaaaatccttaacagaatcttagcaaactgaatccaatagcacatsaaaaagattatatatcatgatcatgtgggatttattccagggatgccaggatggtttaacatgtgcaactctataaacatgaacagaataaaggacaaaaaccatattatctcaatacatgcaggaaaagcatctgataagattcaacatccattcaagataaaaattctcaacaaattaggtacagaaggaatgtacctaaacattcaataaattaagtacagaaggaatgtacctaaacacaataccccacagccaacattatactgaatgtggaaaagttgaaagttttctctctgagaactggtacaggacaagaacgcccacttttaccactcttattcagcatagcactttagg

SEQ ID NO: 883141 - DNA, 582 bp, Homo sapiens
ctttgctctcctctccttaagccaaaggaaggagtcatctttgttgctgtgagctgcacttcctggggttggaggagagatggcacaagcactcctttagctgccctggctggtgtttctctaggtcacaggccaccctagtccactgacactaaacccagcctagcactgggagttgcctaggagttgcagtccttgtatcctagactgcctttcaagtctacctagaaccccagaacactttgacccaccgcagtgaggcttgccaagaaactaatgtcttgaccactgagatgaaccattcccctctggctagggctggcccaaatgctccctctgttcatgggtgctggctgagcccagcatggctttgctctctrctgtgacaaggtggcactgagttcaatgtaaagtcccccagttgctgcactctccctcccgcaagttcacagattctctcttcacacagcatgactgctgctgggggatggaagagaggtggtgtcagagactcaagactgtccatcctaccctcttcaatgcctgtttcagcaatatgaagttaaagccaggtactgtgat

SEQ ID NO: 883142 - DNA, 640 bp, Homo sapiens
tgaatgtacaccataacaggtatcattatgtagtgtttcctatattctgatagctattgaattattattttattatacattcttgtaagtatacgtgtagacatgaaaataaacatgcacgacctatatgacatgctatgttcagtgatgacagctgtcttcccatttttttgatgtgttaaatgcaagaggtttatttctttttaaaaagttgttgtgggtacatagtagacatatatacttatggagttcatgagatattttgatacaggaatggaattcataataatcaygttatgaaagatgggttatccatcttgtcaatatctattctttgtgttacacacaattcagttatactgttttagttattttgaaatgtacaattaaatttttactgactataggcaccctattgtgctatcaaacactaggccatattcattcatttggactattttttgtacctgttactaagcctttttccaactccccactacctttctcagcctctggtagccatccttctactctctatctgcatgtgttcagttgtttggatttttagatcccataaatacataagaacatatgacgtttgtctttttgtgccaggcttatattacttaacataatgacc

SEQ ID NO: 883143 - DNA, 530 bp, Homo sapiens
gttgtgggagggacccagtgggagataattgaattatcggtcagtttcctctatactgttctcatggtagtgaataagtctcatgagatctaatggtcgggaaaccccttttgctttgctctcattcttctcttgtctgccaccattttgagacgtgcttttcacctttcaccatgattgtgaggtctccccagcaatgtggarctgtaagtccattaaatctctttcttttgtaaattgcccagtctagcatatgtctttatcagcactgtgaaaatggactagaacatcagactccaagttcttcagcttttggactcttggacttacaccagtggtttgccaggggctgtcaggccattgaccacagactgaaggctgcattgctggcttccctacttttgagattttaggactcggactgatccaccactgacttctttgctcctcaacttgtagatggcctatcattaggctttaccttgtgagtgtgtgagtcaattctctttaataaactcctttcatttata

SEQ ID NO: 883144 - DNA, 630 bp, Homo sapiens
tgaatgaatttagaaaatgtggtgcatatgcataatggaatagtattcagcctttaaaaagaaggaaatcctgccatttgaaacaatgtagatgaacctgaggacactatgttaagtgaaataagccaggcacagaaagaaaaatcttgtatggtctcacttacatttgaaagattaaaaagttgaacttatagaagcagagttagaagagtggttaggagaggctggggatggagtgggttagggagatgttcatagataatacaaaatttccacttaatacgaagaataagtttaagagatctattatacaacatgattactctagttaataataatatattgcagcttgaaaatgactaagggagaatttgtgttctcaccacaaaaaataagtgtatgagataaygcatttgttaactagattaatttagccattctgcaatgtatacattttcaaaacataatgttgtacatgataaatatgtataatattttcaattaaataaataaatacaatgttttaaaaatgtaacatgtacagtttaagggttaggtcataaaggaaaataatttaactcctaccttgacttccctgccttctttctgtctgcaatggagatgtatttt

SEQ ID NO: 883145 - DNA, 630 bp, Homo sapiens
tgttataacatatattatgttataacatagcaatgaaaactcttttcctcattgttctttgttagaatagagtagctgttctgcaaaagttcttaggggttcagatattatttgaaaaggagtcacatatgatagagccgtctgaggaatttggaagatctagagatgatacttccaagatcaagatcttacatgaagtgcaattatttcagcaacatatcagttgcacagtcagagttttaaaataatattgtattacaagactttttaaaaagttttactttaagttctrtacagcatgtgcaggtttgttacataggaatgcatgtgccatggtggcttgctgcatctatcaacccatagaagacaattttaatcacattttttggcatacatgtattatggaaatattcaaactaatttgtaaagttacttgaaatatgtgtatttgtatcaccttgtggtagatggctctactccatatataacatgtttctccaagtactagcattgggattgcaatgggattggtaaggagggactagtggaaagagaccaaccacgcctataacccaaaatctagtaaacttggggtgttcaggaaaaaaagcaatcaattagcgaggttta

SEQ ID NO: 883146 - DNA, 630 bp, Homo sapiens
tgttataacatatattatgttataacatagcaatgaaaactcttttcctcattgttctttgttagaatagagtagctgttctgcaaaagttcttaggggttcagatattatttgaaaaggagtcacatatgatagagccgtctgaggaatttggaagatctagagatgatacttccaagatcaagatcttacatgaagtgcaattatttcagcaacatatcagttgcacagtcagagttttaaaataatattgtattacaagactttttaaaaagttttactttaagttctgtacarcatgtgcaggtttgttacataggaatgcatgtgccatggtggcttgctgcatctatcaacccatagaagacaattttaatcacattttttggcatacatgtattatggaaatattcaaactaatttgtaaagttacttgaaatatgtgtatttgtatcaccttgtggtagatggctctactccatatataacatgtttctccaagtactagcattgggattgcaatgggattggtaaggagggactagtggaaagagaccaaccacgcctataacccaaaatctagtaaacttggggtgttcaggaaaaaaagcaatcaattagcgaggttta

SEQ ID NO: 883147 - DNA, 629 bp, Homo sapiens
tcttttcccctttttaaatatacttatgtattaataatgttacaatctatttataggagacattattaaaacacagccaagagaactcaaaacctaatgatctgattgataaaacgtatgtataaagaacagtaatctaaccacctgtgttagtctgatagggctgccataacaaaatacyatggactggatagcttaaaaacagaaattgttttctcacatttctttaggccagaagttgaagatcaaggtttcaacagggttgatgtctcatgaggactctcttcttggctttcagacatttaccttctcaccgtgtccccacatggcctttcctctgtgcacctagaaagagagagagagagagaactcatttattgctggtgagaatgcaaaataattgtcactttgggagacaatctgacagtttcttataaaactaagcatactgttaacatacaagccagcaatcatgctatttggtctgtacctagaggagctgaaagcttttgtctgcacaaaagcctacatgctgataattatagctttgttcataatccccactacttggttgaagcaaccaagatgtccttcagtaggcatatgaataaacaaactgtggtgcatcc

SEQ ID NO: 883148 - DNA, 645 bp, Homo sapiens
agtatcacattgtggttctgatttgtatttctctaatgattagtgatgttgaacgtttctttagatgttttgtggccacacacattttcttttgaaaagtgttagtgtcctctgcccactttttgctgtggtggtttggtttttgcttgtaaatttgttccagttccttatagattcttgayattaaacttttgtcacatgcatagtttgcaagtattttctcccatttgtaggttttctatttattctattaatttttttttctgctttgcagttctttagcttaattaggtcccatttgtcaatttttctttttgttacagttacttttggtgttttcattataaagtttttgccagggcctatgtccagaatggttttatctagtttatcttccaaggcttttataattttaggttttaaacttaagtctttaattcatcttaagtttacgtttgtatattgtgtaaggtaggaaggaaggaaggaaggggtccagtttccatcttctgcatatggctagccagttatcccaacaacatttattaaataggaagtcctttcctcattgcttacttttgccaactttgtggaagatcaaatggttgtaagtgtgtggccttatttctaagctctctattgtgt

SEQ ID NO: 883149 - DNA, 645 bp, Homo sapiens
agtatcacattgtggttctgatttgtatttctctaatgattagtgatgttgaacgtttctttagatgttttgtggccacacacattttcttttgaaaagtgttagtgtcctctgcccactttttgctgtggtggtttggtttttgcttgtaaatttgttccagttccttatagattcttgacattaaacttttgtcacatgcatagtttgcaagtattttctcccatttgtaggttttctatttattctattratttttttttctgctttgcagttctttagcttaattaggtcccatttgtcaatttttctttttgttacagttacttttggtgttttcattataaagtttttgccagggcctatgtccagaatggttttatctagtttatcttccaaggcttttataattttaggttttaaacttaagtctttaattcatcttaagtttacgtttgtatattgtgtaaggtaggaaggaaggaaggaaggggtccagtttccatcttctgcatatggctagccagttatcccaacaacatttattaaataggaagtcctttcctcattgcttacttttgccaactttgtggaagatcaaatggttgtaagtgtgtggccttatttctaagctctctattgtgt

SEQ ID NO: 883150 - DNA, 645 bp, Homo sapiens
agtatcacattgtggttctgatttgtatttctctaatgattagtgatgttgaacgtttctttagatgttttgtggccacacacattttcttttgaaaagtgttagtgtcctctgcccactttttgctgtggtggtttggtttttgcttgtaaatttgttccagttccttatagattcttgacattaaacttttgtcacatgcatagtttgcaagtattttctcccatttgtaggttttctatttattctattaatttttttttctgctttgcagttctttagcttaattaggtcccatttgtcaatttttctttttgttacagttacttttggtgttttcattataaagtttttgccagggcctatgtccagaatggttttatctagtttatcttccaaggcttttataattttaggttttaaacttamgtctttaattcatcttaagtttacgtttgtatattgtgtaaggtaggaaggaaggaaggaaggggtccagtttccatcttctgcatatggctagccagttatcccaacaacatttattaaataggaagtcctttcctcattgcttacttttgccaactttgtggaagatcaaatggttgtaagtgtgtggccttatttctaagctctctattgtgt

SEQ ID NO: 883151 - DNA, 664 bp, Homo sapiens
gttctttagcttaattaggtcccatttgtcaatttttctttttgttacagttacttttggtgttttcattataaagtttttgccagggcctatgtccagaatggttttatctagtttatcttccaaggcttttataattttaggttttaaacttaagtctttaattcatcttaagtttacrtttgtatattgtgtaaggtaggaaggaaggaaggaaggggtccagtttccatcttctgcatatggctagccagttatcccaacaacatttattaaataggaagtcctttcctcattgcttacttttgccaactttgtggaagatcaaatggttgtaagtgtgtggccttatttctaagctctctattgtgttctactggcctatctgcctgtctttgtaccagtaccatgctgttttggttattataaccttatagtatagtttgaagttgggtgatgtgatgcctccagctttgttttgttctttgtttttgttttttggcttaggattgctttggctatttgggctcttttgtggactcatatgaaatttagtatagttttttcgaattatgtgaagaatgtcattggtagtttgatatgaatagcattaaattgtaaattgcttttggcagtatggccattttaacaataatgaatcttc

SEQ ID NO: 883152 - DNA, 649 bp, Homo sapiens
tagcacagaggtacattgtacccagtgttgttattgtgacatattgtgctgccttgtgctgtgtcatattgtaattcagacattaacatatgtgactaccactctttatgtagaaaatacagtgttctcatttgttccaaaaattgtaatatgcatatttcaaactacaaaatatatctattttcacggtagtatcaattatttattgagcttcttcataatatactagtaagcatattttaaattaagttktgaaaataatgaataaataaataaaataaagaaagagctgcaagttgctgagattctgggacatgtgaatatgttatctcagtaaagcatggcctgtgcagtattactccagttcctttctatttatgttcctcagacttgatttttttaagctttaaaataattagtttaaatattttgtcaaactttagaaaacacttcttatagacaaattgttggacaaagaaaggaacaataagaagctgtgggaagtaaaagtaatattttgggagtcaaaattgtcatttctctgtgctaagattgaagatgtatacacattatcgtcagcattcacacactcactcacacacacacacgcaatttgtaccttaaaatactatacaaaataaaattggtg

SEQ ID NO: 883153 - DNA, 649 bp, Homo sapiens
tagcacagaggtacattgtacccagtgttgttattgtgacatattgtgctgccttgtgctgtgtcatattgtaattcagacattaacatatgtgactaccactctttatgtagaaaatacagtgttctcatttgttccaaaaattgtaatatgcatatttcaaactacaaaatatatctattttcacggtagtatcaattatttattgagcttcttcataatatactagtaagcatattttaaattaagttgtgaaaataatgaataaataaataaaataaagaaagagctgcaagttgctgagattctgggacatgtgaatatgttatctcagtaaagcatggcctgtgcagtattactccagttcctttctatttatgttcctcagacttgatttttttaagctttaaaataattagkttaaatattttgtcaaactttagaaaacacttcttatagacaaattgttggacaaagaaaggaacaataagaagctgtgggaagtaaaagtaatattttgggagtcaaaattgtcatttctctgtgctaagattgaagatgtatacacattatcgtcagcattcacacactcactcacacacacacacgcaatttgtaccttaaaatactatacaaaataaaattggtg

SEQ ID NO: 883154 - DNA, 650 bp, Homo sapiens
agcctcttcctgcacgcatacataaacctttgcagattaaagaggagtagtggcatatttccagaaaatcatattttgtaggagatactgtttgtcatctttggaaaattcaatcacctgtcttcacaactgattctcagaaaatctaatcctttgtctgggtgcattttacccctgtaaaaattgtggtttggctgcctctataaagatgaaaggttattcagcagaggtctttgaatgacctctgttagtccatctataaaataagcaatataatagtatccacctytaaaagttattatcaactgtaagtgaaatattgccagttatcactttggggacgttgtaaagaaatatgatgacctctgaggattccccacagcctggtgctttactccacgtggattccccattgctcaggatactttcaatgtattatcataaattattgattcccagcaatttcatatcatggctcacacagaaaacataataatccgtgacaaaaattgatgtgtcaaaggttgctcatagcctgagttgccagaacaaagagctctgggtcacataggcccaactcagttcacctgtctgctgaggaaatcaataactctgcaaaactttagcacactctccactgttatcaacct

SEQ ID NO: 883155 - DNA, 659 bp, Homo sapiens
gactggtgttagggataatttgtgttctgcaaggacacttctctggtttctggtcaaatagctcctttaaaaaaatttttcttgccctattgtgaagttttcaagaagattcagacatcccccaaggtagtctataattccagatgaccagtagctcttggaagaagactaatttccaagaagacattagagaaaatacaaacatctttttttgccagagacaattcatttattctaatacatttgttgattattactgtgatccatgtactcttgtaggtgtttagcatagttcratgaataaagaagcccctgtacttcaataggtagagacagaattgatgcatgcctgtcagatctccatttgtgagggatgtaattaactgccaattacagatattatgctctaaaattagtcatttgtgccaagggaatgctttctgttgtttctctgtgccaacgattgaataaggcaagggtgttaaaggtgatctcattcaggagggtgatatggttcttctttgatgggacattttgatgcaagaactttacaatagccttgtcaagtctcttaggtctatatagcaggctaagttgcttcatcctttactttgttctttttatcctttgcccagggccaactggcatcaaggtctgac

SEQ ID NO: 883156 - DNA, 578 bp, Homo sapiens
ggcatcaaaatagacacatagaccaaaggaacagaatagagaacacagaagaattccatacacttacagtgaacttactatggacaatggtgctaaaaatgcaaagtggagaaaggtactctaatcagtaaatggttcagggaaaactggaggtccacatgcagtgaagaatgaagataaacccctaggtctcaccataaacaaaaatcaactaaaaattattaaagtattaaatgtgagatcctaaatggtaatattactataagaaaacataaaagaaacactttatgacactgrtctgcacaagaattttttggataagaccccaaaagcacaggcaacaaaagaaaacatagacaaatgagattacatcaagccaaaaagctactgccacagcaaagtaaacaattaagaaaatgaagagacaacctacagaatgcagaaaaaatggcaagctattcagctgataaggttttaacatccagaatatataagaaattcataaataattcaatagcaatatttttaaaacaatcaaaagatctgagtagacattgcttaaaagaagacaagcaaat

SEQ ID NO: 883157 - DNA, 583 bp, Homo sapiens
tttgaaaaacagaatccaaagtcttcaaactttactattcataatatctaagacaggataccaatttctatgcatataaagtaacagcaagtgtgacccatactcaaggaaaatgaaaatgaaggccaacccagtggtgactttggtgttagaatcagtacgccagaaagtatgctcaaagacaaaaaaaaaaaaattgttacaaaagaaaagcagaagttaaacaactgaaagacacagtacagaaaattatagmaaaaaaaaaaaaaatcaccaagtgaccctagcagaagattaggaggacagaaaaataagtgagaatgaatacagatcaataaaatagttatctaatctgatgtacaaaaagaagtaagattagaaataataatgaacaaagtatcaggaacttgtgaggcaatataaaaatacttaacatagatgtaactagagacccaaaagaaaaggataaataaaacatacagagaaaatatgttaaaaggtgatgacccatacacctcaaattattgaaagacataaatttagatagcgaaaaaatcatagaagcataatcagttagaaataa

SEQ ID NO: 883158 - DNA, 583 bp, Homo sapiens
tttgaaaaacagaatccaaagtcttcaaactttactattcataatatctaagacaggataccaatttctatgcatataaagtaacagcaagtgtgacccatactcaaggaaaatgaaaatgaaggccaacccagtggtgactttggtgttagaatcagtacgccagaaagtatgctcaaagacaaaaaaaaaaaaattgttacaaaagaaaagcagaagttaaacaactgaaagacacagtacagaaaattatagaaaaaaaaaaaaaaatcaccaagtgaccctagcagaasattaggaggacagaaaaataagtgagaatgaatacagatcaataaaatagttatctaatctgatgtacaaaaagaagtaagattagaaataataatgaacaaagtatcaggaacttgtgaggcaatataaaaatacttaacatagatgtaactagagacccaaaagaaaaggataaataaaacatacagagaaaatatgttaaaaggtgatgacccatacacctcaaattattgaaagacataaatttagatagcgaaaaaatcatagaagcataatcagttagaaataa

SEQ ID NO: 883159 - DNA, 633 bp, Homo sapiens
tgtccaagtttaaaatctcatctgagacaaggctagtccctcctgcctatgagcctgtaaaatcaaacacaagtgagttccttccaagatacaacggccatacaggtattgggtaaatatgactgtttatttttgggagaaattggccaaaacaaagagtctagagggccyatgcacgtctgaaatctcatagggcagtaattgaaccttaaagttccaaaatgatctcctttgatgctatgtctcacatccagatcatgctgatcgcaagagctgggcttccacgaccttggacagttctgcacctgtggcttggcagggtacaaaccctctcctgggagctttcaccagatggcattgagtgtctggggcttttccaggtgcacagtgtgaggtttcaggaggtctaccattctgctgtctggaggacagcactaggcagtgcctcagtgggaattctgtgtggagactccaactccacacttcctttccacgctgccacaggagaggttctccatgagggctctgcccctgcagcaaactttgcctggacatccaggggtttccatgcatcctctgaaatctaagcagaggcgatcaaaactcaattcttgtcttctgcacacccacagg

SEQ ID NO: 883160 - DNA, 631 bp, Homo sapiens
ttgatgtcagtgtttagtgattaaattgacatcttaagactgccttagctgtgtcccagagattctgttatgttgtatctttgttcttattagtttcaaataacttgattttggccttaatttcattatttgcccaaaagtcattcaagagcaggttaatattccrgtaaatgtatagtttcgagtgcttttctttgtattgaattttatttttattgtgctgtggcctgagagcatggctggtataattgtgtcctttaaaagttcctgtggattgttttatatcccattgtgtggttgatttcagagtatgtgcttgctatattcagatgagaaaaatgtataatttgttgttttggggtggagagttctgtagatgtctatcagatccatttagcccaaagttgagtctaggtcctcaatatctttcttaattttctgcctcaattatctgtctaatactgtctgtggagtgttaaagtctcccactattattgtgtgggagtctaagtctctttgaaggtctctaagaacatgctttatgaatctgggtgcacctgtgtcaagtgcatgcatagctacgatagttagttttcttgtagaattaacctttaccattatgtaatatctc

SEQ ID NO: 883161 - DNA, 604 bp, Homo sapiens
ttagtctgacaggcttccctttgcaggttacctgccctttctctctggtaaatttttccttaacattctttcttcaattttgatcctggagaatcttatgattgtgtcttggagatgatcttcttgtgaagtattttgcaggggttctttgcatttcctgaatttgactgttagcctctatggctgggttgtggaagttctcatggttgatatcctaaaatagttggttccattctcctcatctttttcagggatggcaatgagtcatagatttgytctctacataatcccatattttttcaaaggttttgttcattccttttctttcttttctctttatttttattttattttcttattttagaaagccaatcttcaagctctgagactctttcctcagctttgtctattctgctgttaatccttgtgattgcattgtgaagttcttgtagagtatttttcagctctattcagttggttagattattttctacactgacaattttgtcttttggctcctgtattgttttatcataatttgtagcttccttagattgggtctcaatgtttttctgaatctcaatgatcttcattcctgtccata

SEQ ID NO: 883162 - DNA, 693 bp, Homo sapiens
ggataaccttaatcttagactggtgagcaatttatggtactttgatatcttccttttaggagctttgggcattttaaattgatcatatagtgcatggcatgcagcattagaacaaaattagaatagatttgaatattaagcaaagggactggagcagaggcccagatatcaccactggaggcatcaaagggataaaactgtacttcatctcctccacaggagcatgcaagcgtttgtggttgtaggtgggtgcctctgtactctctcccaaacagcaatcctttctgctgttacaaaatgcaactattccttttggggacttccaagtcctttatggtcagtccatatgttgtgattgcactgaccacaaaggtgatcataggaargcgtataactgaggatagaccaaataaattcagtcttatgattttatctggtataatcagaagagaggaagactttttcactggagatggcaagatagtggagtacatatatggtgtttccagcgactattttttactactatatgtaaagagacatctgttaatgaaatcagtagatctaaaagataatgaaagacattgctgaggatattatttgagcatctggacttggtgctttctaagtcattcttccctgaattttcagttgattgtgacaagagttcaaatttgagttaagtttccatcg

SEQ ID NO: 883163 - DNA, 635 bp, Homo sapiens
tctataattgaataacaaatttccatttttttctgaatttggggaattaagagttcattcttctgataaagcaaaataaattacaatatactcatttttcttttaagattcagacgatgcaaataaaagttagatgaaatttacagcaaaataaaatagaaaaaattaacgtgtttatactgttgttcaactgttcagatttctagtttygtactatgtattctttattatcaacatactagaatatgatgtaattcaagaacatttcatacataatcactttgataaaaaaggagattggcaagagcataaaaatatttaaaacactagattaatgaatccaaagctacataaagatcttataataacagtagtaaacattttgagaaatgtgtagaaactcctaactgcagggttttataaccaatatgttataactaatataaaagcaatatgttgctaatagacagccatacttcacactaagttctctaatgggataacttgcaggattcataatttaacaacagattgaaaaaggaaaatttttagattcagtagcaaacattttggatttctcaacaacactttctccctaaattgctgtgaaatacattattcatcaatacctagat

SEQ ID NO: 883164 - DNA, 635 bp, Homo sapiens
tctataattgaataacaaatttccatttttttctgaatttggggaattaagagttcattcttctgataaagcaaaataaattacaatatactcatttttcttttaagattcagacgatgcaaataaaagttagatgaaatttacagcaaaataaaatagaaaaaattaacgtgtttatactgttgttcaactgttcagatttctagtttcgtactatgtattctttattatcaacatactagaatatgatgtaattcaagaacatttcatacataatcactttgataaaaaaggagattggcaagagcataaaaatatttaaaacactagattaatgaatccaaagctacataaagatcttataataacagtagtaaacattttgagaaatgtgtagaaactcctaactgmagggttttataaccaatatgttataactaatataaaagcaatatgttgctaatagacagccatacttcacactaagttctctaatgggataacttgcaggattcataatttaacaacagattgaaaaaggaaaatttttagattcagtagcaaacattttggatttctcaacaacactttctccctaaattgctgtgaaatacattattcatcaatacctagat

SEQ ID NO: 883165 - DNA, 621 bp, Homo sapiens
gaacccctacatctcagaagagattggggacctagattaaatattcttaaagaaaaatattttcaaccaagaatttcaaatccagccaaagtaagttttttaagccaggagaaataagatccttttcagataagcaaatgctcaggaagtttctaccaccagaactgttttataagagttcttgacaggagaactaartatagaaaggaaagactgctcgtggctaactcaaaaacagacttaactacacagaccagtgacactataaagcaaccacataaacaaggcaccataattaccagctaataacacaatgacacatatcaatactaaccttgaatgtaaataggctaaatgaccccacataaaaggcacagagtggcaagctggataaaaaagcaagatccaatggtaagctgtcttcaagaaatccatctcaaatgtaatgacatccattggctcaaaataaagggatggagaaaaatccaccaagcaaatggaaaacagaaaaaaaaagcaggggttgcaatcctaatttcaaacaaaacagagtttaaaccaacaaaaataaaaaagacaaaggaggacattacatatggtaaaggattcaattcaacaaaa

SEQ ID NO: 883166 - DNA, 597 bp, Homo sapiens
acatattttttcccacttcttgaatttaagattactgtatcacacacttcttggtttgtatattttggcatcactgaataaacatcatttatgcttttttcttgaggagtttatatcaaaatttttatatgccaagtttcttgacaggattcctaacatttcataattcaatggtagatatagtcagtgacacagctcagtattacattaaacacaacatgataattcctgtgactgctttgttttccttttacttataaccgatttaaatattttcataaagagttatggttttccagacataagtaagatttcaagaactacagaatacatattaacattgtcagtcacaaagttaactttgccaactacttatatctamcatcacaactatggtatttttcagaaaactatctatctagctatcatatctatctatctatctatctatctatctatctatctatctatctatcatctatcaccttgtaataacaagaacttgaggcagctccttttttagctttaattaatcagaatgacttaaaagaggttttataaaatttaattattttggctctacattaagtgttaatg

SEQ ID NO: 883167 - DNA, 643 bp, Homo sapiens
tggaaaaaatcaaaataagaatagtatttcttttcttttttctttaatctgtatttgtcaaaccttttaaagccaaatgtgattcaggcactatatttccatttacgagcctctctctgagttatttttcaagagctttacaatatgcctaggtaagcttataattttgctcctctaataatacttttctttggtaattaagccctgtggagagtttaatgctccagtttaacgtatttctagaggactagtacgtgcagagttggcaactatarcggatgcaaagttgaaaaagtagatcccagaagatgtaaaaaataatttttttgtaaacatcaaggtatatctcagaggaagatcctctgagaccaccacctctttaatgaagttctgatattcaggtattagtttctcacagttttccatgacgaaaactctgtacataaaacttaatgttgttatttttctttctgattttaaatagatgtaaaggagcacatcttgggacaaaaagaagagctctgaagaataatatttcttgacagataaaaattatctgaaatgcaagtttctgtgtccataaataatgttttattgaaacacagtcatgcctcttcatgtctatattgtctgtggttccctc

SEQ ID NO: 883168 - DNA, 488 bp, Homo sapiens
aggagtattatcaaaatccacagccaccctcagttcttagaaactcagatgcccttgaatgcaggcatttacagaaaagagaatgagtcatttgtatagatggagctatttactggatgttatcatttttaatgccatagtactctctattttctttcctcttacgttctcattatcaagttttcctttggcacctatttctccagatgctaacagtgaatacaattttcctacccaaaaatttctttcaatttttgggtaggaacaaacagacatgaatataaataacagcaggggtagtttgctcttaaagatgttccccggrtgtttctttcttggaggacgctataattgtccaatttaactctgttagcattttggagaataacagatacatagaacagatatccttatggtagaattatctgagtgcaaatttgtttaacggcaaacatttagtcagtaattcatatggaagctaatatttt

SEQ ID NO: 883169 - DNA, 614 bp, Homo sapiens
agatatcaggacattttttttaagaggactggcatggttgcttatggttgtaatcccagcgctttgggataccaaggtgggaaggttgcttgagctcaagagtttgagaccatcctgggcagcattgtgagactctgtctctactaacaataaaacttaaaaatttagccagcatggtggcacatgcctgcagtcctagctacttggaaggctgaggccaagggattgcttgggccaaggtatctgaggctgcagtaagccatgattgcaccactgcacttcagcctaggcagcacagtgagaccatctctcaaaaaaaaggaaacaaaaacaaacaaacaaacaaagaaaacaccaaccaaccaaacaacaacaacaacaacaamaaagacaaatgatatcaggggaaattccttagaaaggaattaaaattcaaagggtgattattcaagtacaaaatttcataaaaataagttcctaaacaaaatatagactagtaacatttttacaacagcaacttaaatatccatttgagaaattctccattcatacaacacctccactgtatgaatgctgagccagaaagtagcctaccattacagcttagctcttaa

SEQ ID NO: 883170 - DNA, 690 bp, Homo sapiens
tgattttttaaaaaatgtttaaacattaactattagtcccctttgtattagtgaggcttctgcaaagaaatagaaccaatagttaatctctcaggattattctaagaaattggctcatgcaatcatagaggctgacaagcaccaagatctacaatcaatctgaaaacccaagagagctgatagtatagctccagtccatgtccaaggcttaagaaccaggagagtgaaagtgtagttccagtctgagaccatgtaggattkagacccaggaagacccaatgtttcagtttgagtctgaatgcaggagaaaaccaatgtccccacttgaaggcactcaggcaggagaaattccctttactcccaggagggtcatcttttttgctctattcagacattcaactcactgaataagccccactcaccttgaaaaaggcaatctgttttatttggtctaccaattaaagtgtaaatctcatccagaaacaccgtcacccccacacctagcacaatgcttgaacaaatatttgggcactctggatcccggtaatgttgacagatgaaataatcatcacattctgcaaatgcatttctctgtaatttcagtattttactcactcaaactgtagttgtttttgagataagagtcaataaaggtcatgcaagggcatttaatcagatatcttaatttta

SEQ ID NO: 883171 - DNA, 690 bp, Homo sapiens
tgattttttaaaaaatgtttaaacattaactattagtcccctttgtattagtgaggcttctgcaaagaaatagaaccaatagttaatctctcaggattattctaagaaattggctcatgcaatcatagaggctgacaagcaccaagatctacaatcaatctgaaaacccaagagagctgatagtatagctccagtccatgtccaaggcttaagaaccaggagagtgaaagtgtagttccagtctgagaccatgtaggattgagacccaggaagacccaatgtttcagtttgagtctgaatgcaggagaaaaccaatgtccccacttgaaggcactcaggcaggagaaattccctttactcccaggagggtcatcttttttgctctattcagacattcaactcactgaataagccccactcaccttgaaaaaggcaatctgttttatttggtctaccaattaaartgtaaatctcatccagaaacaccgtcacccccacacctagcacaatgcttgaacaaatatttgggcactctggatcccggtaatgttgacagatgaaataatcatcacattctgcaaatgcatttctctgtaatttcagtattttactcactcaaactgtagttgtttttgagataagagtcaataaaggtcatgcaagggcatttaatcagatatcttaatttta

SEQ ID NO: 883172 - DNA, 566 bp, Homo sapiens
ctataaagacacatgcacacatatgtttattgcagcactatttacaatggcaaagacctggaaccaacccaaatgcccatcaatgatagactggctagagaaaatgtggtaggtatacaccatggaatactaagcagccaaaaaaaggaatgattgcatttcctttgcagggatatagatgaagctggaagccatcatcctcatcaaactaacacaggaacagaaaaccaaacaccacgtgtcctcactcataagtgggagttgaacaatgagaacacatggaaattgagagaagggatcaatacataccaaggcccrttgtgggttgcgggggtgagaggaaggaacttagaggacaggtcaataggtgcagcaaaccaccatggcacacgtatacttatgtaacaaacctgcacgctctgcacatgtatcctgttgtttgttgttgttattgttcttgttttgtagaagtaaagaaaaaaataaaaaaaagaagaaaattaattcaatggaaataggagactcattacaacaatggtggtatagcaatttaatgaactttggcc

SEQ ID NO: 883173 - DNA, 566 bp, Homo sapiens
ctataaagacacatgcacacatatgtttattgcagcactatttacaatggcaaagacctggaaccaacccaaatgcccatcaatgatagactggctagagaaaatgtggtaggtatacaccatggaatactaagcagccaaaaaaaggaatgattgcatttcctttgcagggatatagatgaagctggaagccatcatcctcatcaaactaacacaggaacagaaaaccaaacaccacgtgtcctcactcataagtgggagttgaacaatgagaacacatggaaattgagagaagggatcaatacataccaaggcccgttgkgggttgcgggggtgagaggaaggaacttagaggacaggtcaataggtgcagcaaaccaccatggcacacgtatacttatgtaacaaacctgcacgctctgcacatgtatcctgttgtttgttgttgttattgttcttgttttgtagaagtaaagaaaaaaataaaaaaaagaagaaaattaattcaatggaaataggagactcattacaacaatggtggtatagcaatttaatgaactttggcc

SEQ ID NO: 883174 - DNA, 566 bp, Homo sapiens
ctataaagacacatgcacacatatgtttattgcagcactatttacaatggcaaagacctggaaccaacccaaatgcccatcaatgatagactggctagagaaaatgtggtaggtatacaccatggaatactaagcagccaaaaaaaggaatgattgcatttcctttgcagggatatagatgaagctggaagccatcatcctcatcaaactaacacaggaacagaaaaccaaacaccacgtgtcctcactcataagtgggagttgaacaatgagaacacatggaaattgagagaagggatcaatacataccaaggcccgttgtgggttgmgggggtgagaggaaggaacttagaggacaggtcaataggtgcagcaaaccaccatggcacacgtatacttatgtaacaaacctgcacgctctgcacatgtatcctgttgtttgttgttgttattgttcttgttttgtagaagtaaagaaaaaaataaaaaaaagaagaaaattaattcaatggaaataggagactcattacaacaatggtggtatagcaatttaatgaactttggcc

SEQ ID NO: 883175 - DNA, 566 bp, Homo sapiens
ctataaagacacatgcacacatatgtttattgcagcactatttacaatggcaaagacctggaaccaacccaaatgcccatcaatgatagactggctagagaaaatgtggtaggtatacaccatggaatactaagcagccaaaaaaaggaatgattgcatttcctttgcagggatatagatgaagctggaagccatcatcctcatcaaactaacacaggaacagaaaaccaaacaccacgtgtcctcactcataagtgggagttgaacaatgagaacacatggaaattgagagaagggatcaatacataccaaggcccgttgtgggttgcgggggtgagaggaaggaacttagaggacaggtcaataggtgcagcaaaccaccatggcacacgtatacttatgtmacaaacctgcacgctctgcacatgtatcctgttgtttgttgttgttattgttcttgttttgtagaagtaaagaaaaaaataaaaaaaagaagaaaattaattcaatggaaataggagactcattacaacaatggtggtatagcaatttaatgaactttggcc

SEQ ID NO: 883176 - DNA, 595 bp, Homo sapiens
gagaggatgtaggggtacacagtaatattgatgaggtaaacaagtgaattcttaatcaatagtggtcattgtcctacttcttcctaaaaggaattaatttccaaccaaacctggataatatttcttctgtttttattcttcacatgaatagatagagttacctctaagagttatagagttgggaattttgtccagccctgacatttattgaaacaaatgttatctatcaactcagtgatataaattttaattttcaataaatgagaatctcttaaagaaataatggtagtaataatgatgaaatatctttgcaaaagatatcaaagtttcagattgtataatagtttgaacatcaagttgatcatttgaaaaatttcgttatttaagtattcaactttgtccaaaggatgtagacctgtattaggagacataataaaatattatcaataataawtgtgccttatttgaataaattaatatttgagagcctttctgactgacaatgtcagcaggaaaaatggaaatgaaacatttgcattagcagattcagaagtgctagaaaaggtacaaatacggaagctggggaatttcatgg

SEQ ID NO: 883177 - DNA, 615 bp, Homo sapiens
cttttgtctcacagctctgaagattctttacttcatcttgacttcagatagcttgacgactatgtgccttggtgataatctctttgcaatgaatttcccaggagttctttgtgcttctggtatttggatgtctagatctctagcaaggccaaggaagtttttctccattattccctcaaattggttttccaaattttcagacttcacttctctctcaggaacaccaattatttttaggtttggctgttttatgtattcctttatttcttggagactttgtttattttattatttcttttttctttgcctttgactgattgggttaataaaagccttgtgtttaagttctgaaatactttcttctacttgttctagtctattgttgaaattttccactgcattttgttttttcttaagtgtgtatttcayttccagaaattcctattacttttttctttatgatatctatttctctggagaaaaatttattcatatcctgaatttttttcttaatttctttaagttgcttttcacttttctacagtatctccttgagtagcttaataattaactttctgaattctttggcatttcagagatttcttcttgatttga

SEQ ID NO: 883178 - DNA, 596 bp, Homo sapiens
gtgtagacttcaggtgatacacttaatgcttcactgaaatctccttagcccactacagagaataatggcaactttggggaagtcctcctatatgccagtggttttctactgtgtatttctatatctctgtygcgcagctttctctgtctgtatgatcaagatcaatctgcctgcaggacagtttggaagtgccaagggcttaatgattgcagtagcaaacctcaaccaatgaggatgaatgtgagtgaataaaaaccacacttacctgtccctcaggaccatagttctgagatattttccacataggttctcactggcattgaacccgagtgatctgcagtggttcctggctcagtaatataccttttgttgctgatcctcctttacctgtctcctagtctctcaccaggcttccatattacttacaaaataaactcttagcaaaagactatttgctgtacgaactacattttgggaaatacaatttcagacaccatcatcatacaactaattcttggactatttttctactaaaaatttaacttatagcaatatgtggttttgaataaattgtattttctataatgaaagtaata

SEQ ID NO: 883179 - DNA, 660 bp, Homo sapiens
ttagcttatattgttttcattatgaattgtaagatacaggtggcttcctggtgctgggaggtagatgctcttgtaaagatggccctgataactccctgctcctcacaaaagagacacagaattacaggagaagcaatgcctctcgggagggaatctcttttctcatctttgcccacagcctgagctctgagtccctctgtttattttctctcagtttgtgcttaaacttgaatgtcctacagatcttgggtctctttaaatcctctcctggtatctgagagcccttggcctggaaaggttgtgtytctcctagggggctggcttcacagtgtgtgctcagtgaggttgcacagggcccaacacttcaaagggctcagcatttgaggtttaatgctctggagtggctgtcttgaaattcttaataaatttatctctgaattctgtaagtcagtcaaatgggacaatggagcatgcacttgatccagtgggggcctggagccacagctcgcgatgcagtcctgtatactgccacctttctgccttcccaggacaggttctcagccatccattccccatttccaggtgccccaggtctacctggccttccttaccctatccactgctgtggctgctgtggctgtccacctagggcagtgacag

SEQ ID NO: 883180 - DNA, 614 bp, Homo sapiens
aaaagagctgttcatggcctaagctggttgtgtcaggacataattggttaggtgaattggtgagagctctcacctacccctaatttttgggttgggaaggtgggcatttggttaggagaggatgacttccccatgcctggcaaaggacctgtattctaattttgtcctaggacccacaatttatgtgtctttcctggtctcgtctagtatgctatagacagtccctcttagttgtgactttgacaaatcctgtccctgagacatcttctaacagagasaggagaggaatactgacaaatgtatcttgagctcttaaaatttgtgacatcctgtgcctaacacttgctattaacaatctcatttcattcttacacaaccatagcatagaaattctccagttagtaccattttatagatgatgaaactgaagcatgaacattccagaaatttcacaaagtcttatagcccagaggcttcatatctaaaattcaaaccaagaatccttttatcagaaatccgtaaagttctgcgtcatgtcagatgtgagctggaccaacaccaaaacagaaaagaagtttcacatttcagtttgaaatgaagatgtggctttttca

SEQ ID NO: 883181 - DNA, 614 bp, Homo sapiens
aaaagagctgttcatggcctaagctggttgtgtcaggacataattggttaggtgaattggtgagagctctcacctacccctaatttttgggttgggaaggtgggcatttggttaggagaggatgacttccccatgcctggcaaaggacctgtattctaattttgtcctaggacccacaatttatgtgtctttcctggtctcgtctagtatgctatagacagtccctcttagttgtgactttgacaaatcctgtccctgagacatcttctaacagagagaggagaggaatactgacaaatgtatcttgagctcttaaaatttgtgacatcctgtgcctaacacttgctwttaacaatctcatttcattcttacacaaccatagcatagaaattctccagttagtaccattttatagatgatgaaactgaagcatgaacattccagaaatttcacaaagtcttatagcccagaggcttcatatctaaaattcaaaccaagaatccttttatcagaaatccgtaaagttctgcgtcatgtcagatgtgagctggaccaacaccaaaacagaaaagaagtttcacatttcagtttgaaatgaagatgtggctttttca

SEQ ID NO: 883182 - DNA, 621 bp, Homo sapiens
agtttgacttcctttttttaaattaattaatttatttatttattatactttaagttctagggtacatgtgcacaacgtgcagatttgttacatatgtagacatgtgccatgttggtgtgctgcacccattaacttgtcatttacattaggtatatctcctaatgctatccctcccccatcgccccaccccacgacaggccctggtgtgtgatgttccctgctctgtgtccaagtgttctcattgttcaaatcccacctgtgagtgagaacatgcggtgttttgttttctgtacttgcgatagttttcattctgagtttgacttctttagattccactgataagtgtagtatacaatattggtctttctttgtcttatttcactagcacaatctaggttcatccatgttattgaaaatgacatgatttacttccttttaagtctgaataatattccattgcatgtatatatacacacagrtaatctttattacattttctttatctatttatctgttgatggacgtttgtgttatttccatagcttgggtattaggaatactgctacaatgaacatgagcgtacaaataattcttcatgattctattttcagttgttttggt

SEQ ID NO: 883183 - DNA, 535 bp, Homo sapiens
ttgaattttttgtggaatttccacactgttttccataatggctgtaccaatatacaattcccaccaacagtgtacaggagttttcttttctccttaccctaatcaacttttgttatcctgtctttagtgataaccaccattctaacagatgtgaggtaataacttatagttttagtttatatttcrccagtgatggttgatttgaagcaccttcccctatacctgttggccgtttgtatgtcttcttttgggaaatatctattcaggtcctttgcccattcttaattaggttatttatttattttatgctattgaatttagttctttaaatattttgaatattatcccttattgtatatgtggtttgcatatatttttcccagtctgagattgccttttcattttgttgattgttttctttgctctgcagtaagtttttagtttgatggagtcccacttgtttatttttgttttgttttgtttaaccagtgcttttgatgcaatatccaaaaaattatttccaagaccaatgtca

SEQ ID NO: 883184 - DNA, 535 bp, Homo sapiens
ttgaattttttgtggaatttccacactgttttccataatggctgtaccaatatacaattcccaccaacagtgtacaggagttttcttttctccttaccctaatcaacttttgttatcctgtctttagtgataaccaccattctaacagatgtgaggtaataacttatagttttagtttatatttcgccrgtgatggttgatttgaagcaccttcccctatacctgttggccgtttgtatgtcttcttttgggaaatatctattcaggtcctttgcccattcttaattaggttatttatttattttatgctattgaatttagttctttaaatattttgaatattatcccttattgtatatgtggtttgcatatatttttcccagtctgagattgccttttcattttgttgattgttttctttgctctgcagtaagtttttagtttgatggagtcccacttgtttatttttgttttgttttgtttaaccagtgcttttgatgcaatatccaaaaaattatttccaagaccaatgtca

SEQ ID NO: 883185 - DNA, 535 bp, Homo sapiens
ttgaattttttgtggaatttccacactgttttccataatggctgtaccaatatacaattcccaccaacagtgtacaggagttttcttttctccttaccctaatcaacttttgttatcctgtctttagtgataaccaccattctaacagatgtgaggtaataacttatagttttagtttatatttcgccagtgatggttgatttgaagcaccttcccctatacctgttggycgtttgtatgtcttcttttgggaaatatctattcaggtcctttgcccattcttaattaggttatttatttattttatgctattgaatttagttctttaaatattttgaatattatcccttattgtatatgtggtttgcatatatttttcccagtctgagattgccttttcattttgttgattgttttctttgctctgcagtaagtttttagtttgatggagtcccacttgtttatttttgttttgttttgtttaaccagtgcttttgatgcaatatccaaaaaattatttccaagaccaatgtca

SEQ ID NO: 883186 - DNA, 535 bp, Homo sapiens
ttgaattttttgtggaatttccacactgttttccataatggctgtaccaatatacaattcccaccaacagtgtacaggagttttcttttctccttaccctaatcaacttttgttatcctgtctttagtgataaccaccattctaacagatgtgaggtaataacttatagttttagtttatatttcgccagtgatggttgatttgaagcaccttcccctatacctgttggccgtttgtatgtcttctttygggaaatatctattcaggtcctttgcccattcttaattaggttatttatttattttatgctattgaatttagttctttaaatattttgaatattatcccttattgtatatgtggtttgcatatatttttcccagtctgagattgccttttcattttgttgattgttttctttgctctgcagtaagtttttagtttgatggagtcccacttgtttatttttgttttgttttgtttaaccagtgcttttgatgcaatatccaaaaaattatttccaagaccaatgtca

SEQ ID NO: 883187 - DNA, 682 bp, Homo sapiens
tgcagccaggtggtcacagggcagatagagagcagttgttggattcatcagaataatttatatgaaaagcatgttcttagtggaatttgtagttctgttcctcaaatattactcagaaaaaaagttctacatatttggagatgaaagaaaaatagttaaccaaccaatgaccttgtccaaaaatgttttggtacagatacaggagttagggatattggtattcattctatattttaaaactaataataaaagtgagcagaaaaattttgatatggttagcaattcttgaacaaaaggcaaatacaatgtaaatarttaatggaatatgtaatttttgttggtcatatttaattacatatagtggactagtgtagctttaaaaataattttgtctgccgttgttcaatttcatttactatgaattgccagtggaaaatgacagatagacacggaaacttcataacaagaagcttcaagttacaaattttttctaactggattttctaactagatcgttttctggatttttatctctacatgaaatagggcattaatactttggtagtctattaaatgtagtgtcactttgatgaattaggtaatgagctgacatcattacatcaaaacaattactttcaggagattttcaaagggccttatgagcttaaattcaaagatattg

SEQ ID NO: 883188 - DNA, 651 bp, Homo sapiens
tcaactgttttcagacttctgttaaagtaggtattttgaccttctactgtgaaacacaaatgtccttaatgacatttagaatgatgagtccttttcaggtttcaatttactttgctcatgtctatctaagaaatgattacctatgctagctaaagtcttacaaaatgtatttcttaaataataaaacttgaaagttgtaattactccttgatccataatatgcaatayggacattgtttttgcaggtataacaacattaatcttttgtgcttcttcatcagagctcttgggtgaccagaggcattgctaaagagaaggaatattttgaaactttttttttctgagctgtaggtctcaacagtggacttaaattattcagtaagccattctgtgaccagatgtgctgttctccagactttgttctttcatttctagagcaaaggcaaagtagatttagcataatttgtaagggctctattattttcagatagtaaatgaagattgacttcaacttacatttgtcatctgcattagtcttatcaagagagtcagcctgtcctttgaagatttgaagccaggcattgacttctcttctctggctatgaaagtcctaggttgcacttcttccaatagaaggatgctttggctaca

SEQ ID NO: 883189 - DNA, 619 bp, Homo sapiens
gctatttccaccacatctgcaattacttcttcctctgtcgaagtcttgaacccctcaagtcttccttgagggttgtaatcaactgttttcagacttctgttaaagtaggtattttgaccttctactgtgaaacacaaatgtccttaatgacatttagaatgatgagtccttttcaggtttcaatttactttgctcatgtctatctaagaaatgattacctatgctagctaaagtcttacaaaatgtatttcttaaataataaaacttgaaagttgtaattactccttgatccataatatgcaatatggacrttgtttttgcaggtataacaacattaatcttttgtgcttcttcatcagagctcttgggtgaccagaggcattgctaaagagaaggaatattttgaaactttttttttctgagctgtaggtctcaacagtggacttaaattattcagtaagccattctgtgaccagatgtgctgttctccagactttgttctttcatttctagagcaaaggcaaagtagatttagcataatttgtaagggctctattattttcagatagtaaatgaagattgacttcaacttacatttgtcatctgcattagtcttatc

SEQ ID NO: 883190 - DNA, 583 bp, Homo sapiens
gaagaagaaccacgaagtggaagtaaaaggcctacaagcccagattgccagctctgggttgaccgtggaagtagatgccctcaaattgcaggacctcaccaagatcatggcagacatccaggcccaatacgatgagctggctcggaaaaaccgagaggagctggacaaatactagtctcggctgattgaggagagtaccacagtggtcaccacacagttcatcgaggttggagctgctgagatgatactcatggggatgagacatacagttcagtccttggagatcgacctgtactcgatgagaaatctgaaggccagcttggagaacagcctgaaggaggtggaggcccgctatgccctgcaaatggagcagcccaakgggaccctgatgcacctggagtccgagttgccacagacctgggcagaggggcagcaccaggcccaggagtaggaggcgctgctgaacataaggtcaagctggaggctgagatcgccacctaccaccccctgctggaagatggtgaggacttcaatcttggtaatgccctggacagcagcaactctatgcaaaccatccaaaaga

SEQ ID NO: 883191 - DNA, 651 bp, Homo sapiens
tcaactgttttcagacttctgttaaagtaggtattttgaccttctactgtgaaacacaaatgtccttaatgacatttagaatgatgagtccttttcaggtttcaatttactttgctcatgtctatctaagaaatgattacctatgctagctaaagtcttacaaaatgtatttcttaaataataaaacttgaaagttgtaattactccttgatccataatatgcaatatggacattgtttttgcaggtataacaacattaatcttttgtgcttcttcatcagagctcttgggtgaccagaggcattgctaaagagaaggaatattttgaaactttttttttctgagctgtaggtctcaacagtggacttaaattattcagtaagccattctgtgaccagatgtgctgttctccagactttgttctttcatttctagagcaaaggcaaagtagatttagcataatttgtaagggctctattattttcagatagyaaatgaagattgacttcaacttacatttgtcatctgcattagtcttatcaagagagtcagcctgtcctttgaagatttgaagccaggcattgacttctcttctctggctatgaaagtcctaggttgcacttcttccaatagaaggatgctttggctaca

SEQ ID NO: 883192 - DNA, 579 bp, Homo sapiens
aatatttccaggacatgttgggttctcaacctaataattccactctttctgtagagtttttgtttttgtttttttttttaattctgcaattcagataagaacaccaattgggatgatacacaattttcagagttggagtgggcactaatrcactttggctgtgtccccacccaaatctcatcttgaattgtagttctcataatccccacatgtcatgggagaggccttgtgggaggtaactgaatcatgggagtggttttcctccttgctgttctcatgatagtgagtgtgttctcatgagatctgatggttttatcaggtgctctcccttagctcagcactcattctttcccttcctgccgccatgagaagtaggatgtgtttgcttccccttttaccatgatcgtaagttttctgatgtctccccagccctgcagggagtcaattaaacctctttcctttacagattacccagtctttggaagttgtttatagcagtatgaaaatggactaatacaggtactaagcaaccatgtaaacagaatggcatagttgacaggcatcagcaaacctctgtca

SEQ ID NO: 883193 - DNA, 609 bp, Homo sapiens
gagcaaactgaaggtagtaagtgagaaaatttttgtaaataaaaatttaaaaggcgatgtgagactttgttgacttgttgatttgaattatgatccctactattgggtttgttcttttgtcctccttgaatttcatatgttcactgatgtgtacaatgactgtttcccaatgttgattcatgatttgcaaagtccagtgtctatatttttacagtgatataggtatatctattttcagttttaaatatctaaatattagtattttgggactcttttagacttagaacaaattgtatgaattatagtgcaacatttgtttctaaaacacaaaggaaatattcttatcatgtttaagcacttattttggggggaggtagttgcaataatttacagttttratcttgtccattttattttttctctatttacaacattgcaagtatagtgagatatagtaataaaggattgaattcttaaggctgttcggggaatatatccagaatgttagcatcttctactgcatctactagatgtattcacatttggcacattacatgctcatgaaaatgatgaacccaaagagaaaattagacataaaactgtccttca

SEQ ID NO: 883194 - DNA, 586 bp, Homo sapiens
tgggctcccaggcacttccagaatgttcctggggtctgctcctagaattctctctgacatgcatataaactctgtctcacctctgggtttggaaaatattttcagaaaaaaaaataaaaacagtcagccacagatgaaatatcatgaaatatccacccattagaaaagcctatttacttttaaataaccttagaggatttagccttagaggattcagctagaatcctccccacccaaccacttttcaccttatagtcacgtgccataccccyactttgcactctacattagtatcctggggatgctataaaaaattactacaaattttgtgggttaaaacaacagaagtgtaccctttcacaattctggaggccaaagtctgtaatgaatgtgttgacaggaccacactgtttctgaaggctttagaggagaaggctttcttgcttctttcatctcctaatggctccaggcttgtggcaggatcactctaatctgccttcatcttcacttggcttttttccatttgtgtctgtcttctcttctcttataaagatacttgttggatttaagatgatctaaatctagg

SEQ ID NO: 883195 - DNA, 618 bp, Homo sapiens
tccttgcgtgatcacaatagtgagataatatatttgtttttcccttgagtaaaatgagctagttatttgatctttactttcacttaactttgcattctatagctgtccttagtcaaaagagtgttacacaaaataagaaaatgttaaaataaccttttacaattttccaccactttattacttggattttgatatgtagcatttgggatgcctaaatatccctgaatatattgattttttttttctgagagaaaaccttctaaatgtttatattaaamcaaaacaaaaaccttcaagtcatataaaataatttagacaatggtactctgtgttttctgaaaatcatgaagtgatttactgaaaactattcatgataaaattagtaaattttatattgaattttatcaatattaacataaattttcggaaaaccaatctcttataactgagaaattttaactatatatttttgctaaaatatttccaatgaaagctgaaagatgttaggccatctgctccttgtaatcttatatattgctatcatgataatgattacctagtttaggagactttataatgtaaattgtaaagactgtacataatgatttaggcatgtaa

SEQ ID NO: 883196 - DNA, 563 bp, Homo sapiens
tcatattattatgtaaaaatataagttcatgcaacacaaattaaataacttatgtgacttattctttgggggcaattttctgatgtttaatttgttcattttttagctgtgttttcacttcatgtacaatcatattacacattgatgttccaaattaggtttgtcatatccttgaagaattaggaattaccattaaaaaatacccatagtcagtagttttcctatatatacaacaartgttttcactatttttgatgtattttggaactttcagcaaattgcctttgttttttgatctattagatgtttcattttaaagtagtccttcaatttctacccttcacattacagttgggtaatatgttgattttattttgatttgaccttcagtaaattctacttacatattttcttttttttacattttcttccaagtacatatttaacttatatgcatatatataaatgaagttatgcggaatttattttgtaaatgtacacaacacaaactggaataattttatattttcacatatacatgtgcttttcaagagggtgaaaag

SEQ ID NO: 883197 - DNA, 687 bp, Homo sapiens
aattgcttaatttttacatatttgtagatatcccacattttctctctgttattgatttctgatttgatttcattgtggttggggaagatactttgtatgatttcagtcctcttaattttagtgggacttattttatgacttactatatgtcctatcatggagaataatccatgtgtaccagagaaayaaatattttgaaataagtagggtttctagggtaagcagtttcatacgaagactcagagacaaagcctaaaataccaactctcaagagaccagaggacaggagtgctgtgtcactcaacaaagccacatccactgaagaccaaggaccaggagtacagggctccatggggaagggcaacttagaaagttttggatttgctgcagatttgttgacttttcaagagggcactgatgtattcggtccctctctctgacagagaagacaccccctctcctacttgataactgaatgatgccatagttactacctgatgtgcagttccttcaaatagagaggaagtacactggccacaatctctgaacaacagacatagaggactggcttacaggggaagctaaatttttcactttatcatggagcactaaacctctgctattgtatttggcaacagaaatgaggatcaagattaaacaatgagtgctgagtctcaatccatttgg

SEQ ID NO: 883198 - DNA, 687 bp, Homo sapiens
aattgcttaatttttacatatttgtagatatcccacattttctctctgttattgatttctgatttgatttcattgtggttggggaagatactttgtatgatttcagtcctcttaattttagtgggacttattttatgacttactatatgtcctatcatggagaataatccatgtgtaccagagaaacaaatattttgaaataagtagggtttctagggtaagcagtttcatasgaagactcagagacaaagcctaaaataccaactctcaagagaccagaggacaggagtgctgtgtcactcaacaaagccacatccactgaagaccaaggaccaggagtacagggctccatggggaagggcaacttagaaagttttggatttgctgcagatttgttgacttttcaagagggcactgatgtattcggtccctctctctgacagagaagacaccccctctcctacttgataactgaatgatgccatagttactacctgatgtgcagttccttcaaatagagaggaagtacactggccacaatctctgaacaacagacatagaggactggcttacaggggaagctaaatttttcactttatcatggagcactaaacctctgctattgtatttggcaacagaaatgaggatcaagattaaacaatgagtgctgagtctcaatccatttgg

SEQ ID NO: 883199 - DNA, 588 bp, Homo sapiens
cccatggaccaatcagcatgcattttcttccctctgaagcccataaaaaccctggactcagccagacttggacaatgcgatgacctgtctgcagattggagctattaactgtgggtgtcctctctgctgagggctctgcagatgatgggatgacctgcctgcagaatggagctacccactctgggtctcctctccactgaggaccgcacagaaattgtgactaccagtttcaggaaggagctacacwctccagatctcctgagaactgttctgccactcagtgaagttcctctctgacttgcttaccctccagttgtctgcatatctcattcttcctggatgtgagacaagaacttgggacccactgaatggtggggctaaaaaagctgtaacacaaacaaggctgaaacatgctccctgctcaccacattgcgggcaatgagaaggcgagaagagctgaggccctttgtgaagcccagacctaggggctccccaagccagagctgtgacattctctttgaggctttgtagttcttggaatatccaagcctctggcgccaccatgttctccttgtccagccatgggtg

SEQ ID NO: 883200 - DNA, 464 bp, Homo sapiens
agctaaattcctaaaataaatttctctatctatttatctatctacatcctgatgtttccgtgtctctgaagaaccctgacaaatacaaaatctctaaagataacctgaaatttgaataatagcaaagtgcacgtagatccttccactggaaagaggtgagatggctctgggacatagtacaggatctgggaggcatgttgaccaagactcacagaagatgggactgatttttttggactttgagttatgaaaatggctacattttttgaaacttactatttatttacrattctatgattcatttcttttatgcctcaatgatatggtttagctttttgtccccatccaaatctcatccccaaatttaatccccacctgtcgagggagagacctggtgggaggggattggataatagaatcaggcttcccccttgctgttctcatgacagtgagggaattctcac

SEQ ID NO: 883201 - DNA, 464 bp, Homo sapiens
agctaaattcctaaaataaatttctctatctatttatctatctacatcctgatgtttccgtgtctctgaagaaccctgacaaatacaaaatctctaaagataacctgaaatttgaataatagcaaagtgcacgtagatccttccactggaaagaggtgagatggctctgggacatagtacaggatctgggaggcatgttgaccaagactcacagaagatgggactgatttttttggactttgagttatgaaaatggctacattttttgaaacttactatttatttacaattmtatgattcatttcttttatgcctcaatgatatggtttagctttttgtccccatccaaatctcatccccaaatttaatccccacctgtcgagggagagacctggtgggaggggattggataatagaatcaggcttcccccttgctgttctcatgacagtgagggaattctcac

SEQ ID NO: 883202 - DNA, 527 bp, Homo sapiens
tataatatattcataccataatctagttttctagaaaatgttaagtaaggtagctgctctctgtctccaaccctggaatatgtgttcctcttcttgcttcttatatccactttaattgttaaagtaaaactgtgttatattttcctgtttacttctctagaattcgatttaactataaattattttaggacacagaatggttctcatttattctcatttatccttataaccatatttgttaccaaaacctgaagcaaaagttcacaggtgctacacagatttctgtggaaagtaaaaatgtgactcacctgacattttccatacatttgataaactaaaccatgtcaatctatgaaataagaataccagaacttttttaaattataaratctatagaagagaaaaatagtacttaataagtgatatattaaatgcattagattttaagatggtgattaacattatattaaaatggaaatactaacttttgaaatcagttcttaaaatagaactgatctattcaaagg

SEQ ID NO: 883203 - DNA, 616 bp, Homo sapiens
tgttataacataatatatgttataacatagcaatgaaaactcttttcctcattgttctttgttagaatagagtagctgttctgcaaaagttcttaggggttcagatattatttgaaaaggagtcacatatgatagagccgtctgaggaatttggaagatctagagatgatacttccaagatcaagatcttacatgaagtgcaattatttcagcawcatatcagttgcacagtcagagttttaaaataatattgtattacaagactttttaaaaagttttactttaagttctatacagcatgtgcaggtttgttacataggaatgcatgtgccatggtggcttgctgcatctatcaacccatagaagacaattttaatcacattttttggcatacatgtattatggaaatattcaaactaatttgtaaagttacttgaaatatgtgtatttgtatcaccttgtggtagatggctctactccatatataacatgtttctccaagtactagcattgggattgcaatgggattggtaaggagggactagtggaaagagaccaaccacgcctataacccaaaatctagtaaacttggggtgttcaggaaaaaaagcaatca

SEQ ID NO: 883204 - DNA, 616 bp, Homo sapiens
tgttataacataatatatgttataacatagcaatgaaaactcttttcctcattgttctttgttagaatagagtagctgttctgcaaaagttcttaggggttcagatattatttgaaaaggagtcacatatgatagagccgtctgaggaatttggaagatctagagatgatacttccaagatcaagatcttacatgaagtgcaattatttcagcatcatatcagttgcacagtcagagttttaaaataatattgtattacaagactttttaaaaagttttactttaagttctatacarcatgtgcaggtttgttacataggaatgcatgtgccatggtggcttgctgcatctatcaacccatagaagacaattttaatcacattttttggcatacatgtattatggaaatattcaaactaatttgtaaagttacttgaaatatgtgtatttgtatcaccttgtggtagatggctctactccatatataacatgtttctccaagtactagcattgggattgcaatgggattggtaaggagggactagtggaaagagaccaaccacgcctataacccaaaatctagtaaacttggggtgttcaggaaaaaaagcaatca

SEQ ID NO: 883205 - DNA, 594 bp, Homo sapiens
aatttaatgtataaatttaatgtgtgtgaactaaaacacaatgtaagaaattttgccctcttcctgtggctgcattttgaattttatctggaaattttttgagaatgttttgcatgctctgtgtgtcaggttttaggtagtcttttgtccttgttaagatctggtactccactttccctcattttaaataactttcacttgactttcatttcyatgccaataagttcattctagtaataaaattttattgtcactctttccaagtttttattttcaccgttttatgaatactatcaggagacaagaaagagctttacccttatataccaatgtgccactcaaatttattttctgaagttaatcaaaaagttttggagaatttattttcccctatgattatctaaatgtgtcaattcacataacatatagatattccaaaaattcagcaccacagaagaccacattaacaccattgtaatattttaattattggactgagtggatcttagtctttttaaatgaaaagaggattccaccctctctaccccttaccctggctcaatatctctcacataatagatgcaggaaaataat

SEQ ID NO: 883206 - DNA, 594 bp, Homo sapiens
aatttaatgtataaatttaatgtgtgtgaactaaaacacaatgtaagaaattttgccctcttcctgtggctgcattttgaattttatctggaaattttttgagaatgttttgcatgctctgtgtgtcaggttttaggtagtcttttgtccttgttaagatctggtactccactttccctcattttaaataactttcacttgactttcatttctatgccaataagttcattctagtaataaaattttattgtcactctttccaagtttttattttcaccgttttatgaatactatcaggagacaagaaagagctttacccttatataccaatgtgccactcaaatttattttctraagttaatcaaaaagttttggagaatttattttcccctatgattatctaaatgtgtcaattcacataacatatagatattccaaaaattcagcaccacagaagaccacattaacaccattgtaatattttaattattggactgagtggatcttagtctttttaaatgaaaagaggattccaccctctctaccccttaccctggctcaatatctctcacataatagatgcaggaaaataat

SEQ ID NO: 883207 - DNA, 608 bp, Homo sapiens
aaaatacagcggaagcttcttggtcttcaatgtacgcattcaatatccatgaggacataatcttacttgtttcctgtgttttaccacagaaatttttgaaagagttgtcaccattcactttctccatatattctaaaggagcttgtgtcagggtcaaaaataaagtatccggtttctaaatctaaagcctactctttagtctttatcatattagatatcacaagctgcctttgacagaatagaccgtttattgtggcttaaaatacactgaagtattgctgtttctgactcaatatcttacaatggtttttagaaagatatctctttctgaatttagttgaattttccccaaggcctagagaagactcagcaggcagaattgatgaccttttcgtccaatgtaaagggctcagttaggtcargttcattgtgtctggtttccttatcctttaagatgatttcgctcccaggaatttcctcagtctcttagcagaatttttgtggttcatcccacctagtgcattggagagctccgcatcatagtttaggctaagcttgtactaggaatgtactgggtgaattaaaatatatatatatttcattcatga

SEQ ID NO: 883208 - DNA, 587 bp, Homo sapiens
cagatagaaaagcataggctgtaatgtgtttgttacaaatgattttttaaagagtattagtcagacatattattcaaattcaaatagcttgtaaaatccataatattaagtctttaagtgaagaaagacaaacttgataagttaatatagtttttgtgtctgatagttaagtctaaaagtaaaggctctacaattgaaacattctgggtctaaatctcagtttgtattactttgtgatggtggacaatttgctgagcctttttttctgagtcttagatatttttatctgtacaagaggcttagcaatagcaccaacttcaygaaattgttaggaatatgacatggtaaatggaaataaagcagttattctaatgtctgacagaagaaagagcccaaataaattgttaacatagctttaatcaattagctacctcatgtattccaaaattatatgattcaaatttacattcacagagtaattacttcgcttgcctctcttcacctttggttagttactatctttatgtttatttcttccattttcttgatcctttttctctctattgtccttcttacacccacaggca

SEQ ID NO: 883209 - DNA, 583 bp, Homo sapiens
acaccctacaggacatacaaacatacttcttttttttttttttttttttttttttgagacagagtctccgtctgttgcgcgggctggagtgcagtggtacaatctcggctcactgcaacctccgcctcccaggttcaagcaattctgttgcctcagcctccccagtagctaggattacaggcacctgccaccgctcccagctaatttttgtatttttagtggagacagggtttcaccatgttggccgggatggtcccgatctcttgacctcgtgatccgtctgcctcggcctctcaaagtgctgggattacaggtgtgagccaccgctcccaggcatacacttttgcattaacattctacttatctacagcattaagaaatgtcagagaggattcttccctgaagtatgtaccttttattacatcattactttttawaaacagcattttaagattattcaatcattggtatgcattcccatcacatttatttctagttgttttgttgcaaattagtattgcactaatatgctttcaatatcccataaagtttctgcagggatctcttatgtacagtagtccct

SEQ ID NO: 883210 - DNA, 632 bp, Homo sapiens
gtttgaggtgatagatatcctaattaccctgatttgatcattatacaatgtatacatatatgtaaaatatcacaatgtaccataaatgagtaggattattcatcaattaaagacattgacactttaaaaaatatatatttttggttctcaaacagatgtgagggttatgtctaatatctttaaacacatcttggctttaaacatgtttaccagctatggcttatttattcccagatttttcaagtttcttcctttttcatctaaccttttgccctctctaytgacattggtctttgaaaagtttgtataagaataccaaaagcatttttatatgagttctgccaactttattttgtagtctagaagttatgtatcacgtatttaaaagtgcttgaaaatagctgatgcatctcttttttcaagatgatgctaaaagtctcatctaatttaatggttggaacagttctttacaagttatgttgtaaaaatattcattaacattgatggagagtactactcaaacagcaaaaatgtgtctgtaaaagcttattaaaattcagaggctcaaataatgtaagaattcaaaatctttagtaaaattcaactgcagagtttctatcagatgcacattt

SEQ ID NO: 883211 - DNA, 632 bp, Homo sapiens
gtttgaggtgatagatatcctaattaccctgatttgatcattatacaatgtatacatatatgtaaaatatcacaatgtaccataaatgagtaggattattcatcaattaaagacattgacactttaaaaaatatatatttttggttctcaaacagatgtgagggttatgtctaatatctttaaacacatcttggctttaaacatgtttaccagctatggcttatttattcccagatttttcaagtttcttcctttttcatctaaccttttgccctctctattgacattggtctttgaaaagtttgtataagaataccaaaagcatttttatatgagttctgccaacttyattttgtagtctagaagttatgtatcacgtatttaaaagtgcttgaaaatagctgatgcatctcttttttcaagatgatgctaaaagtctcatctaatttaatggttggaacagttctttacaagttatgttgtaaaaatattcattaacattgatggagagtactactcaaacagcaaaaatgtgtctgtaaaagcttattaaaattcagaggctcaaataatgtaagaattcaaaatctttagtaaaattcaactgcagagtttctatcagatgcacattt

SEQ ID NO: 883212 - DNA, 626 bp, Homo sapiens
tttcccctttttaaatatacttatgtattaataatgttacaatctatttataggagacattattaaaacacagccaagagaactcaaaacctaatgatctgattgataaaacgtatgtataaagaacagtaatctaaccacctgtgttagtctgatagggctgccataacaaaatacyatggactggatagcttaaaaacagaaattgttttctcacatttctttaggccagaagttgaagatcaaggtttcaacagggttgatgtctcatgaggactctcttcttggctttcagacatttaccttctcaccgtgtccccacatggcctttcctctgtgcacctagaaagagagagagagagagaactcatttattgctggtgagaatgcaaaataattgtcactttgggagacaatctgacagtttcttataaaactaagcatactgttaacatacaagccagcaatcatgctatttggtctgtacctagaggagctgaaagcttttgtctgcacaaaagcctacatgctgataattatagctttgttcataatccccactacttggttgaagcaaccaagatgtccttcagtaggcatatgaataaacaaactgtggtgcatcc

SEQ ID NO: 883213 - DNA, 755 bp, Homo sapiens
ctccttaatattatatacagtactgaactgtgattaagatggatattccggtttttcaaaatttatatttagttggtatttctaacagaaagtgattcaaacatgtacatataatgtatgcttgtgcaataccattaggaaacctaaaaagagtattaataataaagttataaaatcacatctgacatttatcaaaatttttctgagagaaattacatggtttgaaatggaaaagaaaatgagaagggagattatgaggaaaaggattcttccttgattttcctccaaagagatgatgaaaacaaagaatgaatggtcatggctcamgaaaattaactttacagcagaaaccatcatttatacttgcccccaaggctgttctgtaggttaaacccatttttttttaagattttctttaacaaactattcttaatcattttgccacaattgtggaaatgactaatttttctgtcttaagtggaaaaactatcagcactattacctgactacattttaaaacttaacagcttttatgaatcagagaagtgaacaactggtacttccctgaattaatattatagttttacatttttttaaaaaactctctcacagttgccagcttcattactgaaaatcaatgagttttcatttttttataggaatggtttatctataaactataaaactacccagataaaaagaattttttttgtccttacagagatcttagtgtttttgtatcttggccaaaactg

SEQ ID NO: 883214 - DNA, 755 bp, Homo sapiens
ctccttaatattatatacagtactgaactgtgattaagatggatattccggtttttcaaaatttatatttagttggtatttctaacagaaagtgattcaaacatgtacatataatgtatgcttgtgcaataccattaggaaacctaaaaagagtattaataataaagttataaaatcacatctgacatttatcaaaatttttctgagagaaattacatggtttgaaatggaaaagaaaatgagaagggagattatgaggaaaaggattcttccttgattttcctccaaagagatgatgaaaacaaagaatgaatggtcatggctcacgaaaattaactttacagcagaaaccatcatttatacttgcccccaaggctgttctgtaggttaaacccatttttttttaagattttctttaacaaactattcttaatcattttgccacaattgtggaaatgactaatttttctgtcttaagtggaaaaactatcagcactattacctgactacattttaaaacttaacagcttttatgaatcagagaagtgaacaactggtacttccctgaattaataytatagttttacatttttttaaaaaactctctcacagttgccagcttcattactgaaaatcaatgagttttcatttttttataggaatggtttatctataaactataaaactacccagataaaaagaattttttttgtccttacagagatcttagtgtttttgtatcttggccaaaactg

SEQ ID NO: 883215 - DNA, 599 bp, Homo sapiens
tttcatagaagccaatagaacaattttagtctgtattttgtgtttgttaagtttgtttttatcaaggttgtatggacccttaaaactctattatatttagatgcttgcttggcttaaatgtaatgttttacaaaaattcatttctgcatatagtgttttacaaataattgcctcttcaaatgtgygcctatattagaatccaaaataattgtgatataaggtataattctcatattaaggcattcaaaaatacattttatattaaagtgttaatattgtatattatctcttataaggttagtcttccatattatcattttccccaatgatattaatacatgaaaaggctctctagtgtgtcttttttttctaaaagcttgagaatattattgcgatttccttaaaatataaaggacgttaatcatttagctatgttgcattatgaatgtcattatttcagagaggtggatatattctaggagtctgttgaaaatgaatctagtttagaagaacatgaaacataataaaagatacttctcaccatgttgtaaagagtaagaacagatttgaggtttgtaggaaatcagttatatggaaaa

SEQ ID NO: 883216 - DNA, 620 bp, Homo sapiens
tcatgactgcccggtagtattccattgtgaatatgtaacacatcttctttatccatttatctgttattggacaccttggctaatttcatatcttggccatgtgaatagtgtaataaacatatggatgcagatgtctctttgatgtactgaggtttttttaatttggataaatctatagtagtgtgattactggatcatatggtagtcctatttgtagttttgtggagaacctctatactgttctccrtagtgactgtactactgtacattcccaccaaccatgtagaaaagttgctttttctccacatattcaccagcattttttattttttgtctttgtgataatagccatcctaactggactgagatgatacctcattgtggggttcatctgcatttcccagatgattagtgaggttgttgagcattttaaaatatacttgatggacatttttgtgtcttcttttgaaaaacgtctgttcaaatcacttgtcaatttttatttggaatgcttttttttgctactgagatgtttgagttccatatatattctggatattaatcttctgttggatgaatagtttgctaatattttctttcattatgtagcttttcttctc

SEQ ID NO: 883217 - DNA, 640 bp, Homo sapiens
gcttattttatttcagttttaatcttcaggtcctgagcaaattatccatcataaccagctgatatggtttggctgtgccctcactgaaatctcaaattgagttatatctgtcagaattcccaagtgttgtgggagcgacctgggggaggtaattgagtcaggggggctggtctttaccgtgctatcatcatgatagtaaataagtctcaagagatctgatgggtttaacagaggtttctgcttttgcttctttcatatttttctcttgccaccaccatgtaagaagtgcctttcacctsccaccatgattttgaggcctccccaggcaagcaaaactgtaaggacaattaaaactctttttgtttccagtttcaggtatgtctttatcagcagcatgaaaatgaactaatacagttaattggtaccaggagtggtgtgatgctgaaaagacacctgaaaatgtgcaagaggctttggaactgggtaacaggcaaaggttctaacagtttggagggctcagaagaagacaggaaaatgtgggaaagtttggaacctcctagagacttgttgaatgcctttgaccaaaatactgatggtgatatgaacaataaggtccaggctaaggtggtctcatatggag

SEQ ID NO: 883218 - DNA, 632 bp, Homo sapiens
aataataaaatgttttatacaaagaatcttaataaattcttaaataattccatcaattttctaagaaatttatgtattagggttctctagagggacagaactaataggttgatgtatatataaagtggagtttattaaggagtatttactcacacaatcacaaggtgagctcccacaatargctgtctgcaatcttcagagcaaagaagccagtccgagtcacgaagttgaagaacctggagtctgatgatcgagggcaggaagcacgcagcatggaagaaagatacaggccagaagactaaaccagtctactattgccacattcttctgcctgcttttattctggccatgctggcaactgattagatgatgcccacccagattgagagtgggtctgcctttcccagtccactgactcagatgttaatctcctttggcaacaccctcacagacacacccagaaacaatactttgcacccttcaatcccatcaagttgacaccaaatattaaccatcacaagttaggataaatttgatgtcacattcctgtgtatgtatttctagagggggagtactagtctgactatagcttactggatgacaaccaaaaaaaaaattagtataataaagtg

SEQ ID NO: 883219 - DNA, 663 bp, Homo sapiens
aaacacatgggatatttttaaacaaatcaatggaattaagagagggcagaagaatgtcaactgactgccagaaaaaatgaagccatagtctgaatatttggggaatgggaaattctgtttgggacagggcaataattctactggtgaaatcccagggaaattattgttgaagtgaaagcaggtaccaggtatggcaatagtgagaagtgagtcccaaaccataggaatcaatgggaaaattttaaatggggaattgatctcctttatttctcacctcaaccttccagaagataagaagctccatcagtaaaatagctaggtatctatccattcatcgaatctgccaccaaaacagcactgacaaacacatctctgatttaatttttaaaaataagttggcaaaaaaacataagcatattttaagaggtgatttaaaaaaaaactagaaagaacaaagaggggataatttaccttagtgttattagaaaaaatwgagaaacaaacaaacaaaaaaagcttaattacatcctgaaaaagcttgatgataatgcatccatgaaccaaaataggaactgtttaacatgaagcaacgaaccgtagcaataaaggccactttgacttcactaaagccaacaataaaagaaagttgggagagatagccaa

SEQ ID NO: 883220 - DNA, 574 bp, Homo sapiens
gtgagacggtgagttagcttaaactgatgggtgtcttctgtgaatgtcatatattaactcaccaaattatctatgatgcttagcagtgtcactgttgggctgaacattgagatttctgacctctttacaaaataattatacatggccaagatcttttgatgctaaggatacccactgggcttgaagtcttcagtatcctttccctgctgctgcagcagttggaatcagccyggagtctgtaagaatgaaagagaaagctcctctctgaagttgggtttaagttcattgcagtatggggcaatgcccctcaactcttgcttaatattcagaccacctgaagagcttctaaaacgcggagctttcaccccacaccaaatgactccaaatagctgggattgggcacaggcattcataattgttttaaaacaccaggtgatgcaaatgagcacccagcatcgagaatcagtgtgccaagacccctttataacagacaccttgctcaacctgtcccttctttcacctgcacctatattccacccttgtatgcccacatacctttttgttatagttgaca

SEQ ID NO: 883221 - DNA, 481 bp, Homo sapiens
ctcttgcctccctgctagcttgatgtgtggctgaaggtcattcatgggcactgttgtgccgtctatctggagaacaaagcatgcatggttttctggcccacccagtagaatgtgtgtcttatgggtgatattgtgcagtaatgaaggacttattttctatatggccacaaggctaggtaactcattacccattcagtgtcatgagcaccagcatcacatttccctattgagagttttgctttttttgcaacwgtatggagtcactgatttgcaaaatgaatacagccataaatgggagctgtagagtctttacagatttattctttttttttttgtaaacctttgtcaaaccaaattgttcagaccaaattatgtatcaaaaactgtttgttttcagcactaaagagctgcctatagccttaagtatggactgggtggatttgaatattagagtattagaaatattgctaaacaatgaaat

SEQ ID NO: 883222 - DNA, 531 bp, Homo sapiens
agaagatctgacaattaaggagagaaaaaactgtattgttcttttcttccttgttacaataataaaacctattcactatacagaatattgtggctgaaatctcgttagcttggtctgagttgcattttgtataatctagaggtgactgaaggggagcactgaggtggagctgtccactgatattttggaggagctgatatgttggagtctctaacaccacactcaggtttgatcatttattrgaaggactcacagggatcagcatacagtgatactcatggctaagatttatcacaacaaaagaaacaaagcaacatcagccaagaaaaaaggtgcatgaggtaaagtctaggggagactaggcacaagcttccacaagtcccctcccagtggtgtcacacaggatgtgcttaatttccccagcaaaccagttcccaaggcttttactggggactggtacaaaagtgccctctgcctagtgtgatcccaaattccagacacccagaaggaaagcaggtgttcagcataaaa

SEQ ID NO: 883223 - DNA, 585 bp, Homo sapiens
aaaataattttcttttttaaaaaaaggaaagagaaaattccagtgaacagtttgcaaacttgagaaatgcagccttcggtataaaacaaaggtgtgctcagatagaacaaaaagaggagttgtcttttatatagaaagttcccactctgatcctcttatgcaaattaggaatgcaaacttgcttacttctgattggttgatgcaggccacagactattggttaattcaaacaatgtaaacagaarcagacagctatggaagtcccagaattaagtgaatttaggggttttctgggaatgcacatgtatgatgtgcctctattttggatttaggtcgttagccactcaggatccatcttgaaggattggctctttcaggattcacatttcattccttgttttgatgtttttccagaatcccaggtttaaatggagtaattgctacactttcaagacatctgtctgttgctttcctaatgtgagggatgtggattaaagaaacagcagttgcttcttgctatatgatccattgtaccttatgcaaagttaaacatacctaaactcttggctttcatattgtgaccat

SEQ ID NO: 883224 - DNA, 612 bp, Homo sapiens
aaatttatttccaaatttctattaattgtgaaaccatttaggaaacaaggaaattaatcatgtgccccatttgaattttggactgcccaggattaatgctgatctaaagtccaatctttgcaggccaaattgttaaagctaatctttgtacagtagtgtggttaaaagaatatacactatagataagcaagtatacctctgaccagacttagggtatagatgagggcacagggagastcctacaactccactaacatgattttttctacctttagtaaagagctactacagacttcgtagaaagtagagtagatataagttttccagatattttgaatcatcagctatagatcataataacaaaggtgaatagccatctatatatgtgctatgcaaatatacttttagaaacaatatttaggggggttacagaaaaacattgttttaatagaatttcctctccaagactaaagcttggaagctcccaacactggatttcttaaactgcagttgacaggagcagagagcaaaaacaatggtttctgccccaagggtccaaaatttggagagcttactactttcctattcccatttaagttgggttcacaaacg

SEQ ID NO: 883225 - DNA, 587 bp, Homo sapiens
gttctcccttccttaggcattttttgtcccgtgggaaaaaactgtactagggacagagacctctgttaagttttagagaaaagggatcttttttttttttatttgagacagagtcttgctctgtcgcccaggctggagtgcagtggcacgatctcggctcactgcaactccgcctcctgggttcaagcaattctcctgcytcatcctcccgagtagctgggattacaggcgctggccaccacgcccggctaatttttgtatttttagtagagaccgggtttcaccatgttggccaggctagtctggaacccctgactttgtgatccgcccgcctcggcctcccaaagtgctgggattacaggcgtgagccaccgtttcaggccgagaaaagggatttaaaatgagaagcttgaatcttattgaacataattgtaggactgccagagaggactggtggatgaggaatatggcaagggacatgagatgggaaaaattaaataggctgtggtttggaagtctcaaagtgaaattcaaggtgcaaggctcttaaaagttaaatccagcgattcggtacatagcttaggccc

SEQ ID NO: 883226 - DNA, 644 bp, Homo sapiens
aaagtctcaataaagttaaaatgattcgaactcatacacagtatattctctgatctcaatggaattaaagtaggaattgataacaaaaagatctctggaaattccccaaatatttcaaaactaaacatacttattaaaagctcgtgattgaaagaagaaatccaaaggcaattagaaagcattttgaatttaataaaattaaaagatgacatattaaaatttatgagataccacaaaagcaacacttaggaggaaatctatagcactgaatgcctatattagaaaataatcaaatcttattccctagccrgtgatagcaatttctacctgaaggaactagaaagaggaaattacactcaaaataagcagaagaaaggaaataataaagatcagatagacaatcaatgaagcagaaaaataggaaacagtaaacagatcagtttaatcaatagttcattcttgaagaatgaaattgataaatctatagtcagaatgatcagaagaaaaatgagacacaacttactaatatatcagaaatgagtaaaatgacatcagtacaaattctgcagatattgaaaggttaacaatgaaatctttagaactacattattattagtattagtattttgagacaaaacctcgct

SEQ ID NO: 883227 - DNA, 643 bp, Homo sapiens
gtgcaagggacaaaaaaatgtatagtccagtggagtccaggaggaagaggtgaatgccaacattggtgagcactgactgtctctgctgcatcctcaatcctggttctctttttggtaatgacactatcatctgtttaatcatggaggccagtcttctcatgcatccttatccttcatctctttatggccaaggtcgcctcaggccttcacagtctgatctttgcttgttcctttgatttgtccacttcaatgcattcccacctccaccatcttagtcgaagctcccatagtccctcagcgatttytaagcattttgatcatgcaccactatcattaacacattttgaacacagaccccaaatatacatactttgtttagaaataccatctgtttgcaccattgtttttctgaagatttttttctttttctttagaataatatatttttatatttttcttcatactgccacagatgcccatctcatgcatttcctggaatatgagcctcccatgctggcccctcctgctgatgattattggcctagaaatctacaacagactttgagttgtccttttgcttttgctcttatcctcatctaatttcttccttgtatccaggcatgcattcgtatgcaaatagtca

SEQ ID NO: 883228 - DNA, 648 bp, Homo sapiens
atttgtccacttcaatgcattcccacctccaccatcttagtcgaagctcccatagtccctcagcgatttctaagcattttgatcatgcaccactatcattaacacattttgaacacagaccccaaatatacatactttgtttagaaataccatctgtttgcaccattgtttttctgaagatttttttctttttctttagaataatatatttttatatttttcttcatactgccacagatgcccatctcatgcatttcctggaatatgagcctcccatgctggcccctcctgctgatgattattggcctagaaatctacaacagactttgagttgtccttttgcttttgctcttatcctcatctaatttcttccttgtatccaggcatgcattcgtatgcaaatagtcactargagaccagtgtgtgccaggcactatctttggcaatggaatatacaagactgacaaagttcctgcccacatggagcttactctggtggaggtggttgggacacaaataaataaaataaatatgtcaggtactagtgactagtgagtcctccaaaaaaaaaataatgcaaggaaaggggaaagagagttaatagagatagaagtggcaaggtgctcttttagagaagaccttgttgat

SEQ ID NO: 883229 - DNA, 621 bp, Homo sapiens
cacacccataaatttatttccaaatttctattaattgtgaaaccatttaggaaacaaggaaattaatcatgtgccccatttgaattttggactgcccaggattaatgctgatctaaagtccaatctttgcaggccaaattgttaaagctaatctttgtacagtagtgtggttaaaagaatatacactatagataagcaagtatacctctgaccagacttagggtatagatgagggcacagggagastcctacaactccactaacatgattttttctacctttagtaaagagctactacagacttcgtagaaagtagagtagatataagttttccagatattttgaatcatcagctatagatcataataacaaaggtgaatagccatctatatatgtgctatgcaaatatacttttagaaacaatatttaggggggttacagaaaaacattgttttaatagaatttcctctccaagactaaagcttggaagctcccaacactggatttcttaaactgcagttgacaggagcagagagcaaaaacaatggtttctgccccaagggtccaaaatttggagagcttactactttcctattcccatttaagttgggttcacaaacg

SEQ ID NO: 883230 - DNA, 554 bp, Homo sapiens
ccctgcaaacttgtgcttgtctcacattcacagcatctctcctcaagcatgcactctatgcattgttactttcagctctggggcttctccaacaccttgggaatttttggcctgcaggcaaatgcagcctggatgtggggtacattaattaccaggggtaagctcagcacttcaggctgaaatttctaggaggcattctgtatacttttcaggaggtctcaatggaactgagccctcatggcccaagtggcaacattatgaaagtacccttgcattggccattggctttttctccttcccygcctcactttccccatttcctcactcctgcttcatgggataacctcccctaataaactatctgcactggagtccttctctgaggctctgtttatttatttgtgatttcagggaccgaaactgagacatattgtaatctcagatgatagaaagaaaaaacaaatagaggagatagagagataataatgctacaacagataaggtgaggaaagataactatgaagtgaggacttctgagcagaaacctgaactca

SEQ ID NO: 883231 - DNA, 554 bp, Homo sapiens
ccctgcaaacttgtgcttgtctcacattcacagcatctctcctcaagcatgcactctatgcattgttactttcagctctggggcttctccaacaccttgggaatttttggcctgcaggcaaatgcagcctggatgtggggtacattaattaccaggggtaagctcagcacttcaggctgaaatttctaggaggcattctgtatacttttcaggaggtctcaatggaactgagccctcatggcccaagtggcaacattatgaaagtacccttgcattggccattggctttttctccttccctgcctcactttccccatttcctcactcctgcttcatgggataacctcccctaataaactatctgcactggagtccttctctgaggctctgtttatttatttgtgatttcagggaccraaactgagacatattgtaatctcagatgatagaaagaaaaaacaaatagaggagatagagagataataatgctacaacagataaggtgaggaaagataactatgaagtgaggacttctgagcagaaacctgaactca

SEQ ID NO: 883232 - DNA, 578 bp, Homo sapiens
gttctcccttccttaggcattttttgtcccgtgggaaaaaactgtactagggacagagacctctgttaagttttagagaaaagggatcttttttttttttatttgagacagagtcttgctctgtcgcccaggctggagtgcagtggcacgatctcggctcactgcaactccgcctcctgggttcaagcaattctcctgcytcatcctcccgagtagctgggattacaggcgctggccaccacgcccggctaatttttgtatttttagtagagaccgggtttcaccatgttggccaggctagtctggaacccctgactttgtgatccgcccgcctcggcctcccaaagtgctgggattacaggcgtgagccaccgtttcaggccgagaaaagggatttaaaatgagaagcttgaatcttattgaacataattgtaggactgccagagaggactggtggatgaggaatatggcaagggacatgagatgggaaaaattaaataggctgtggtttggaagtctcaaagtgaaattcaaggtgcaaggctcttaaaagttaaatccagcgattcggtacatag

SEQ ID NO: 883233 - DNA, 638 bp, Homo sapiens
ctcctctctgaattcacttttttacttattgaaacatatactttaattgttcatttagtgaacatcaatgggtcttttatatttgaaaatacctttatttgtcttcatctgtaaatgatattttagctgaaaatgaaaatctaggttgacaatgatttttcccttagcagtttgaagatttcactgtctctggcatctattgtagatgagaaatctgctttaagtttactactgtttktttttgaagataatttatctttttcattctagtagcttttaaaattttctctttatccataatgttctaaaatttcaatacaatttgtctaaaatttggatttatttttattcataccatttagagttggtgtgtcttttaatctgagtacttactaaccttatataattgccataatcctggaaaattctgttcctttgttttaaactccaattagttgtatgttgaagccttctctcagtcttgcttttaactggtctttcattttataactaggaatacaatgtactctttgtactcttttacaaattccacaagactatcttccaattcattaattttctctttgattaagtccaatctagaactgacttatttattgatttgtatattgctttac

SEQ ID NO: 883234 - DNA, 583 bp, Homo sapiens
gaattaaataccttccctgagatttcacaactaggaagcagcagaaacaggatttgaaccaagtggtcagacttcgcaacccaaactattgatgattgagctctaattgcatacatatgtcaccataatgcccatacttattttaggcttagagtcaaatagaagagcagcaaagagtgtttggaatcaggttcaggtccccaatctataacttgctagatgtctgacccyccatgctcttccgcatacattagtgttaataagaatagctaccttccagggttacaggggaagttaaataacgtgatgcattcacagtgcttcacaccttgccaggtatgtgggacattccttgtccatgttagttggcttcctgcctccccttctcctcctaatcaggtcccttccctggtttgacaggaggacaggtaatggcagaagagaatgcagcctcaaaagcctgttgtttccagaaagtatctggctaatttatttcaaaaggttttgcttctatgaagtttaatagagttgatgagtattaaaggaatcatttaatcttcatttgaatgtgagcaataaatgt

SEQ ID NO: 883235 - DNA, 639 bp, Homo sapiens
gggacaaaaaaatgtatagtccagtggagtccaggaggaagaggtgaatgccaacattggtgagcactgactgtctctgctgcatcctcaatcctggttctctttttggtaatgacactatcatctgtttaatcatggaggccagtcttctcatgcatccttatccttcatctctttatggccaaggtcgcctcaggccttcacagtctgatctttgcttgttcctttgatttgtccacttcaatgcattcccacctccaccatcttagtcgaagctcccatagtccctcagcgatttytaagcattttgatcatgcaccactatcattaacacattttgaacacagaccccaaatatacatactttgtttagaaataccatctgtttgcaccattgtttttctgaagatttttttctttttctttagaataatatatttttatatttttcttcatactgccacagatgcccatctcatgcatttcctggaatatgagcctcccatgctggcccctcctgctgatgattattggcctagaaatctacaacagactttgagttgtccttttgcttttgctcttatcctcatctaatttcttccttgtatccaggcatgcattcgtatgcaaatagtcact

SEQ ID NO: 883236 - DNA, 640 bp, Homo sapiens
atttgtccacttcaatgcattcccacctccaccatcttagtcgaagctcccatagtccctcagcgatttctaagcattttgatcatgcaccactatcattaacacattttgaacacagaccccaaatatacatactttgtttagaaataccatctgtttgcaccattgtttttctgaagatttttttctttttctttagaataatatatttttatatttttcttcatactgccacagatgcccatctcatgcatttcctggaatatgagcctcccatgctggcccctcctgctgatgattattggcctagaaatctacaacagactttgagttgtccttttgcttttgctcttatcctcatctaatttcttccttgtatccaggcatgcattcgtatgcaaatagtcactargagaccagtgtgtgccaggcactatctttggcaatggaatatacaagactgacaaagttcctgcccacatggagcttactctggtggaggtggttgggacacaaataaataaaataaatatgtcaggtactagtgactagtgagtcctccaaaaaaaaaataatgcaaggaaaggggaaagagagttaatagagatagaagtggcaaggtgctcttttagagaagacc

SEQ ID NO: 883237 - DNA, 574 bp, Homo sapiens
atgaatttgaggggaacataaacattcagtccacggcagtcagtgttcaaataggaagacccatgaccaatgtgatggattaggaagtctagagatggaaccgaatagatacaggaacttagatgtaaaggtggaatcttttattagtatgggaaaagatggactgatttaaaaaatagtgttgggacaactggttaaccatctagataaaaatataaatgaatctagtcctcatataatgtgacagaaaaaaaacaaattttattccagattcaaatgcaaaaagaygaaatcttaaaaactgttagaggaaaacatgggggaatttttgtataccattggagtgagcaaggtcgttctgagttgaaatgcagaacccataagagaaaagggtgataaatttaactacataaaaatcagactaaagtctctacatggaaaaatgtacaataaacaaaataacaatttggaaggctagagcaagaggattgcttgaagccaggggttcaagaccagcctgggcaacatagtgagacccccatctcacaaaatacaaaaaaaaaaaaaaattgaa

SEQ ID NO: 883238 - DNA, 625 bp, Homo sapiens
ctttgatctttgtaatttttttaattctactaattctgagtttagtttgttcttgttttactggttccttgatatgtcacgttgggttgtttatttgtaatctttctacttttttgatgtaggcatttattactataaaattctttcttagcactgcttttgctgtatcccacaggttttggtatgttgtgtttccattttcatttgtctcraggaatttttaaatgtcctttttaatttcttcattgactcattcattattcaggagcatgttgtttaactttcatgaattcatacagtttccagtattccttttgttattgatttctagttttattccatcgtggtcatagaaaatacttgatttgattttgatttttaaaaatttgttaagacttcttttgttacgtaacatatggtctatcttgaagaatgttccatgcactgttaagaagaatgtatattctgcagctgttagatgggatgttctgtaaatatctgttaggtccatttggtctagagtgcagtttaactttgatttttctttgttgattttcctttctgggtgatctgtctattgctgaaagtgggatattgaagtcccctactattattttattgcagt

SEQ ID NO: 883239 - DNA, 661 bp, Homo sapiens
ttgtattgttgttttaatctatttcatttatttctgctttgatctttgtaatttttttaattctactaattctgagtttagtttgttcttgttttactggttccttgatatgtcacgttgggttgtttatttgtaatctttctacttttttgatgtaggcatttattactataaaattctttcttagcactgcttttgctgtatcccacaggttttggtatgttgtgtttccattttcatttgtctcgaggaatttttaaatgtcctttttaatttcttcattgactcattcattattcaggagcatgttgtttaactttcatgaattcatacagtttccagtattccttttgttattgatttctagttttattccatcgtggtcatagaaaatacttgatttrattttgatttttaaaaatttgttaagacttcttttgttacgtaacatatggtctatcttgaagaatgttccatgcactgttaagaagaatgtatattctgcagctgttagatgggatgttctgtaaatatctgttaggtccatttggtctagagtgcagtttaactttgatttttctttgttgattttcctttctgggtgatctgtctattgctgaaagtgggatattgaagtcccctactattattttattgcagt

SEQ ID NO: 883240 - DNA, 582 bp, Homo sapiens
aattaaataccttccctgagatttcacaactaggaagcagcagaaacaggatttgaaccaagtggtcagacttcgcaacccaaactattgatgattgagctctaattgcatacatatgtcaccataatgcccatacttattttaggcttagagtcaaatagaagagcagcaaagagtgtttggaatcaggttcaggtccccaatctataacttgctagatgtctgacccyccatgctcttccgcatacattagtgttaataagaatagctaccttccagggttacaggggaagttaaataacgtgatgcattcacagtgcttcacaccttgccaggtatgtgggacattccttgtccatgttagttggcttcctgcctccccttctcctcctaatcaggtcccttccctggtttgacaggaggacaggtaatggcagaagagaatgcagcctcaaaagcctgttgtttccagaaagtatctggctaatttatttcaaaaggttttgcttctatgaagtttaatagagttgatgagtattaaaggaatcatttaatcttcatttgaatgtgagcaataaatgt

SEQ ID NO: 883241 - DNA, 659 bp, Homo sapiens
attctttggttacaagtgagttgctcacccagtttcaaggagaggggacacagatctctcctctctataggaggagtgtccaggccatattattgataagcatgtgagaggaagatattgttgcagctgcctttgaaaaataaaatctgtggarcaagtcttgaactaagggttatgcttaatctaattttatgcctctgaggtccaataagaggaaaaaaatgtggtcactcaaatttgcttcagtggaacttattttttgaaaaatgagtcttgcatttttttcagactttcattccataggtaattttaataaggcactaagcatgcaattgaagaaaaaatataaataaattttattttattgtttaatatcacaaaagatataatttacagagtattaacatcttataaatgtgaagactattttataattccattcattttatcattttgtctgtctttattaggaagctaacttctgtatcatagatagaaatgtatctaagactattttcactcatgtgcactactttttcttcccttgtctttccttgcagttttgtcattaaaaatttattattgtgtgaaatgtaaaggaaaattgaagcaattgtagaatcgcaactcatatgcgctgtataaatctataatcatta

SEQ ID NO: 883242 - DNA, 601 bp, Homo sapiens
ttctatttactggttgtatcaggcccctcctcattcaaactaccatatggaagaacatgcttggcatcagcccagttaacacataacacaggggttttacctatttgtcagtacttttccacttcatgaaaaaaaaacatagataacagtaaccagtgtgttttaggtccactaaacaacaacaacaacaaaactatacattggttaaaaaaaaattgggttagacacaagaaaagcttccatgaggatcttggctaagtgcaggaatggttaacccaaagtgtcagggaatctccttcctaaaatgcttctaaraatataacattcattctattggaaaaattttaaggtggctcagtaaaagcataattttttttagtagcacttctattgccctcaggatgcaatacaagatcttaacagggcttacatagcccattataatctcttccctgtctaactctcacctcctgcttccatccacctccaaacctgttgaatttttgctctctgcaaaaccccttgctctttcctctttggtcttctctctatttggaatcctcttcctcctgcattatatttctcttgcctctgattcatc

SEQ ID NO: 883243 - DNA, 620 bp, Homo sapiens
taaaaattagctatgttgaaggtatttacaccacagaaattggcaaacactgcaaatcagaaggtagttttattttttggctgagaagcatgtttatgaacatgactaactcatatggattagacatggagggagagagggactgaaatgacctgtaagatgaccgtctgctgccactaactaaattatgaacttaggaggggattggctccaagttaatatcagttgcaaacagcagtgtgcaaggagatatctgaaatcaccattagtcttacaagctcagcagctggaargaagatttctaggatgccatttattatagtgcaaagcagctctgaggagccacaagccctaaaagatttagggtatgcctagagaacattgagagacaagttgattaggaaagaattggtctgtgatctttaggagtctatgtctaggaaaaaattatgagaatcactagtaatggagctggtgttcactcaggcaccatggaagcaattaacattagatggtcaactggaaattaagctgggagtgttgattctagggtctggtctgccaataatttgttggctaacctaagacaatgtgttaaacctcttagtgcctcattttct

SEQ ID NO: 883244 - DNA, 638 bp, Homo sapiens
aactttgctctgcctcagcacaaacactggagttattaggggaactataatctgacaactgagtggcctctgcatgtcccctcaccaggaagagaagaaagtgggggatatctgtatcggagatttctgctcactccctgagagagcttttctggagcttcctatggctgggtccctgtggaatttctgtaagtcaggagtgcttcctgggcctttgtcccacccacctttaacctgcaggggcatgctttactagaaaaaacttttgctgctgctgctgctgctgctcagggatttttttaaggtagcacctcctcaatccccatttactggaaggaggagagatggagtcccaaatgaaaatgctccctgcatcttcctctcatcccggacagggagtgttcctccaggaaggstgagtcagcctccccaagggcctgcctcctttaggccccttatgactccagcttctgaggggaattagaacgaaattcaaatggtattgaggtatccagggtgaacaaggctgcttcttgtccctccttccgctggaggggcttcagagcctgactggaacacctgcgtgtccgtgaggtccttcaggaggcttctggaatgggctcacttgtactgtgcac

SEQ ID NO: 883245 - DNA, 669 bp, Homo sapiens
ttcttcaactgataagcagctttagcaaagtctcaggttagaaaatcaatgtgcaaaaaacaaatcatgaatgaactcccattcacaattgttgcaaaaagaataaatacctacaaatacagctaacaacaaaagtgaaggacctcttcaatgagatctacaaaccactgcttaaagaaatcagagaaaatagaaacaaatgagaaacattacatgctcatggataggaagaataaatattgtgaacatggccatacagtccaaagcaatttatagattcaatgctattctcattaagtygccattgacattcttcacagaattagaaagagtattttaaaattcatgtggaatcaaaaaagagcccacatagcaaagaaaatcctaagcaaaaagaacaaagctagaggcatcatgctgcccaacttcaaacagtactacaaggctgcagtaaccaaaacagcatgatactggtacaaaaacagacatataaaccaatggaacactatagagaattcagaaataaggctgcacacctaaaaccatctgatctttgacagacctggccaaaacaagctatggggaatggattccctatttaataaatgatgttgggacaactggttagtcatatgcagaaaattgaaattggaccccttcatagcatag

SEQ ID NO: 883246 - DNA, 601 bp, Homo sapiens
ccagctaagttacttgccagtattagtcttacttgccagctatgttcaggatatccctgctaggaaatctattccacagttatgtgcagtctctgactctcttgctgatgaacagaacagttcttactggcatttggagccttagagggtacaagaagaacacatccagattcagcccatctctgcattgctgtagtacccccatatgcacttatttcatggatctaggtagtcacttcaaagaagcacatgaggatatctgcttatcaatttgaattaccttccaaacctggaaggaggctgctctgatggcatggaaatgtcctactctaatctgccactccaagttccatgaagccatgccccatacatttaataggccgggtttccattgtcctcccctctractgtgttgataagccattgaccaccactcatgagtcagtaaaaacccaaacacaggggcatttgtcactgttcaattctttagcatgctattcagcccaccaagctgacttgtttttacttttttatttttttcatcaatgtgtcatcctttgaaacagaatgttgtttatttactttggaactgtcttctaca

SEQ ID NO: 883247 - DNA, 685 bp, Homo sapiens
aagattattaccaacagaacaatatttgttcatcaacttagacggcagtagaaatgatgataattttgaaatagggccaaggcactagctcatgctctgtaagcatacttgtactaataggctgaagaccagtgttaaagttatcttttagaatagtaaaatagcatatgaaagatactgcagtggcaaaatatgaagttggaagttgacttgaatctgcaagagtggacctcaagaggttgtttctgggtgaaagtagagaataagtaatagaaatatttgagaatcattwaattggtagaactgttttattcactgtcataatgggtttggagtagaggaagttaaaaaggtgctacagggtgcaagtaggtcttcatgcttgcaggatgcaggcagagagagacaagaagtgagtaagacaaaagaatatcaaaccattttctaagcatggccattcagcctgtcagatctaagacagaggacagatgtgtaagacaagaaacatggttttcatttataatacatgtttcagatttaaaattattattaactgctataactaaaataaaaacaaaacactcaaagtaataaggtagtaattatattcatagataaatataatgcagtggaataattgtttgcaaattaaattaaataatgagaacaaagaaaaatatttctt

SEQ ID NO: 883248 - DNA, 625 bp, Homo sapiens
tggccatttgagttgctggagttcttgtgttggttctttctcatgtctacgtgtgggtatttctttgactgctgggttgcctctaattaaagtggtcaggcagaggaagagtggttgtgttggagtcccaggctcagcagccctgctcagtgagaagtgaggaccaggacctatgtggagcacagtctggccacttttccatgaggtgggtgctttgtgctgggagtccagatcagcccctggtccccatggctctctggarcctgaagacagcaagggcaagggctgtgagacggaaaacatggtaacccatctatattagttcattcttgcactgctttaaaaaagtacctgaaactgtgtaatttataaagaaaacacatgtaattggctcacggttctgcaagctgtgcaggtaggatggctgggcaggcctcaggaaactttcaatcatggcagaaggtgaagcggaagcaggcatgtcttacatggctggagaagaaggaatagagagaaaggggaggtgctacacagttttaaataagtagatcttatgagaactcactcactattacaaaaacagcaagggggaagtctgcctccatgattcattctcctcccacca

SEQ ID NO: 883249 - DNA, 640 bp, Homo sapiens
ctgatgggctccatctgttgacaaatagttttattttatattttcaatatttggctcactgactactgtattaagctgcgttcaaaggtttatttaaagcatcagctgggatctaatgttaggtaatcatttgtaggtattacaaatttwaaaaagtatttttatttgagtttatttccagtgcccttttttatactaatgcggctttcctctcttctagttttggacgataataagttatttgttcttgttcttcatatgtttacatattaccaaacttcattagttttaagccaggtatattttcatatattgccatgtttgaaattggattgggtcttacaatcaaaagcattgattttattgattgaaacagcaaatattttttctttcctgatgatcataaaaatcaagaaatcaaatgttaaacaataggacattttgcaattaatgacatcttagacctaaagaaatatgatatttcatgtgaggcagctctcattagccataaatatgtttcttttgccaatcttactgatgataccctgatttttacaaactccttcctaatttagtaattctttcaattctaaccatgccttctggtgccatttcatgtgtttgtgcatatttttctatg

SEQ ID NO: 883250 - DNA, 598 bp, Homo sapiens
tattgccttccttacattctttactagactgtgaaccttccagtttcttgaatatgccatactctcacttacctcacaatatgctcatatgcatgaacaatatgctcctgtgcatggaactttttttaatgatatgctccctgtaaaccttaaaatacctaagcttcctcacagaactcttccctggatgctggactaacttaattacagtaatttattttcccacaaggtgttgtatatttccttttataaaccccatcagaaatttttgacttaacacttctatcaaatatattgttaattttttgcatatttaaactatgttgtctttttttgttatcattgtcaagttgtcatattagaatttcagtatctttataaacttgttttaaactccggaaacagcacaaaactatatccacyggatatatttccctaatctcttgagacactaggaaaccacggagctgagattcatgctaatgttaatgtgtcatcatgagcaatgttctttccataacagtgtgttgtttcccaacccaaagcatttaaagaaagataaaaagaaaacagataagcaggaacaccttctcaacat

SEQ ID NO: 883251 - DNA, 642 bp, Homo sapiens
caggcagggtcaattcttcatcttacaaaagagcttcttagctttagcaatgtggttagccacttacaataatgttctcaatgcagacacattcgatgaagtggtagccttcaataattggttcttttcatgttcacgttttttttttcttttgaaaaaacttcaaaggcttgtcttttaatgtggggtgctttgtctccacgtagtgaagcaattttgaaggtttcattacttygttagataaccggtggccacatgttatacaaagcagacttggagaatgtgaatcacttgttacaatgaactcataatttaagtatgattcttggtattttcttttaaaggaagctttctttttgttttcagtcttagagtattctgctttctcatcactgggtctttcccccttttcataaaagctctccagtgaaattgttttttactcattttggctaggattagcttctgggcttaatcaaaactgtgactgagacaagtgtgcagtgtaggaaagagtcaagaatggaagtagtaaataaaataatgggtaggccacatgtggactaaaataagtgtcagattcggacttaaagcctgccatcagatacagctatacaaatgaagtacatcaactcacttgcc

SEQ ID NO: 883252 - DNA, 615 bp, Homo sapiens
ccagctttgttccttttacttggaattgccttagctatttgggttctttcatggttgcatatcaattttaaaatatttttttctagtactgtgaagaatgtcattggtagtttgataggagtagcactgaatctgtacattgctttgagcaraatggtttaatgttactgatttttcctatccatgagtatggaacattttgccgtttttggtgtatctctgatttctttgaacagtgtttgtaattctcatcatagagatgtttcacttacctggttagctatattcctaggtattttattctttttatggaatttgtgaatgggattgcattcctgatttggttcttggcttgcctgttgttggtatataggaatgctagtatctttttgtttttgtttttgtttttgttttttgacagagttttgctctgtcacccaggctggagtgcagtggcatgatcttggctcactgctatctctgcctcagggttcaagtgactttcctacctcagcctcccaagtagctaagattacaggcatgtgctactacaatcacacccagatataaatatatattagtatttttactagagatgggatttcaccatgttgg

SEQ ID NO: 883253 - DNA, 615 bp, Homo sapiens
ccagctttgttccttttacttggaattgccttagctatttgggttctttcatggttgcatatcaattttaaaatatttttttctagtactgtgaagaatgtcattggtagtttgataggagtagcactgaatctgtacattgctttgagcagaatggtttaatgwtactgatttttcctatccatgagtatggaacattttgccgtttttggtgtatctctgatttctttgaacagtgtttgtaattctcatcatagagatgtttcacttacctggttagctatattcctaggtattttattctttttatggaatttgtgaatgggattgcattcctgatttggttcttggcttgcctgttgttggtatataggaatgctagtatctttttgtttttgtttttgtttttgttttttgacagagttttgctctgtcacccaggctggagtgcagtggcatgatcttggctcactgctatctctgcctcagggttcaagtgactttcctacctcagcctcccaagtagctaagattacaggcatgtgctactacaatcacacccagatataaatatatattagtatttttactagagatgggatttcaccatgttgg

SEQ ID NO: 883254 - DNA, 649 bp, Homo sapiens
aggtatgagttactattttcctctttcttaaaataatagcaagaataaaaatataagaacacaaataaacaaaaaaggacgacatttctagtaaaactaggagaaaggtaaaatttacacactcccaaatacatgtacatcttttcaaagttgagtttgaacatgagctgtgtgagagggcatgaaaagggccaggagaatacctcaaaaatccccaacaaaaattcacgtgctacagatgagagtcttatttgatgtagaaaccgaataacttgttctttaccctgctccagctggattcagagaaatcttgccaacatggctgtgtaamgaatcatccaggccagacgtggtggctcatgcctataaagcactttgggaggccgaggcaggtggatcacttgatgtcaggagttcgagaccagtctgaccaatgtggtgaaactctgtctccactaaaaaaaaaaaaaaaaaaaaaaaaagccaggtgtggaggtgcgtgactgtagtcccagctacttaagagactgaggcaggagaatcgcttgaacctgggaaggggagtctgcagtgagccaagatttggccactgcactacggcctgggtgacagagtgatacctcttctcaaaacaaacaaataaacgaac

SEQ ID NO: 883255 - DNA, 507 bp, Homo sapiens
gtgtattttattgaggaaaggaggacaactgagaatatatgcttgtattttactacatatacctttaaagaaatctggaagaaaacagaaatcctaagacacagtgttctcttgggtgtgttatgatgggagagttgccgatgttgagaaaatgtgctgttttgcacagaaatgagtggctgacttttcagtgcatgcttttttattttaattacttaagtagttggatgtaagaatagtaaaattaaatgaaaattgaggtaaaatataattaagatctctgcatataatttatgtcttgaaacctttgattataaagtgtttcctagaccctttcacagaaaaatctccatatagctaytaataagaggaaaatccattagcacacgaataacagattgtgaataaaaagctgaacaaatactcatctccattgctgaattcatactgtgcagtgttgcataccttaatccttgtcgctttattacaatgacaaaaaaagttgca

SEQ ID NO: 883256 - DNA, 650 bp, Homo sapiens
aaccaaaatatgtcattcttcttcacacacattctgtcatgtttcacacacagcaatttcctgtcttaccttataatcatgtatggccacatgactgaactttagccaatgaaaaatggatggaatttatatgtactgattccaagtggggtctagtaaactttcctctcctgcttctccagactggttgcctttccactaactggttggagatgaccataatgactttgagcattacgtgttgagataggcaaagtatccatctgcttctcttactaagtgacaacatggagtagtatttctaaatcattggtgtgcgacagaatcatccacaaaattagtaaatcacagattattaggctctgccccagaatttcttgtacattaggtctaagaaagatctgagaatatgtgttcataacaagttcccaggtaataataatgctgttggtcaatgaaccacagtttgagaaccatttgcrtacagcagagtacttcctctctcctaagaaaaatcctgaatattattgagtgtgtaagagaaacaatttatctcttttttattgtatatatttgtcttgcttgttaaaaaggaaacgttacctgaattatcaatatggaacttcatgtaatataaaatggatagtctt

SEQ ID NO: 883257 - DNA, 618 bp, Homo sapiens
tgttattttttgagaaatatgaaattcgtctttggcattagcttcaactttcatcctagagtagttaatgggcctaaatctaattatttgtaaagtttgcttggatgattggtagatgataaagcaatatacactaattagccacaaggacaacgacatgagagatgaattttacagatacatcaaaaacttatctgtgaatggaattttagaatgctttaaatagagctataaaaataggtgaaacaagttgatttaagttggagttctttattattcatggaactataggaatttttttttcttgtggtacttagaagtttcagtgtgttataaagattttttcttctaccagattgcatcttccttgaaggccagacccatgtctgattcataytatctccatgtgtctagtagatttctctctataaattagctatcaaatatttgttgaatgcagaacccatatgccatccttttgcaaattagaaataaaagcatgcattctccagaacgtgtttcttaaagcacctgcctctcttgtgtcctttttgaaattaatcacatgaattcagaaatgagaagggatagttttatgttaggtcttttgtaggaaag

SEQ ID NO: 883258 - DNA, 606 bp, Homo sapiens
actaactttcaggaatttaaaaaatgtggaaggatgatgctatggattgaaatatgtcctccctaaattcatatgttgaaactccaatccccagtataaaacgcagcaagaagggggccatcagcaggccaggaagagagccctcacaaaaaacggaatcagccagcaccttgatctcggacttcccagcctccagcatcatgaaaaaataaagatttgttgtttaagtcacccagtctatcatattttgttatggcagcccaagcaaacctatgcagcygggtcaagtattttatatatatattataggagaatacatgctttgagtcatatagaacaggatattaacaccaactctaaattgctatttgtagatttggggaaacactccaaacttcagttttctaaattaaataagtacagtattttcttcattattgggctttttttttttttttttttttttgagatggatttttgctcttgttgcccaggctggagtgcaatggcacaatctcggctcactgcaacctctgcctcccgggttcaagcgactctcctgcctcagcctcccaactagctgggattatgggcatgaaccaccat

SEQ ID NO: 883259 - DNA, 585 bp, Homo sapiens
aggacaaggaatatttgaactcagaagaaataaaggcaacttggatctggggatattaaggaaggtttaaggcatttaaatggtttttttggagaattagtaggattttattaggaaatacaaggaagaaagtccttctagatgaagaaagaaaagggataaagatgtaataggacattttacttgtggcatagctaccaagggcaagtgacttaagacatcctcctcctccatccctggggcaaagcaaggcttcttcagtggtgatgggaagggacaggaaatttgtaagagttccctgccctgtgactacctgctttgtctggtttttgctttcacactgcttccattaacatatttttatcatagccagcacaaggaatattctagagtattatgttattttgtrtttaaagggtcctacttttggaaaatatttataaggggagatgaccctcctggctccataaacagctactcatgtgccccttccccaacatattcattcacttttgggtttggaggccactgaaaagtggcctgaaactgatttctaattaaccaacccaggaagctgagaagtca

SEQ ID NO: 883260 - DNA, 620 bp, Homo sapiens
gtctctacctcatctcttcctagactccattactgctttcagaactattctgttataagctttaaaaacagattaccatcctttatttgatacagaagataatcctgttgatgtttttgaaaccaagttgtctacaaatctgatccacttaaataraatatgataacaaaactgtgcctgtcagtctctgaagaaactgagagtagaattaacaaaatgtaattaaggtaatccaagtaaagattaaggcagtcgatgacaaaattattttcctatagaatagagttgtatttctgagtggaagctcaaattctcctctctttaccttggtggaatcctattattactttgattcaagtatatctttgcaattaaactgctattaattatatggaaatgagacaggaaaatactgtgtagaagagggcagttcccctgcaaaggccccacactcaagcctgaaaacccatgaccctaaatgggaacaggcatttctgtttttgcacccaaaagttgccttttggcccaccatgcccccccatcttgtactcatataaaccccagatcccaggttccagaagcacacaaggcagagacgaacagaagagtagaagaatggc

SEQ ID NO: 883261 - DNA, 592 bp, Homo sapiens
caattgttccattttgacttatttcattcctagaaaatttgtcctatgctttgttatttataatcacattaatgatttatttcagaatatactgtaatataaaaaatgatgcatgctaaataaaatctggcaggtttttttttttccccaccattaggaaggaaatggaggtgtaaatacatttaaaattcaccatggggtgatggaatgcacgacttttgggcaaccttaaaactgtcctttcaattttaaatccacacaccaacagaggggataattttaagtctctctttgttgagagcttcaggggagagtgtgtaragtggattttttctgattcaaaatgaagagatacatgaaaactaccaaagtcaaggcacttcatagagaaaagtatgatgctttcattgctgaagagacccaactaaagtctaatgcagaggatgagaaagaaagagggcttgtcatattcttcagccagcacaaccttcccttcatgtttacatcaacagcagtggtgcctcccggtctgatgtttacataaagctgagagtcaactggataccctggctccatgctggcccaaggcaga

SEQ ID NO: 883262 - DNA, 592 bp, Homo sapiens
caattgttccattttgacttatttcattcctagaaaatttgtcctatgctttgttatttataatcacattaatgatttatttcagaatatactgtaatataaaaaatgatgcatgctaaataaaatctggcaggtttttttttttccccaccattaggaaggaaatggaggtgtaaatacatttaaaattcaccatggggtgatggaatgcacgacttttgggcaaccttaaaactgtcctttcaattttaaatccacacaccaacagaggggataattttaagtctctctttgttgagagcttcaggggagagtgtgtagagtggattttttcygattcaaaatgaagagatacatgaaaactaccaaagtcaaggcacttcatagagaaaagtatgatgctttcattgctgaagagacccaactaaagtctaatgcagaggatgagaaagaaagagggcttgtcatattcttcagccagcacaaccttcccttcatgtttacatcaacagcagtggtgcctcccggtctgatgtttacataaagctgagagtcaactggataccctggctccatgctggcccaaggcaga

SEQ ID NO: 883263 - DNA, 621 bp, Homo sapiens
aaacagatgcacgtgccatgcttgcacaacctacagaaacatgaaccaaataaaacccttttctttataaattacccagtctcaagtattcctttatagcaatgcagaatggcttaatatagtctccaatggtgtccatatcctaatctcaagaacctgtaactatgttaccttatttagcaagagggactttgcagattaagttaagaatgttggaatggggaactmtgctggattatttgggtgggtccgagtaatcacacaggtcctcataagatggaggcaagaaggtcagagcgagagaagaaaatgtgaaattagaagtagcaaacagggagacaaggagaggaaaacacagatttgaagatgttatgctgttagctttgaagatgttatgctgttagctttgaagatgaaggaaggggccacaagccaaggaatactggtatcctgtagaagttgcaaaaagcaaggaaatagattctccccaagagcatctagtagcactatacagctttgacaacatcttgattttagaacttctcaatcccacaactataagataataaatttgctttgttttaagccacttagttcacggtaatttgttatagtaacaat

SEQ ID NO: 883264 - DNA, 726 bp, Homo sapiens
agacttgaatattgttattagatttagactatgttaagatgaattgctctctcatggaaagactcaataacttatgcctaagaataatataataatcacaacgatagccatattgttgttttgaatttgggtaacagaagaacatagatctttaaactattaggcatatcttttctgctcaaaacaatttctttacattttatccctttaagtcctytaaagcttatcacacagaaaaaataacagtctgggagaggaagactaaagaaatcaactttcttcagagcacatatagatttattgtagccaattgatgacactgcaaaactggcacaaaggcaaatacttaataaataaatgaaaatcagagtggatcagttcagtgctgtatgttttgaaccgggtcctcaaaggcaagtcatcatcagaagaaagaaaaatgcatttaaggagcgttaattattgtctatctccaagaccaaaataaaaaaagcttaaaacttttagactgttaaaaatctactatactaggatattaaagtattttaaagaaaatgagatttatgcttaataaaaaaattcccattaaacagcaaactattagaagagaaaatcattctgaatctctacacttctcaatccaaatacaatgccatgagctataattcagtaaaaagctctatattttggatcctgaagcttgactcataattgaaaggaaacctt

SEQ ID NO: 883265 - DNA, 639 bp, Homo sapiens
tcttgaaagcttggcttggatttagtaagagagttctctctctctggttttctgcctgccaggagtacaggttgccaagtctgtgctaagagatggccaaacatcagattgggatcccaagaatttgtagttagctggataaaaatctgggtagcccgggcattccatttgttgctggcattctatccaccattgctaattttcagcagtttcatcacagaaagacagagacttagaagtggtgtttatagaagtggcttgagaaaygaccttagattccaggggctgtatgttctgcaccctttctgggaatgcctcttgtgtccccactgttaagccacagaaagtcttactacttctgagtcgcattttggaacaggtatacctttggagatcctaaatcatgaatggccagatgacagatcctttgatctgaaaaagcttttatatttaaaaggatttttagagagcttcccccctatacaaatgacctgtttgtacctatggaaaaatcaaattaaaagaagaagaagagtatcatggctagcctaaaaggatcccttggcaaaattaaatagcagaaatcacatttacaacaaaaattgaaatccacacagaccataaacccttccactgaca

SEQ ID NO: 883266 - DNA, 639 bp, Homo sapiens
tcttgaaagcttggcttggatttagtaagagagttctctctctctggttttctgcctgccaggagtacaggttgccaagtctgtgctaagagatggccaaacatcagattgggatcccaagaatttgtagttagctggataaaaatctgggtagcccgggcattccatttgttgctggcattctatccaccattgctaattttcagcagtttcatcacagaaagacagagacttagaagtggtgtttatagaagtggcttgagaaacgaccttagattccaggggctgtatgttctgcaccctttctgggaatgcctcttgtgtccccactgttaagccacagaaagtcttactacttctgagtcgcattttggaacaggtatacctttggagatcctaaatcatgaatggccagatgacagatcctttgatctgaaaaagcttttatatttaaaaggatttttagagagcttcccccctawacaaatgacctgtttgtacctatggaaaaatcaaattaaaagaagaagaagagtatcatggctagcctaaaaggatcccttggcaaaattaaatagcagaaatcacatttacaacaaaaattgaaatccacacagaccataaacccttccactgaca

SEQ ID NO: 883267 - DNA, 613 bp, Homo sapiens
ggccgaggcaggtcaaagctgaaaagtggaatcggagctgttgtattgcctggggtgaggcttgcttcatgtatattttctctaatctaaatgtcagttaatgatgaaaatctcatagcaagttattttgatgagtcatataaataggtcaaaatgtttattttactgtcctacttttttttgagcctctggttacattttcttgtatatttactttctcatyctttctcttttcttaccttcctctttgactccttatctttctatgccaaccctctctaaaaagtcattatgtaatatagttgctcttttatttaaaaaattttaagattgatagatatttgctatcatgttatgaagctttatttgtatgtgtattacaaatacatttgctaactactagcaaatattttatgtaataactttgctattttattaaaatcctgtttttaaaattctgaaatgtcattttaagtataggagacagtgaaattgttcaagtttaccactaaaccaggaataaggaaacttagattctcgtccttttttcaaaaagaaaaattttaaaaccaggcttattgaggtatagttgatataagctatatttgacttg

SEQ ID NO: 883268 - DNA, 613 bp, Homo sapiens
ggccgaggcaggtcaaagctgaaaagtggaatcggagctgttgtattgcctggggtgaggcttgcttcatgtatattttctctaatctaaatgtcagttaatgatgaaaatctcatagcaagttattttgatgagtcatataaataggtcaaaatgtttattttactgtcctacttttttttgagcctctggttacattttcttgtatatttactttctcatcctttctcttttcttaccttcctctttgactccttatctttctatgccaaccctctctaaaaagtcattatgtaatatagttgctcttttatttaaaaaattttaagattgatagatatttgctatcatgttatgaagctttatttgtatgtgtattacaaatacatttgctaactactagcaaatattttatgtaataacttygctattttattaaaatcctgtttttaaaattctgaaatgtcattttaagtataggagacagtgaaattgttcaagtttaccactaaaccaggaataaggaaacttagattctcgtccttttttcaaaaagaaaaattttaaaaccaggcttattgaggtatagttgatataagctatatttgacttg

SEQ ID NO: 883269 - DNA, 609 bp, Homo sapiens
gggcggggtttcactatattggccaggctggtcttgaactcctgccctcgtgatccacccgcctcagcctcccaaactgctgggtttacggtcatgagccatcagattgtatggaggccctgcattgggtctgtagttacttaaccctatctgaggggcaggaaagacatccatgattggtgaagagttactggwggtatttgaacgtgagaaggcagaaaattacaagggcgagcaaggtgggtgtttacaaactgaagttgattttatgtaaattttgccagaaacagtaacttggggattaggtttaggagtaaagaaatgtatataaacttgattcattaagtttttttcacaggccgaaaaatttcattacaaacatctaaaacctcgtttccagagaaaaattaaataccatgtttcaaataaataactgattaatgtccatttttcaggggaactagattataaattgtggaataattattgctaatttgtatcagaaaattaagtctaggataacatgtggagtcttgctatgttcatttttaatcctttagctattacctcattgaattaaaaagagtaatgtgtggtagagtcatcaat

SEQ ID NO: 883270 - DNA, 609 bp, Homo sapiens
gggcggggtttcactatattggccaggctggtcttgaactcctgccctcgtgatccacccgcctcagcctcccaaactgctgggtttacggtcatgagccatcagattgtatggaggccctgcattgggtctgtagttacttaaccctatctgaggggcaggaaagacatccatgattggtgaagagttactggtggtatttgaacrtgagaaggcagaaaattacaagggcgagcaaggtgggtgtttacaaactgaagttgattttatgtaaattttgccagaaacagtaacttggggattaggtttaggagtaaagaaatgtatataaacttgattcattaagtttttttcacaggccgaaaaatttcattacaaacatctaaaacctcgtttccagagaaaaattaaataccatgtttcaaataaataactgattaatgtccatttttcaggggaactagattataaattgtggaataattattgctaatttgtatcagaaaattaagtctaggataacatgtggagtcttgctatgttcatttttaatcctttagctattacctcattgaattaaaaagagtaatgtgtggtagagtcatcaat

SEQ ID NO: 883271 - DNA, 613 bp, Homo sapiens
ccctacaaaggacatgaactcatcattttttcagcaaactgtcgcaaggacaaaacaccaaacatcacatgttctcactcataggtgggaattgaacaatgagaacactcagacacaggaagggggacatcacacactggggcctgttgttgggtagggggaggggggagggatagcattaggagatatacctaatgtaaatgacgagttaatgggcgcagcacaccaacatggcacatgtatacatatgtaacaaacctgcacattgtgcatatgtaccctagaacttaaagtatwaaaaaaaaaagtatatttttagcaataaatgcctggatcaaaaaaactagaaaactttcaaataaaccactgaacaattctacctcaagaaactagaatagtaagaacaaaccaaaccccaaattattaaaaggaaataaataatgaagaccaaacagaaataaacaaatttgaggcaaaaattacaaaaggttaacaacaaaaaggtttaaaaaatatcaacaaaccattagctagactaattaagaaaaagggaagacccaaataagtaaaatcagaaacaaaaaaaaagagacctcataacagataatgacag

SEQ ID NO: 883272 - DNA, 641 bp, Homo sapiens
gggaggttgaggctgcagtgagctatgattgcactcccgcctgggtgacagagcaagagtctgtctcaaaaaaatgttcttactgtataagaattatgaatgacatttattttatgttaaaacagtatattttatctacaaaaggagtaaaagacagtaatagaaaaattggcacataaacaaaaatgctaaaaaattcaaatttaccaataatcctatcacctaaattgataatttttaatataattaaatgtaggattttaaaataaatttcttttaatttatttatttaaacatatagattatttttagaccctcttcagacatcccccattgaataagttccatgatttacaggcctactctctctatkgttaaatactgtattgctttcaatgaacaacattttttataaacattttcacagaaacaaatttgggcacattgagacatgttttcttttcaaaaagtcctagcactttaattactgtgtaaagagatattagtgtataattttcacacatattgactaacatccctgcaaaatgttgaatcaatttatactttcagcaccaatcggcaaattaatgtccattatgctttcgcttcaccaaaactgatacctatattttattttgcta

SEQ ID NO: 883273 - DNA, 598 bp, Homo sapiens
atgttttttccttagcagtaggtcttgacagtggactgaaaatattcagtaagccaacctctaaacagatgtgctgtcatccaggagactgttgttccatatgtagatagcaagcagattagatatagcataattcttaagagctctaggacttttttgagtggcaaatgagcattagcttcaaygtcaagttaccagctgcattagcccctaacaagagagtcagtttttatttatttatttatttatttatttatttatttttaaaagagacaagagtctcgccttgttgtccaggctggccttgaactcctgggctcaagtgattctcttaccttggcctctcaaagtgctggaataacaggtgtggccccagcctgacctttgaagcaaggcattgattttccctctctagctgtgaaagtcctagatggcatcttcttctaatggaaggctcttttgtctacttaaaacaccttgtttagtatagccacctccagcaatgatcttagatatatattctggataacttgctacagcttccatgtcagcacttgctgcttcactttccacttttatgttatgacaatagcatttt

SEQ ID NO: 883274 - DNA, 627 bp, Homo sapiens
gtggaatccgctaagatgcgttacagttgatagtggcaaaaataactgtggagcagaaagacttgagttggacaaatttacaaagcttgttaaatgtcaggtgtttaaagcctgattatttattgtattatttattagcaggtactttgcagaaaatatttaaatctgtcatgttttagtgaactattatataatagtgtcagcagtgattttgacttgcatttgtggacttyatcatcaaatcctatgaatttttgttagatatagaggcagaatatactgaattgccattatacagagcaatttaatgacttggcagtggtaaagttttatttcagttttttgcgctgaggaatgagattgaaatttttctgaataatattgccctcaactgttaagtcaaatgcttaatagctttgaaagttggcttttcctatagatttcataatattttgtaacaaattcacctaaaattacaaggcagaacagtgattataagtgaaccttatactgtggtaaggtcacttctacaagaataatgaatcatgaaaatcaagagaaagaacaaatagtaggaaaatatcttccaattccttttggcccttcatatttccacctaaactcata

SEQ ID NO: 883275 - DNA, 594 bp, Homo sapiens
tttttgccattacttttaatgacaaaaacgacagttacgtttgcacgaacctaacactttatttatttatttatttccccttgctgagatcagatctctctctttctgatcgttattgaggtatgctccatgccttgattccaggaaagctatatagagagagacttgttaggccatcctcctcctccctccaccaccaatagcactgtgcttgaatattagatcaagaaatggcctgacagcccaagaccccttctcartgaaattagcttgagacttctgacaagaacgaaagtattctgcccaatgactcccatttaaaaaaccaactcaagagtaacatactacttatgcactccagtgagactttagaaatagatattgaggccatataagacagtccagaaattttccagaaagactaatagttgtacaagcctctttttttaaacttaaatttttatttttattttaaattccagggtacatatgcaggatgctcaggtttgttacacaggtaaacgtgtgccatggtggtttgctacacctatcaacccatcacctaggtattaagcccaccatgcattagctatt

SEQ ID NO: 883276 - DNA, 634 bp, Homo sapiens
cttataaaagaagcccccgagagctcccttccccctgcaccatatgaggacacagcaataatgtgccccctgtgaaccaggaagtgggccctcgccagaaacaaaatctgacatgtcttgatcttggacttcccagcctccacagctgtgagaaataaatgtctgttgtttatcatttaccccatctatggtattttgttttaacagcctgaaaaaactaagatagtctctaaatggtagaaggtaaagagcattcccctggaggctgccagtttctctggaagagaatactccttttttcaaagtctgggaatcgaagcctggcttctaggcattatgttctccgggtaaagtaagtttgactgtttcgcatatagactttgattaatcrcctggtgtattagtctgttctcatgctgctatgaagatgtacttgagactgggtaatttataaaggaaagagatttaattgactcacagttccacatggcttggaaggcctcaggaaacatacaatcatggcagaaggggaagcaaacacatccttcttcacataatggcaggaaggaaaagtgccgagcaaagaggggaaagccccttatacaaccatcagatctcatgagatctcactcac

SEQ ID NO: 883277 - DNA, 608 bp, Homo sapiens
tcaggatcagtcattgggatttgccaaattcaatagatataaactcaaaggcctcttgaagcaaggcagatgatgcaggtcaggcggggactagagtaaattagaaagtttaaataccatcaaaaaaaaagctcttacttcaaatgattattctcatgctttcatagaagatctgtgttgccagatttttggctcttgcaaaagaaagtcctgtttttacatgttgacaagaaacttatttwaaaaaaaaaagaatactaaacaatgaaactcatttgtgacccctggacttcaaagcttcttgaagctgaagatttatatatttgtcttgtgttatcactttgagataacttagtgagagacagttccaaaagactctttcatttataaaagttgctcttttcattggtcctaaatctaatgcttccaaatatctcatgatccttctttataagattccaggaatttaagaacaatgccattttcaatttatccatgtcatttgtggttttattgactttaatcatagctcctttcagccttcttgtttctaaactaatgttacagattattattataggataatactttcataggtacagaaaagt

SEQ ID NO: 883278 - DNA, 620 bp, Homo sapiens
aattgttagctactgtatctgcttctgaactgaacctgagctgcacacctcaataacatcttcaagttcatttatcctaattaaaaagaaaccacaagggttcagaagcacaataataaatccccatttacagatagaaatcaatgaagattagacattcagggacacgcagggtcactcaaaattcaaggaagaggccgggcaaggtggctcatgcctgtaatcccagcatttggggaggctgaggtgggtggatcacctgaggtcaggagtttgagatcagcctggccaacatggtgaaaccccatttctatcaaaaatacaaaaaattacccgggtatggtggtggtcacctgtaatcccagctactcaggaggctgaggcaggagaatcgcttgaacctgggaagtggaggttgcagtgagctgagatcacacaactgcactccaagcctgggmcagaagagcaaaactccatctcaaaaaaaaaaaaaaaaaattcgaggaagaataggaatggaaatatttacccaaatttccaaattgatacttacttcatttaataacattccaattactagctataaggtgctatgtaaattgcctaacatctctgagcct

SEQ ID NO: 883279 - DNA, 602 bp, Homo sapiens
gcaaatgctgagagattttatcaccacaaggcctgccttacaagagctcctgaaggaaacagtaaacatggaaaggaaaaaccggtaccagccactgcaaaaacataccaaattgtaaggaccactgacactatgaagaaactgcatcaactaatgggcagtataaccagctagcatcataatgacaggatcaaattcacacataacagtgttaaccttaaatgtaaatggactaaatgccccaattaaaagacmcagactggaaaattggataacgagtcaagactcatcagtgtgctgtattcaggagacccatctcacatgcaaggacacacatgggctgaaaataaagggatggaggaatatttaccaagcaaatggaagggaaaaaggcagggattgccatcctagtctctgataaaacagactttaaaccaacaaagatcaaaaaagataaagaagggcattacataatggtaaagggatcaatgcaacaagaagagctaactatactaaatatatatgcacccaatacaggagcacccagattcacaaagcaagttctctacaaaactctccaccccaaatcaacagaatataca

SEQ ID NO: 883280 - DNA, 668 bp, Homo sapiens
actagaaaatctagaggaaatggataaattactggacatatacaccctctccagactaaaccatgaagaagtcaaatctctgaatagaccaataacaagttatgaaattgaggcagtaactaatagcctaccaacaaaaaaagcccaggaccagacagattcacagccaaactctaccagagataaaaagaggagccagtaccattccttctgaaactattccaaacaatagaaaaagagggactcctccctrattcattttatgaggccagcatgatcctgataccacaacctggcagagacacaacaaaaaaagagaatttcaggccaatatccctgaagaacattgatgtgaaaatcctcaattaaatactggcaaactgaatccagcagcacatcaaaaaacttacccaccacgatcaagttggcttcattactaggatgcaaggctagttcaacatacacaaatcaataaatataattcaacacataaacagaaccaacaacaaaaaccacatgattatctcaatagatgcagaaaaggtcttcgataaaattcaacacaccttcatgctaaaaactctcagtaaactaggtattgatggaatgtatctcaaaataataagagctatttatgacaaacccacagccaatatcatactgaaagg

SEQ ID NO: 883281 - DNA, 668 bp, Homo sapiens
actagaaaatctagaggaaatggataaattactggacatatacaccctctccagactaaaccatgaagaagtcaaatctctgaatagaccaataacaagttatgaaattgaggcagtaactaatagcctaccaacaaaaaaagcccaggaccagacagattcacagccaaactctaccagagataaaaagaggagccagtaccattccttctgaaactattccaaacaatagaaaaagagggactcctccctgattcattttatgaggccagcatgatcctgataccacaacctggcagagacacaacaaaaaaagagaatttcaggccaatatccctgaagaacattgatgtgaaaatcctcaattaaatactggcaaactgaatccagsagcacatcaaaaaacttacccaccacgatcaagttggcttcattactaggatgcaaggctagttcaacatacacaaatcaataaatataattcaacacataaacagaaccaacaacaaaaaccacatgattatctcaatagatgcagaaaaggtcttcgataaaattcaacacaccttcatgctaaaaactctcagtaaactaggtattgatggaatgtatctcaaaataataagagctatttatgacaaacccacagccaatatcatactgaaagg

SEQ ID NO: 883282 - DNA, 623 bp, Homo sapiens
aaatgtaacgagtatgagggcagtttcagtcatagctcagaccttatcctgcaacaagatgtcctcaccagacagaaagtctttgattgtgatgtacggaaaaagaactccagtcagagagcacacctggttcaatatcggagcattcataccaaagagaactcatgaatataacgagggtgagaagacatttagtctagtcaaattcaggcttcattcaacatccgrgagttcacaccagggagaaatcatgtacgtactgcatgtggtaaagccttcagtcatagctcaaccattactcagcatcagataattcaattttcatgctattaataatttcataccttagtcacatttggagaattcgtatgggaataaaattccattactgcaatgaatgtgaaaaagccatcagtcaaagaaactaccttgtttagtatcaacttcatgccatgcaaaaagattatgaatgtaataaatgtgtatgtgcacgaggagattcagtcacaacccaacgctcattcaacatcaaagaatctatatctaagagaagttatgtgagtgtagtgaatggcaaatctttcaataggagtttaactagtcttttttatatcagaatatcc

SEQ ID NO: 883283 - DNA, 623 bp, Homo sapiens
aaatgtaacgagtatgagggcagtttcagtcatagctcagaccttatcctgcaacaagatgtcctcaccagacagaaagtctttgattgtgatgtacggaaaaagaactccagtcagagagcacacctggttcaatatcggagcattcataccaaagagaactcatgaatataacgagggtgagaagacatttagtctagtcaaattcaggcttcattcaacatccgagagttcacaccagggagaaatcatgtacgtactgcatgtggtaaagccttcagtcatagctcaaccrttactcagcatcagataattcaattttcatgctattaataatttcataccttagtcacatttggagaattcgtatgggaataaaattccattactgcaatgaatgtgaaaaagccatcagtcaaagaaactaccttgtttagtatcaacttcatgccatgcaaaaagattatgaatgtaataaatgtgtatgtgcacgaggagattcagtcacaacccaacgctcattcaacatcaaagaatctatatctaagagaagttatgtgagtgtagtgaatggcaaatctttcaataggagtttaactagtcttttttatatcagaatatcc

SEQ ID NO: 883284 - DNA, 623 bp, Homo sapiens
aaatgtaacgagtatgagggcagtttcagtcatagctcagaccttatcctgcaacaagatgtcctcaccagacagaaagtctttgattgtgatgtacggaaaaagaactccagtcagagagcacacctggttcaatatcggagcattcataccaaagagaactcatgaatataacgagggtgagaagacatttagtctagtcaaattcaggcttcattcaacatccgagagttcacaccagggagaaatcatgtacgtactgcatgtggtaaagccttcagtcatagctcaaccattactcagcatcagataattcaattttcatgctattaataatttcataccttagtcacatttggagaattcgtatgggaataaaattccattactgcaatgaatgtgaaaaagccatcagtcaaagaaactaccttgtttagtatcaamttcatgccatgcaaaaagattatgaatgtaataaatgtgtatgtgcacgaggagattcagtcacaacccaacgctcattcaacatcaaagaatctatatctaagagaagttatgtgagtgtagtgaatggcaaatctttcaataggagtttaactagtcttttttatatcagaatatcc

SEQ ID NO: 883285 - DNA, 435 bp, Homo sapiens
ggggcaaaatgccaccagtctcttagcacagcaagaatcacctttactctagttcccagcaagttcctcatctccatctgagaccacttcagcctgtaccttattgtccatatcactatcagcattttgatcaaagccattcaacaagtatctaggaagttccaaactttcccacattttcctgtcttcttctgagccctccagactgtttcaacctctgcctgttacccagttccaaagttgcttcygcatttttagatgtctttacagcaatgcccccctcccaataccagtttacagtattagtctgttctcatgctgctgataaagacataaccaagacttggtaatttataaagggaagaggtttagtggactcacaattccacatgtctggggagtcctcataatcatggtggaaggcaaaggagaagc

SEQ ID NO: 883286 - DNA, 602 bp, Homo sapiens
gccagccccaggatatttgtcatgctatttggcagctcaggaggcgcttgggcctgcttggccctggttgtacatcaggtaatgttgggagcatcttgcaaaggcccatgcttaagcctcacctatgaacagtactgtcctggcactaggcacctgcttttacaaaaccttcctcaggtgactytaatgtttaacaaatctgggagaaggcagatttgttaaattggggtgagataaatccggactcaaaagaataacataagaaaagttaaatacatgggaaaatttgaaaaatcaatttcccccctcttgtttcacaaacatatgtagcatatagcatatgtatagcatatatatgtatcatataacatatatagcatgtagtacatatatgtgtgcgtgtgtgtgcgtgtgggtatgaaaactatagcaggaagggtggtgaagtgaatggaccaattcagttgcaagatttttacattttgtgtgacagtattttgtgtagagcactaactctaactaaaccacgaaaaattaggggcgtatattaagcacttagagtaacattaaaaagtaatacaaataacaatctgaataggcct

SEQ ID NO: 883287 - DNA, 616 bp, Homo sapiens
taaataattggaggtatggaccattttatggaatagaatactcaatattgttaaaatatcaattttacccaaattgatttataaactcagtgcaatcccagtcaaaattccatcataatttttgtatagaaatgacaagctgattctaaaatacrtatgaaaagacaaaaactgttgcatgtatataggaatcttgataaaaacaaatttggagtagttacatgacctgacctatagaattactaaaatggctataatgatcataaaagtgtgatactggcataaagattaacaaacaaactaatggaacagaattaagagtacagaaataagcccatactacatggtcatttgattttattctatatcattctcaaagcaatttagtgcaggaaaagaatttttttcgacaaataatgctaacacaactggatagctatatagataaaaatgaacttcagtcacctccttcacactctacacaaaactgaatttaaaatggattactacaggaagaagtagaaatcctgaacagaacaataagtagcagtgagattaaatcaataatttaaaaattgccaacaaaaaaaatagcccagggcctgatggatttgta

SEQ ID NO: 883288 - DNA, 526 bp, Homo sapiens
ctttgctcttgtttctcctctctgtgctcccacttccctccctccctctccactaatttccccttctctcacttgcccaaaccctgtctccttagagatcactttccaaaattgtaaattcttttaactgagactggcccaaattcttgtgatggggcactgctgcctarattaggggaacaatagtgggcatgtggagcccaaggcccaccgaccaagcaagcattctgcaaaactgagggacaggcgggctccttactgaggacagcagtcagtgaaatggcagcagccagtagctaactcaggaagagcaaacacattatttccctctgagccaaaactcagtgggcctgtggagagtagggaatgtgtgccagcccccaaatgctattcaaagcattgaagtcaatgggtatttattgggtttttactttgtgccaggcccagtgctgagcactccaatgttgcatgagtctcaaagctctcccagctttgcatgggagtgggaaatgtgcactgggaattc

SEQ ID NO: 883289 - DNA, 526 bp, Homo sapiens
ctttgctcttgtttctcctctctgtgctcccacttccctccctccctctccactaatttccccttctctcacttgcccaaaccctgtctccttagagatcactttccaaaattgtaaattcttttaactgagactggcccaaattcttgtgatggggcactgctgcctaaattaggggaacaatagtgggcatgtggagcccaaggcccaccgaccaagcaagcaktctgcaaaactgagggacaggcgggctccttactgaggacagcagtcagtgaaatggcagcagccagtagctaactcaggaagagcaaacacattatttccctctgagccaaaactcagtgggcctgtggagagtagggaatgtgtgccagcccccaaatgctattcaaagcattgaagtcaatgggtatttattgggtttttactttgtgccaggcccagtgctgagcactccaatgttgcatgagtctcaaagctctcccagctttgcatgggagtgggaaatgtgcactgggaattc

SEQ ID NO: 883290 - DNA, 526 bp, Homo sapiens
ctttgctcttgtttctcctctctgtgctcccacttccctccctccctctccactaatttccccttctctcacttgcccaaaccctgtctccttagagatcactttccaaaattgtaaattcttttaactgagactggcccaaattcttgtgatggggcactgctgcctaaattaggggaacaatagtgggcatgtggagcccaaggcccaccgaccaagcaagcattctgcaraactgagggacaggcgggctccttactgaggacagcagtcagtgaaatggcagcagccagtagctaactcaggaagagcaaacacattatttccctctgagccaaaactcagtgggcctgtggagagtagggaatgtgtgccagcccccaaatgctattcaaagcattgaagtcaatgggtatttattgggtttttactttgtgccaggcccagtgctgagcactccaatgttgcatgagtctcaaagctctcccagctttgcatgggagtgggaaatgtgcactgggaattc

SEQ ID NO: 883291 - DNA, 640 bp, Homo sapiens
ccaaggcccaattatgccatccactaactgtggaccccaggaaaatcacttccctaatcctaatcatcctcatttataaaatgcggctaataatagtacttccggcatagggttattgtgagaatttaagatataaaccactggatgcctgaaacaaggtagacccctataaatgaaagctattggcagaaatggtattgttgtttatcattatcaccaacagtatcttcatcaacaagtttgatcctttggggacctacagtaggtgacgatgagcatgcttccatttgaagcatgtagttcaattaacttgtcttgatatggatgacccaagaagttgtagaagtctgggaaagggcctaggtataaacttattaagggaaataaaagttgttctggagtaactcctacataaaaagagactcctggccttctcctggaagagggatggtgtccagaggttgtaatggtcagaatgacccygtcagtatctctgtggctcacactggacctgatcctcttttaggtcaaccttgtgtgcattccaccccctgccacttttgtctttatggtctgtttcctgatggctcagtgagggaaggagcaacacagtagcccgactctgatgcattcacgctgc

SEQ ID NO: 883292 - DNA, 675 bp, Homo sapiens
tgttttcttaacttagctagtgatttgacagaaatttccttagacactgagaaccaataataataataataataataataataataataataataataataaaaaatgacttcctggctctcctgcttctcctggttgaaagggtttggggtctaaactcctcactcagcctctgccagtgctctgtccacagaggagggaatcatcacctcagactacctgtactgctggatggagttgaaagtttgagcccctcacttggcctcctctttcactgctggtgatggactgtttgtggtgtttggctagggtagtgcaggtattgtcaataakttttctgtctttctgggatgtccctttcttggtcctttggctagagagagcagacttttatttgggactttttttttgtctgcctctgttggtggttctttgttacaagcttttctaactcctagtttggggtatgggggaggtaaaaagaaaatgcagggaactccctgccatgttgtttcttaagtttcaaggtccctagccagtctgccttttcctttccacttatatgcaactttttataattttctgctgtggtttgtctagagttttaattgtaaaaacttgagaggaatggggaaaatgattgtatttcatcttgtctggaacccaaagtcctct

SEQ ID NO: 883293 - DNA, 670 bp, Homo sapiens
tcctactcagaaacttcccagtgatatcttcctctattccccaaatcatacttcataataattagcatttctttccagtaaactatcaaccccttaaagttgagaatccttattttgttgaatactgtgttgtctgaatttagcacaattgtaaaatattttctgagaacatgaatacatggattaaacttgtgtctgtttgagcattatactcacctagcctgagtggctgtgatggcacacctctattatcttaagatacttccaagaattaggactgagattgtctctttcctcagccctgatctgtgtgagtctttactagatagagtaggaagcttgcctcttgggaactagattatctgaccagaaattagttctccccaagccatcaatcaaattctttttgcttcttctgagaaagtaaaatgttttatccccttgcaggctgagtgcatattgatatatcatgactatctccacacacatcttggagacacattcccacaccatgattgcttcttttytgtgttccttaactgtaaccacctgattctcttccatgcttgtttgcttgtgtactatggtattctgagcacacaacatggttgtatgctttttttaaaaatattcttgagcaaatgtatttatttattggtatgtgcaatca

SEQ ID NO: 883294 - DNA, 627 bp, Homo sapiens
tctacgagtttgactttttagattccacacgtaagtgacatcaggcagtatgtgtctttttgtccctaggttatttcatttaacataacgtcctccaggttcatacatgttgttgcaatcgagaggattttctttttaaaaaactgaatagtgccattatatatgtgtgtgtatatatacatatacaatatatacacatgtgtatataatatataatcatatataaatgaacactatatatatgtacaccacattttctttattcatccattgatggacactcagtttgcttccatatmttggctattgttaataattctcaaatgaacataagaatgaagacatctcttccagattctgatttcatttcctttggttatatacccagaggtgggactactggatcatatagtagttctatttttagcttttcaggaactccatactgtattccacaatgaaactgcccatttacattctcatcaacagtgtacaagggtgcccttttctccacacctttaccaactcttttttttttgtcattgtgataattgccatcctaacaggtgtggtgatatcttattgtggttttgatttgcatttccctgataattggtggtgttgaac

SEQ ID NO: 883295 - DNA, 646 bp, Homo sapiens
tgctttcctgtgcatttaaattgttttattatatatttggtccactgtttattattgttatctgcatcagggttggtctgataaaagcttcttcaccattgccagaagttttcctaataaaggattctgttttttttkttgttgttgttgtttgtttgtttttggtttgcagtcaagtgggaaaattatgaaaatgctgtgaagttttcatacaggtataattgtatgattcagagaagagtttttttgttcagagagtgtcttaatccaacttatttatattaaaatatcttttctttaaaataaatggtggcacccagatggtttatttgtttgtttggtatctttattagatgaaaagttttcaattgtagtagactgaatagtgtcccccaaaattcatgttcgtctataacctcagggtgtgacctcatttcaatggtatggtatttgcaaaaggaagtagttaaagatcttgagatgaaatcattccggatttaggttgggccttaaatccaatgactggtgtctttataagaaaaaagagggagatttgggcacacagaaatcagaggagaagaccatttgaagaccgaggcagagattcagtgataagccaaggaacactggaaaccaccagaagctg

SEQ ID NO: 883296 - DNA, 610 bp, Homo sapiens
gtaatttataaaggaaagaggtttaattgactcacagttccgcattgctggggaggcctcaggaaacttacaatcatggtggaaggtaaaggagaagcaggcacctttttcacagggcgacaggatccactatctccacctggtcccgaccttgacacgtgagaattatggggattataattgaggtgagatttgtttggggacacaragccaaaccatatcaatcaatataattaatttatttgtatgatgtgtggtagtattcaagagttattcatttctatgtggatatccaaaagttaaccaattaattaatctggtagtataatccctcttttgtccttttcgttctaaattttagaatcggattgccaattcccagacagtaaaggacctcttggaatttgttttgcaattgcacaaaatctatggtcaattttgggataattattatttttacaaattgtagtgttctaatttgggaacatgatatatctgtccatttattatgtttttattttttagtgttatttgatgctattttaaatgtatctttgtaaaaaaaatcactttctaaatttttttgtggtatttaaaatataatcaattt

SEQ ID NO: 883297 - DNA, 719 bp, Homo sapiens
gttaagctgcattcccagggaaaaaaatacggtttggtgggctccagcttatctgagccacaggtgtatgatcctggtactaccacctccccgatggttccttgggggaagttccttaaactccctggggacttcctcatctgcagaagggttgtgacgatgggctggtgtcacaaggctgttgtgagatgagggagttagtacccctggtactcagtgagagcaagctcagttcaccttagctaccacccagccctgcaaaccacctgcgctcctacaactccttgcagtttacaatgcattctcatcttcataactgtttctacttttagcttctcagcaagctgtggggtaggcatttcacagatgagaaaaccgaagagaggctgggagatttgccaaggtcacatggcacktacacagctcagcctcctgactcagtccagcacttttcctgtctctttgctgagatcacagttaccaccttcagtgcagtgtggccccctgggcccaccccaaagctgctgggaagtttgcgaagaaatctgagtcacagaaaaatgaggcatctacttcagatcctataccttggcgtttcacggaatattttggagtgttttatcctaggtagtaaatttgacttcgctgtctgtgaaaaatagatctgtgctgtcaacggtggacactgaatgtccacctggcaaacttatcagttcagt

SEQ ID NO: 883298 - DNA, 719 bp, Homo sapiens
gttaagctgcattcccagggaaaaaaatacggtttggtgggctccagcttatctgagccacaggtgtatgatcctggtactaccacctccccgatggttccttgggggaagttccttaaactccctggggacttcctcatctgcagaagggttgtgacgatgggctggtgtcacaaggctgttgtgagatgagggagttagtacccctggtactcagtgagagcaagctcagttcaccttagctaccacccagccctgcaaaccacctgcgctcctacaactccttgcagtttacaatgcattctcatcttcataactgtttctacttttagcttctcagcaagctgtggggtaggcatttcacagatgagaaaaccgaagagaggctgggagatttgccaaggtcacatggcacgtacacagctcagcctcctgactcagtccagcacttttcctgtctctttgckgagatcacagttaccaccttcagtgcagtgtggccccctgggcccaccccaaagctgctgggaagtttgcgaagaaatctgagtcacagaaaaatgaggcatctacttcagatcctataccttggcgtttcacggaatattttggagtgttttatcctaggtagtaaatttgacttcgctgtctgtgaaaaatagatctgtgctgtcaacggtggacactgaatgtccacctggcaaacttatcagttcagt

SEQ ID NO: 883299 - DNA, 719 bp, Homo sapiens
gttaagctgcattcccagggaaaaaaatacggtttggtgggctccagcttatctgagccacaggtgtatgatcctggtactaccacctccccgatggttccttgggggaagttccttaaactccctggggacttcctcatctgcagaagggttgtgacgatgggctggtgtcacaaggctgttgtgagatgagggagttagtacccctggtactcagtgagagcaagctcagttcaccttagctaccacccagccctgcaaaccacctgcgctcctacaactccttgcagtttacaatgcattctcatcttcataactgtttctacttttagcttctcagcaagctgtggggtaggcatttcacagatgagaaaaccgaagagaggctgggagatttgccaaggtcacatggcacgtacacagctcagcctcctgactcagtccagcacttttcctgtctctttgctgagatcacagttaccaccttsagtgcagtgtggccccctgggcccaccccaaagctgctgggaagtttgcgaagaaatctgagtcacagaaaaatgaggcatctacttcagatcctataccttggcgtttcacggaatattttggagtgttttatcctaggtagtaaatttgacttcgctgtctgtgaaaaatagatctgtgctgtcaacggtggacactgaatgtccacctggcaaacttatcagttcagt

SEQ ID NO: 883300 - DNA, 593 bp, Homo sapiens
agtggctgtggtactactgggccagatgcaaatctggagccaagggtggagactgagctttgcccaagccttcatgatgaatcagcgcattagctcaagaccggggcaggaagtgaaccagggtctgtgtgtctcagacagtcctgagttaattcagacagaactattgtgctctgttcatttatcccttttattcttttttcttttcacggatgggctttagatttccatttgtggcctctcctccttttagatctaggtaaaatggacaaaaaccttccgttttcatggtttctgrtggcttaaaactgtccctaagatgtttgcaagcctccaggcaaagaaggaagtgctggtggaggaggctgtggttgtctttcattcatgctttgatgtcttgtctctaagaggactctttctgcatgtttgtctcttgggcatgcttgatccggctataaaattcagcctcttgcttgatttctatgtacactggaatcatagtgagtttagacttttctggaggcttaggggtaggcaatgaggatgaggagggggtgaccaagagatagaggagagatttacttggtagaaat

SEQ ID NO: 883301 - DNA, 604 bp, Homo sapiens
gggccatggtcagctgcatgagataacatattaactataggctctttgggatatgcacccagatggataaattcaccagatacaaaatcatatcccatcctccttatgatggcttaaagtagccaaacttgttttgtttctgttttgttttgtcatgtaggctgttttctccaaggtcaacctttgtagttcaagattctcaattttgagtccaatctgatgtcaccacttctkcctaatcaatgcagtatctttcacaccaaagatttcctaaggctgtgaattcaatttacgttgccattctgcaacatgcctagttaaatgacatgtttgatttttagcaatgtcagccttgtggctttaaggttattgtatggttgccataaattgtccctgcgtctctgaacttgacttagtctaaaagtttagagacctgatcttgtcatcttctttctgtaagcaaaccagggccttcagaagacttctttccacgccatgaactaacgaaagtctgtgtggtcacctgtgctgcaacaatcaggcacagcagccactggtcacccagggcacttgcttcagcctgcaactcctcataatcaaccag

SEQ ID NO: 883302 - DNA, 604 bp, Homo sapiens
gggccatggtcagctgcatgagataacatattaactataggctctttgggatatgcacccagatggataaattcaccagatacaaaatcatatcccatcctccttatgatggcttaaagtagccaaacttgttttgtttctgttttgttttgtcatgtaggctgttttctccaaggtcaacctttgtagttcaagattctcaattttgagtccaatctgatgtcaccacttctgcctaatcaatgcwgtatctttcacaccaaagatttcctaaggctgtgaattcaatttacgttgccattctgcaacatgcctagttaaatgacatgtttgatttttagcaatgtcagccttgtggctttaaggttattgtatggttgccataaattgtccctgcgtctctgaacttgacttagtctaaaagtttagagacctgatcttgtcatcttctttctgtaagcaaaccagggccttcagaagacttctttccacgccatgaactaacgaaagtctgtgtggtcacctgtgctgcaacaatcaggcacagcagccactggtcacccagggcacttgcttcagcctgcaactcctcataatcaaccag

SEQ ID NO: 883303 - DNA, 604 bp, Homo sapiens
gggccatggtcagctgcatgagataacatattaactataggctctttgggatatgcacccagatggataaattcaccagatacaaaatcatatcccatcctccttatgatggcttaaagtagccaaacttgttttgtttctgttttgttttgtcatgtaggctgttttctccaaggtcaacctttgtagttcaagattctcaattttgagtccaatctgatgtcaccacttctgcctaatcaatgcagtatctttcacaccaaagatttcctaaggctgtgaattcaatttacrttgccattctgcaacatgcctagttaaatgacatgtttgatttttagcaatgtcagccttgtggctttaaggttattgtatggttgccataaattgtccctgcgtctctgaacttgacttagtctaaaagtttagagacctgatcttgtcatcttctttctgtaagcaaaccagggccttcagaagacttctttccacgccatgaactaacgaaagtctgtgtggtcacctgtgctgcaacaatcaggcacagcagccactggtcacccagggcacttgcttcagcctgcaactcctcataatcaaccag

SEQ ID NO: 883304 - DNA, 604 bp, Homo sapiens
gggatcccttcctaggatgcccgggctggcctgctgggaggcggcggggtctcctcctcagggtcctgcactcgggtttcacatcgggtgaaatttctgggctggggctcagcacgcgagaccgctgcctcacgcgggccacacagaccacctccccgcgggccgcagcccctggtcaccggccctcctctcggtgctggggccgcctggagccgctgggagccgagtggccctcggggaggcggcgccgcggtgcccagggtgcggggtccgcctctgtgcgcctgagggcgggggtcgtacaggagctcttcccggggctggtccccgaggcgctgcacctcctaccagcttcctgtgatcgaaaccgaaacctccacctgcgcaaccctcccagatgggcttgaggttggggtgtggccgggacccgggcggggaggggtaggggtggagtgaaggcggggwctgggggggtgcgcgtggacggggagagtggaaccgcgggtgtggacctccaagtatagacgtcagagaacattcgtcgtcctggctcgttggtctaggggtatgattctcgctttgggtgcgagaggtcccgggttca

SEQ ID NO: 883305 - DNA, 541 bp, Homo sapiens
gactgcagaaggcggcaggtcctggatcaccaaggaccttgaaagcatgtggaagactttgatcaatgggggaatcattaaggggttttgcattccggaactatcatcagcttcagcggggggcagggggtaggatagaggcagggaggcaggaagttctcgcagggtccaggcaagagatggtggagtgtggtcctggggaagggggcagtggacggatctgagggaggttcagttaggatgggcaaggattgagatctggctggatcctggtgacaggggagatgaggctggggcccttggaggatggcgtcctggtgctgttaatgcaggtgtgagagtgggaggrggaggagcaggctggcagaaggcaggcacaagtgcaggtctgggcgggagtctgcagcgctctgggctggccacaccggtggggcaagggaggtggaggatcctgccctagagcttggtctcctctgtctgaggtcaggttccccagaggtggggctccagagggaaattcttgtgcaagcagtttctcagg

SEQ ID NO: 883306 - DNA, 542 bp, Homo sapiens
agactgcagaaggcggcaggtcctggatcaccaaggaccttgaaagcatgtggaagactttgatcaatgggggaatcattaaggcattttgcattccggaactatcatcagcttcagcagggggcagggggtaggatagaggcagggaggcaggaagttctcgcagggtccaggcaagagatggtggagtgtggtcctggggaagggggcagtggacggatctgagggaggttcagttaggatgggcaaggattgagatctggctggatcctggtgacaggggagatgaggctggggcccttggaggatggtgtcctggtgctgttaatgcaggtgtgagagtgggaggrggaggagcaggctggcagaaggcaggcatgagtacaggtctgggcgggagtctgcagcgctctgggctggccacacgggtggggcaagggaggtggaggatcctgccctagagcttggtctcctctgtctgaggtcaggttccccagaggtggggctccagagggaaattcttgtgcaagcagtttctcagg

SEQ ID NO: 883307 - DNA, 665 bp, Homo sapiens
gtagcgtagtttcccagcgagccccgcgaggacttccggcgccgggagctcgcggcggaagtgggatctcctgggccgtagtgggcgttgtgtgtttcgggggcgggggcgggggcgggggccggggcggggacggggcctctggccgcctggctccaacatcaagcaccgggctccgagtggccgggatcagcgccccgaggcagaggccggagggcgcgcgcactgctaggaagtgctggtcccccgcgcckctctgccagcttggtcccccggcagacgccccctgtacgatcgccgctcgccccgcgggcgaggctgcggtggacagcgcggggctccggctggctcgccttcccgcctgccgtgtcctgctgagcgaccctggtgagtcctggccctcttcgaggaaagtcttcttcgaagtcaccagaggatgagaatggtgcgcgcacctttcaggggtcttgtgaggagcagaataaataaagtgcttaggatggactaaagaattggaaacaacccgaatgcatcactcgagtattgattaagaaactagagcatatccataccgcggaagctcatagtgccgctaatgtctgtgcagtaaggtctcatttatgtagaaacacatcaagcaccttttctccccgctatggatgact

SEQ ID NO: 883308 - DNA, 601 bp, Homo sapiens
tactaaaatctataccttttaaattttaatgtaaactcaatgtaaaaatcaacttctccttttacaccagcctggatttgagctgaagctcaaatggtcacagaaggctgctgaagttgtcttaagcaaggtctggctcagagctgtctcttccttgccttcttctgggagtagctcctccagtgtgctggagtggaagaaacgtgagcctacagactgagtgtcttggcttaactgttcttgtgatcctctctcttactgccattacttctctctctaacactgactggcctttgataaactccaggtcaccatgaggtggcaaattttcacatgctggtgaaagagcccagcaagtgactgaagcttaaagkctactttaatcacctcctgaaagctctggtagaatgccccggttgctaaaactgtaacctttatgtgagggataacctctttgggattgttatttttctataaacttgagataggcttatatttatttaagaatactttcatgcagttatattacccagtacccatctctctttgcttaaatctttcatactaagatttataccagcttttaaagttcaagatagaa

SEQ ID NO: 883309 - DNA, 519 bp, Homo sapiens
gcttcatgtgaaacaagttttgcttttactgggtgtttctcttcatgtggcccagggcaaggtattgcaactatttcatgctgaactttaaaactcaacggtttgcggccgggagtggtggctcacgcctgtaatctcaacactttgggaggccgaggagggcggaatacgaggtcaggagattgagaccttcctggctaacatggtgaaaccccgtctctactaaaaataaaaaaaaattagctgggcgtggtggcgggtgcctgtarttccagctactcgggaggctgaggcaggagaatggcatgaacccgggaggcagagcttgcatctcgccactgcactccagcctgggcgacagaccgagactccgtctcaaaaaaaaaaaaaaaaaaaaaaccaaaaaacacgcaactgtttccaagaggtttcttttttgacctcagttcttcagttgctactggagtcatgaaactctcatgtcacttctttaatgtaggtttgacttcggtctgtcat

SEQ ID NO: 883310 - DNA, 620 bp, Homo sapiens
gtgtttccccttgatgattaaaatgttccatgggctgggaattctgtgcactagacgttgtctgcacttgatttctatcattcaacaagatacttttttttaaattggtgaactgaaaatacttccaattgtatatttcctttctgttctcattgcaaaagtattcaatcaatgaggaaattaatcataatgaggaaactgactgaatataatggcatagctataaatttatataaaaatatattttttamtatgtaggttcttcaaacgaagttacacccagtcattctatgaatgagagaaaactggatttgttcttgtgaagccaatttagacttaggttggcttaaatttactttttatttaatccatgtgctactccttaaattatcaacatatagcaactcaaaagaatacgtttgcattaatttatgatgccttggtaaagagtttggtctttgcttttctttcaagctggagccatcgcatgaatatttacactttaaaattcacaaaaggacattctcacaggttcgctggagcttaatgagtagttaatatatctgcaccgaagtgacaggtaaggaaatgtaagttttatgtaatgtttccattttgga

SEQ ID NO: 883311 - DNA, 620 bp, Homo sapiens
gtgtttccccttgatgattaaaatgttccatgggctgggaattctgtgcactagacgttgtctgcacttgatttctatcattcaacaagatacttttttttaaattggtgaactgaaaatacttccaattgtatatttcctttctgttctcattgcaaaagtattcaatcaatgaggaaattaatcataatgaggaaactgactgaatataatggcatagctataaatttatataaaaatatattttttactatgtaggttcttcaaaygaagttacacccagtcattctatgaatgagagaaaactggatttgttcttgtgaagccaatttagacttaggttggcttaaatttactttttatttaatccatgtgctactccttaaattatcaacatatagcaactcaaaagaatacgtttgcattaatttatgatgccttggtaaagagtttggtctttgcttttctttcaagctggagccatcgcatgaatatttacactttaaaattcacaaaaggacattctcacaggttcgctggagcttaatgagtagttaatatatctgcaccgaagtgacaggtaaggaaatgtaagttttatgtaatgtttccattttgga

SEQ ID NO: 883312 - DNA, 592 bp, Homo sapiens
ctctgcctaggatggctatttctaccaatcacgttaaagtgactaacagaatgtttaaatttcttcaacgtaaatgatagcttatggatagcaactattaatgggcattttgtttttttgtttctgggtttttgttgttgtttttaattaattaattttattttatcttwtttctttttagaagcaccgtctcacttgtcacacaagctggagagcagtggcatgatcatagattactgcaatctagacctcctggcctcaagctattcttccacttcagcctcccaaagtgctaggattacaggcatgagccaccacacctggccaaatatttagctttttaaaagaaaagagttggtcattatttgtaaagaaatctgcccattcccttagtaaaatcagccaggtcagttaccggttcagggattaaaataaataatttgtagttgtgttataatagacactattttccagggtcggcaatggtaaacaaccattagaaacagaaacttcgagcaccctgccatagtgaaatgtggccctctgtggtaaattaaagatggccacaaatattttcctatgttttatattg

SEQ ID NO: 883313 - DNA, 593 bp, Homo sapiens
ttacatctaatttttatcttgattgaattcagcattaataaatttgaatttttttcactaaaatattatttggcctatgaatatcctggcaaaaaccaaccacataagactaggtttttatcaatttataaacaaataggttgattttgaaaaagttatctttttaagtatctacaaggaatttagaaaatgcaaaatatcttataaatttgaaggttgatatagtagattcactttaactctttctacaggaaactttytcagaatatgaatcaataaaataaataaaaagtgtttacttctgtatcttatgtagaaattattactaaggtaggaatgaatcctctcttaatagtccatacaatcactttattcaatcacttatatatttaccaagaaaactacaaatcttatactttgtatacaggaaagactgttaaagtatgagatatacccatattgtaatctatttaagaaaacaaaactaaattatgaaaaaataatcaactttgtgatattgccctatgtaaaatttcttctacttcacagtctatatactacagcttctctataaaaaactctctcagctcttc

SEQ ID NO: 883314 - DNA, 590 bp, Homo sapiens
gcttataaaaaattgaggaaagtacaatcattgagtgataataattttgcctagaagaggcatttagaaccatttatatttataatgcagctaacattttgactggtgtattaatatcatccagagaaacagaaacayatatacacacacacatatatatacagatgtgtatgtatattacatacacatgtttatatatacacagctgtatatatacatatatacatgtgtgtatgtatatgtatatatataggcacatatagcctattgataattctggagagagaaagagagagagagattttaaggaattagattacaaaattgtgagagctagcaattccaaaatctgaaggataggctagcacgctgaagacccaggtaagagttgatgctgcagtttgagtttgaaggcagttttctgttaaggccttcaactaattggatgaggcctaccaacaaaatggaatgtaatctgctttggaatgtaatggaatgtaattgctcaaactcagctgttttaaatgttaatcttatctaaaaaataccttcataatacatgcagaatcatgtttgaccaaatatctggg

SEQ ID NO: 883315 - DNA, 590 bp, Homo sapiens
gcttataaaaaattgaggaaagtacaatcattgagtgataataattttgcctagaagaggcatttagaaccatttatatttataatgcagctaacattttgactggtgtattaatatcatccagagaaacagaaacacatatacacacacacatatatatacagatgtgtatgtatattayatacacatgtttatatatacacagctgtatatatacatatatacatgtgtgtatgtatatgtatatatataggcacatatagcctattgataattctggagagagaaagagagagagagattttaaggaattagattacaaaattgtgagagctagcaattccaaaatctgaaggataggctagcacgctgaagacccaggtaagagttgatgctgcagtttgagtttgaaggcagttttctgttaaggccttcaactaattggatgaggcctaccaacaaaatggaatgtaatctgctttggaatgtaatggaatgtaattgctcaaactcagctgttttaaatgttaatcttatctaaaaaataccttcataatacatgcagaatcatgtttgaccaaatatctggg

SEQ ID NO: 883316 - DNA, 678 bp, Homo sapiens
tcctatcacatcaccaggctgcaaactttccaagcttttgttctctgcttcttcttaaatgttttgcccctaggaaatttcttctgccagataccctaaatcatctttctcaaattcaaagctacacagatatctagggcaggggcaaaatgccaccaatctctttgttaagcatagcaagagtracctttactccagttcccaagaagttcctcatctccatctgagaccacctcagcctggactttattgtccaaatcactaacagcattttgatcaaagccattcaccaagtctctaggaagtttgaaactttcccacatctttctgtcttatgaacccttcaagtccctaagaagtttcaaactttaccatattttcctgtgtttttgtgagtcctctaaactgttccaacctctgcctgttacctagctccaaagttgcttccacatttttggttatctttacagaagcaccccactcctgataccaacttactacattaatttgttctcatgctgctatgaagaaatacctgaggctggatgacttataaagaaaagaggtttaattgacttacagttctgcatggcttggaggtctcaggaaacttacaatcatggaggaagacacctcttcacagggtggcaggagagaaaaatgagttcaagcaaggga

SEQ ID NO: 883317 - DNA, 637 bp, Homo sapiens
aaagtagaaaatacccttcttggcattggccttggcaaagaatttctggtcatgtcttcaaaagtaattgcaataaaaacaaatgcagacaagtgggacctaattaaactaaagcacttctgcacagcaaaggaaagtataaatagagtaaataggaacccacagaattggagaaaatattcaaaactatgcacctgcaaatgtctaatatccagaatctacaagcaactaaaaaaaaaacaagcaaaaaacaaataactttattaaacaataggcaaaggatatgaatagacacttctcaaaagatgacatacaagtggycactaacatatgaaaaaatgccccacatctctattcatcagggaaatgcaaatcaaaaccacaatgagatgccatgtcaaccagtcagaatagttattattaaaaactaaaatatgacaaatgctagttaggttgtagagaaaaatgaacatttatacattgttggtggaaatgtaagctaattcagccactgtggaaagcagtttggagatttcttaaagaacttaaaacatccatttgactcagcaatgtcattactcagtatataccaaagaaaagtagatcattctaccaaaaagacacttgcactgacatg

SEQ ID NO: 883318 - DNA, 592 bp, Homo sapiens
tgacttattttcctctggagagatacccaatagtgggattgctggattaaatggtagttctacttttaattcttcaaggaatctctacactgttttccacagtggctgtactactttacattcccactagcagtgtagaagtgttccctgttcactgcatccacgtcaacatctactgttttttgattttttgtttatggccattcttgcaggagtaaggtgatatcacattgtggttttgatttgcatttctctgatcattagtgatgttgagcattttttcatatgtttgttggccatttgtataccttcttctcagaattgtttattgatatccttagtccactttttgatgggattgktttttacttactgatttgtttgagttcattgcagattctggatattactccttcatcagatgtatacatcatgaagattttctcccactctgcgggttgtctgtttactctgctgactgttccttttaccatgcaaaagagttttagtttaattaggccccagctatttatctttatttttattgcatttgcttttgggttctttgtcatgaaatctttgcctaacccaa

SEQ ID NO: 883319 - DNA, 627 bp, Homo sapiens
gaatgacactaattaaaatccgtatatttactcatttgaatcttgacaatcattcttatttagatgaacctcattcaaatagttaatatttaacatgttttcttcaggaatttttattagcaatgagaatgttaattgaggatggctgggctggctgggcttacattccataagaattgtacccttttattgaatatttaaactaagtttaagtatatataaaagaacagatattgcaacatgtttctggtattaatttccaaaaaacttttttatacgtgaaattatgaaatggtacttcctatagtctagtactaaarataaaaaaaagtcttttatcattcttactgcataaaaatgctttagtgcgtattgttaagaagaataaaccaatccactttagtttccttatccctgtgactcatttatgcacttgatatttctcagtgtagccctacaacaatgtctttaaattatgtaattttctatgaattcaacaaaagaaacctaaaagttgactctgagcattttcttggccttcctcattttgtggttgattgtggcctacataatttccctgaaatgagtcagcttccttccaaatagtttaggattccaagccctcta

SEQ ID NO: 883320 - DNA, 638 bp, Homo sapiens
tggtcctgggcttttatttggttggtaagctatttattactgattcagttttagagatcattgcaggtgtgttcaggaatttagtttctttctggttcagtcttgggagggtgtatgtgtcctttatcaggactttttgttaagacttcactcacatgcctggtctcttaatggggcagttgaaggctggcctctgatgaatgggcttctgtctctctaaatgtagtcttacagcctttccataaagtcccttagcagagaagtcagactaccctttgagtgtatagagactacattgcagcttaggtcttctatatatcaaagcagaaactgcaaatcctctttgaagctagatctgaaactggcataacttcattttctctacattcarctgatgaaaggcatcacaggtcagtctagttcaagaagaggaaatagttcaaatcttgtactggaagattatgaaggaatttacagatttttttttttttttttgagacagagtctcgctctatcatccaggctggagtgcagtggtgcaatctcagctcattgcaagctccgcctcccaggttcatgccattctcctgcctcagcctcccaagtagctgggactacaggtgcctgccaccacgccc

SEQ ID NO: 883321 - DNA, 638 bp, Homo sapiens
tggtcctgggcttttatttggttggtaagctatttattactgattcagttttagagatcattgcaggtgtgttcaggaatttagtttctttctggttcagtcttgggagggtgtatgtgtcctttatcaggactttttgttaagacttcactcacatgcctggtctcttaatggggcagttgaaggctggcctctgatgaatgggcttctgtctctctaaatgtagtcttacagcctttccataaagtcccttagcagagaagtcagactaccctttgagtgtatagagactacattgcagcttaggtcttctatatatcaaagcagaaactgcaaatcctctttgaagctagatctgaaactggcataacttcattttctctacattcagctgatkaaaggcatcacaggtcagtctagttcaagaagaggaaatagttcaaatcttgtactggaagattatgaaggaatttacagatttttttttttttttttgagacagagtctcgctctatcatccaggctggagtgcagtggtgcaatctcagctcattgcaagctccgcctcccaggttcatgccattctcctgcctcagcctcccaagtagctgggactacaggtgcctgccaccacgccc

SEQ ID NO: 883322 - DNA, 653 bp, Homo sapiens
tcttctctccaagtcattctccatgctatcgtcagagatccagtccctctccgtattgagcaactagtacctttgtcattgtatgagccatactccaagataggtctttcttgacccatttaatagatgagatgaatgaagcttaaagaagtaatctgtgcaaggtcacaaaagtagttagtgggaaactatctcarcttactctacctcaaaaacatcttcagtaggcccagcccggtggctcacacctgtaatcccagcactttgggaggccgaggaaggcagatcacgagatcatccgatcgagaccatcctggctaacacagtgaaaccctgtctctactaaaaatacaaaaaattagccagacgcgttggcgggcgcctgtagtcccagctactcaggaggctgaggcaggagaatggcgtgaacccgggaggtggagcttgcagtgagccgagatggcgccactgcactccagcctgggtgacagagcaagactccctctcaaaaaaaaaaaaaaatcttcagtagtaactcattctatatagagtatctgaaaggctcccagtacgacctgattccaaactacatttcaacctgaatttccactatttctctttaatactttatgctcaacccatgtaaacagctc

SEQ ID NO: 883323 - DNA, 653 bp, Homo sapiens
tcttctctccaagtcattctccatgctatcgtcagagatccagtccctctccgtattgagcaactagtacctttgtcattgtatgagccatactccaagataggtctttcttgacccatttaatagatgagatgaatgaagcttaaagaagtaatctgtgcaaggtcacaaaagtagttagtgggaaactatctcaacttactctacctcaaaaacatcttcagtaggcccagcccggtggctcacacctgtaatcccagcactytgggaggccgaggaaggcagatcacgagatcatccgatcgagaccatcctggctaacacagtgaaaccctgtctctactaaaaatacaaaaaattagccagacgcgttggcgggcgcctgtagtcccagctactcaggaggctgaggcaggagaatggcgtgaacccgggaggtggagcttgcagtgagccgagatggcgccactgcactccagcctgggtgacagagcaagactccctctcaaaaaaaaaaaaaaatcttcagtagtaactcattctatatagagtatctgaaaggctcccagtacgacctgattccaaactacatttcaacctgaatttccactatttctctttaatactttatgctcaacccatgtaaacagctc

SEQ ID NO: 883324 - DNA, 653 bp, Homo sapiens
tcttctctccaagtcattctccatgctatcgtcagagatccagtccctctccgtattgagcaactagtacctttgtcattgtatgagccatactccaagataggtctttcttgacccatttaatagatgagatgaatgaagcttaaagaagtaatctgtgcaaggtcacaaaagtagttagtgggaaactatctcaacttactctacctcaaaaacatcttcagtaggcccagcccggtggctcacacctgtaatcccagcactttgggaggccgaggaaggcagatcacgagrtcatccgatcgagaccatcctggctaacacagtgaaaccctgtctctactaaaaatacaaaaaattagccagacgcgttggcgggcgcctgtagtcccagctactcaggaggctgaggcaggagaatggcgtgaacccgggaggtggagcttgcagtgagccgagatggcgccactgcactccagcctgggtgacagagcaagactccctctcaaaaaaaaaaaaaaatcttcagtagtaactcattctatatagagtatctgaaaggctcccagtacgacctgattccaaactacatttcaacctgaatttccactatttctctttaatactttatgctcaacccatgtaaacagctc

SEQ ID NO: 883325 - DNA, 552 bp, Homo sapiens
aaaaaaaaatggcgattaacaatttcccatacacttgcaaacatttatgacatgttctttcatcattccttgtgaatgaaatatgaaaatatagaaaatcctaccatttatttaaccccaaattactccagtcagattccttttatgaagattacagtgcagataaaaatataaaaagcttgagggcagtaaggatgctatataattctacctgtagatctttcctttcctaagtagtattaatcatttgtgctgtacttcatatacagacctcaygaagtcaatctccctgcctctttgcacattgctttgctttgactagatgtggacttgtgactaggtcttcctgatgaagtttgagggtagggggagactccaagctcccttttattctagcatgtcaatcagcaaaatcggcagcaagaagagactgacatgagtagaaccatgcttctctcaatatgagattgacattagcttacataggaaataatagatagtattttaagtcactcaagactttgaggttgcttattgaagcacaatggaaat

SEQ ID NO: 883326 - DNA, 616 bp, Homo sapiens
cattcttttctccaaatgtctagaaatatccagtttctcaaatatttttgacccatctttatcaacttaactggtctgtcattaatcagttgaatacatttttggcacatgtctattctgtttctatgtgaatctttttttaactttttgaaattttactttgaaaacaatgcctatgtacattgccaaactatgttaaaatgaaaagggacaattttctcacatcttaacaggcaatatacacaggcattcaaaagattctaatctatttaactatttattattatattgataagagcatttttgatgtacgtgcatcactgttttatttttcatgtatttcaatataatttaaaacatcattttatcttttttatraaaaattagatttagtattcacaaggatgagaaagaagttttacagtcttactgggtaaccaatattcactcatagatatctaagaaaagcattgctataatcaggtcataaacaatcatttagtcaacacgtccatggctctgcttcagtggcccaagtctatctgggagtcataagcaaggggttcccgacatgcttcattttgggatgaagaggaaacatttttctagtttgggc

SEQ ID NO: 883327 - DNA, 616 bp, Homo sapiens
cattcttttctccaaatgtctagaaatatccagtttctcaaatatttttgacccatctttatcaacttaactggtctgtcattaatcagttgaatacatttttggcacatgtctattctgtttctatgtgaatctttttttaactttttgaaattttactttgaaaacaatgcctatgtacattgccaaactatgttaaaatgaaaagggacaattttctcacatcttaacaggcaatatacacaggcattcaaaagattctaatctatttaactatttattattatattgataagagcatttttgatgtacgtgcatcactgttttatttttcatgtatttcaatataatttaaaacatcattttatcttttttataaaaaattagatttagtattcacaaggatgagaaagragttttacagtcttactgggtaaccaatattcactcatagatatctaagaaaagcattgctataatcaggtcataaacaatcatttagtcaacacgtccatggctctgcttcagtggcccaagtctatctgggagtcataagcaaggggttcccgacatgcttcattttgggatgaagaggaaacatttttctagtttgggc

SEQ ID NO: 883328 - DNA, 562 bp, Homo sapiens
cccacagcatgggcgaaaatattcacaaacaatatgttcaagaaaagtctcatatctggaatctataaggaacttaaacaattaaacaagcaaaaaaygaataacttaattttaataatgagcaaaaccatgaacagatacttctcaaaagaagacatacaagtggctaacaaacatgaaaaaaaatgctcgtaatcactgatctcagagaaatgtaaatcaaaaccaaaatgagatatcgtctcacactagccagagtggctattattaaagaactccaaaaatgtttagtaatatcttttattgaaaagttcctgccaaggctatagaaaaaggggaatgtttatacactgttggtgggaatgtaagttagttcagccactggggaaagtagtttggagatttctcaaagagcttaaaacagaactaccatttgacttaataatcccatttctggttatatatccataagaaaataaactattctaccaaaaagacacatagacttgtatgttcattgtagcactgttcccaatagcaaagatatggaatcaacctaagt

SEQ ID NO: 883329 - DNA, 562 bp, Homo sapiens
cccacagcatgggcgaaaatattcacaaacaatatgttcaagaaaagtctcatatctggaatctataaggaacttaaacaattaaacaagcaaaaaatgaataacttaattttaawaatgagcaaaaccatgaacagatacttctcaaaagaagacatacaagtggctaacaaacatgaaaaaaaatgctcgtaatcactgatctcagagaaatgtaaatcaaaaccaaaatgagatatcgtctcacactagccagagtggctattattaaagaactccaaaaatgtttagtaatatcttttattgaaaagttcctgccaaggctatagaaaaaggggaatgtttatacactgttggtgggaatgtaagttagttcagccactggggaaagtagtttggagatttctcaaagagcttaaaacagaactaccatttgacttaataatcccatttctggttatatatccataagaaaataaactattctaccaaaaagacacatagacttgtatgttcattgtagcactgttcccaatagcaaagatatggaatcaacctaagt

SEQ ID NO: 883330 - DNA, 656 bp, Homo sapiens
gggcatatgtgctgctttgttacttggatatattgtctgatgttaaggtttggggtataagtgatcccatttaccaaggtactacacatagtacacaaaagcaggtttttcaacccttgcctctactcctccttcactccacctgctagctgtacccagtgtctatttttgccatctttacgtttatgagtayctaatatttagctccaatttataattgagaaaagactgtatttggttttctgttactgcattaatctgcttaggataatggcctccagctacatctgtgttgctgcaaaggacatgattttgttatttttatggctgtgtagtgttccatcatgtatatgtgccatgttttctttatccattccaccattagtgggcacctaggttgatttcatggctgctattgtgaataggactgcgaggaacatatgagagcctatgtattattgctaaaacaatttgttttcttttggatacataaccagtaatgggattgctgggtcaaatcgtaattcccttttaaagtctttaaaaaatctccaaactactttccatagtggctgaactaatttagatttccactgaaagtgtgcaagcattcccttttctccatagccttgccagcatctgttattttttgatgt

SEQ ID NO: 883331 - DNA, 641 bp, Homo sapiens
cacagtctacatgaacttcttcactgtcacatttcaattaatgtccatacgtagtacttgataaatatctgtctccaacccatccctttttctttgacactccaaattcacatctctgaagctatgtcttcgaatgtaattgtcacaaaccaaattcatactctactactccatttctgctcttcctcctttctttcttatctatgattcttatggtaacagtgcaaaggctgggagaggaaaaatagaaatgtattaatgtaaagttgtcatactactcttgaagtgatataataccactttctgttagactccaataygttgaaggtttatgctataagcactaaggtaaccaaaagatgctgcagactattatagcatctcttcaaacagacttcacagaaacttgcaagcagcctgtgtctatgacatcagttggcatgagcaacaggtttttgattttggagaactatgtttacctgacactgcaacaaaacaaaagcagctatacatgataggaatgaatacaaatattaacaactgataccattgaatttttggagggtgaggagcccctcaagacaaatagagactttcaattttaaaagagcagatattgtgtttgttcccctgacttattt

SEQ ID NO: 883332 - DNA, 534 bp, Homo sapiens
tctgtggacaccattcagcctctttccccagccacctctgtcatagcccagtggtcccatgaacaaagtggccatggtggcagggatggagtttacatatgggctcagcaacatggacttccactcaccaaggctaacctggctatggcaactgctgagtgcccagttttccaaaagcagagaccagcactgagccctcaatatggcatcatttctcagggtgatcagccagctacttggtggcaggttgattatattggacctcttccatcatggaaarggaagaggtttgtcctcactagaatagacacttactgggtttgcctattctgcaaccagtgcttctgcgaagactaccatctgtgggctcacggaatgccttatccaccatcatgatattccacacagcattgcctctgaccaaggcactcactttacggctaaagcagtgtggcagtgggctcatgctcatggaattcactagccttaccatgttccccatcatcctgaagaggctggattgatgaacgggag

SEQ ID NO: 883333 - DNA, 641 bp, Homo sapiens
taattttaattatcacttgtctaccctcttctttacagtgtttttacatgtgggccactttgttaagtgactaagcaaagcctgagccaccagatgctgacttgcaggaaaaaaatgaacttaatgtactccagtaaatccagtggtaaaatttgccacrgccaggtcttatagtacaacatattaaacaggaatctgtgtctaagatattcaaaattattttaaatttttagtaaaatcagcagagaataaccatgaaataaaaaaaaaatggaagcaaatataaccacatcataaacaaaatgtactcttcctccaaaccttccatggtaattaattttatgtgtcatcttaactagattatggtgcccagttggttggtaaaaccctagtctacacattgctgcacagtattttttagatgtgattaacatctacaattggctggctttaagtaaagcagattacactccataatgtgagtgggcctcatccaatcagttgaaggccttgagagtagagactgaggtttcccaaagtagaagaattctgtctccagattgtcacaaggaaattctgcctgagtttccaccctgagtttccacccttcagactcaagaatgcaatatcaactcttatct

SEQ ID NO: 883334 - DNA, 664 bp, Homo sapiens
cacatctttccaccatgttactaaagtcctgttcacagtagtttctttaactctatccatcgtgtccagctatcaagaaaaaaattacaagctgtcctaaaagacaaaaagcataatttgaagggacagaggaagtattagaaccagactcagatatggccaggatgttagaattatcagatcaatgattttaaacaacaataaataatgtgctaagggatctaatggataaagtaaatartatgcagggacagacagatgatgtaatcagagagatggaaattccaaaaaaagaccaaaaagaaatatcagtgatcaatcatactataacagaattgaagaatgtatttgatgggcttattagtagactaaaattggccgtagaaaaatctttgagcctgtggatatctcaatagaaacctccaaaacagaaaatcaaagaaaagaaaaactgacaggaacagaacagaatatccaagggctaggaaaactacaaaaggtgtaacatgtgtgtaatgcaaataccagaagaataagaaagagagaaagggacagaataagtatttgaaataataatgactgaaaatttccccaaattaatatcagacactaaacccaccaatccaggaagctctgagaacactaaggaagataaatacacccc

SEQ ID NO: 883335 - DNA, 629 bp, Homo sapiens
cttaacatggtgtctgagacttcaagtcttcatgcatcctcttcttttctaggttcttatcacatgctcctctttgtgattccctaactttgagctgttctggtatgtttcaaagcatttacatgtgctagttcctctgggtctcatgccttcattcctactctgtcttgaaagtttctgttccttctcagtcctgctcctcaatgaaatcttcctcggtggtatccagacagattgagctggtcccattataggagtttcaatgaaactagtaaaatgtattctgctttcaagtacattataaatggttgtttacatgtttgtctctcttgttaaatgatgtctttttagggaagagctctcagcttgactgtctatgtcaaagtatggatcatgtggaacaaataaaagcaatgggggtaggcaaacctagatgagacttcgggcttcccctgcccagtgtgcgaccttagtaaaastaattaatttctcagaaattcagttttctcctttaaaaaaatgttacttcggatgggtcagcaattgacaaataaaatttttatttctgaataaaataaagtgttaaagaagtaaatgacaaaaaaaaatgtggggtgtatgtgtaattg

SEQ ID NO: 883336 - DNA, 675 bp, Homo sapiens
ataaagaatcctcatcccacatggtcatgcaccctgccggccatcccatctttgggaagggtcagactgcattcctgggatgtttgaggtcattatgagacgttggtttttgttcccatccacacccattatgaaggaaaatagtgttcaaattcagttyaaacagtgttcaaaaactaaccctttacaacacagagctccatctattcttgagcttgaaaatagtcttccaggtaatttcatagcaatagcttgattcctaaagagtgcaggaaactcatcttactttatttttaatattgaggaattatcatttgctgccctcaatagctaggtaaaatagctaagaaattaggagtgaggcattttccttctaatctgagagagaagatatgccgtggatacaaaagatgatcactgcaaggagcacatacttatgtaactcaggttgactcataatatgtcattttgctttgttgggattagtgtatagaaagttaagcgacactattccatgtactttgttaatcggggatagtaagtgaaatatcacattctacctgtttatctccttaaacatattcctatttcatattcaaagggacatggtaagagaactaaaccatggtcaacatttgcagtaggaagaataggtacttttagctttagactctc

SEQ ID NO: 883337 - DNA, 651 bp, Homo sapiens
ctattaaaaaatgtttctgatttttgagtgtttgcctcccaaaaaacactttagaagttttttcagaaacacaacttaatgggttaatcctgctaccaaaacagactctcttgggattcacaggctgagaatccaaacttttaccaaacatgatttcttataaagaygtcttatagcttactgagagaaaccatttggggaacactgcaaaaatacagtgtagtagaatctggggagcaactttgttcagaattttgggctatggtatttcaggaatttaaaaaaaaacaaagcattagaataaaagtctaaatggactccctctttggccagggcactctaaaatgtaacctgaaagactggttcaggccatgatgagaagtggggttcagacatgcctcatcatacccttccagcagtaacatcaatgcctaccttaagtctgataagaaacatttacaattctctctaaagcctgctacttggaggcttcatctttaggataaaaccttggtgtcttcaacccctaatcatagcaaagacatctctttctactgataataactctttcaaccaattgccaatcagaatatatttatatctacctatgacctggaagccccctgcttcaagttgtcctgtcctttcaga

SEQ ID NO: 883338 - DNA, 583 bp, Homo sapiens
taacgcttttattttcagtgactgtcattttaatttttttctccagttccctagtttctatgagaatttggtcttgctaataagattttctccaattatgaaatttgtcaacaacatagattcttgaaaagtaattataatcctttacttaaaatttttattgtttcctttaaaatgtcttctgcatagtaaaattcaaaatcaaatatctgtcaaagaggtgagtgtgccttattacctcaaagaygttaaattgcttttgcaaattactttctcattctcttttctagtctcatcttaattctccatggttttaatagcaggtgctcttgctggcttcatttggtttattgctttgtctaaaaatagttttcatagcttaaataggcttgcaaatttgattctttctaataatttcacttataagcagtcacattttctctctgaaaaataatttaatatttatattgccagttgggctaggtttggtttttaagttgtgcatttgtttccatttgaaactactattgttaataatcaacattggctgaggcaagatgtagtagacgccacccttaccaat

SEQ ID NO: 883339 - DNA, 592 bp, Homo sapiens
aacctagctatgttgtgatgggggagaagcagggagcacctatatgtttttattgagtagtgataaaaaaactatactaaattgttggctaggagacaacataactcatttcctttttttcctatgaatattccaggaatatttccacatacccatggcaaaatgcacttggaaatgatcagtaaatccagatatttgtatgtaagctcaaataatttttactaactgcttacattctgcaggcacactagctgtgacaaattgatggtctggtaggaagtaytctgggggaactttaagactgctctcagggacaaggcctgaatgcaggattcttgacaaatatcccttagccagaaaagggtgatcaacagtttatgtggtgagcagattcttaatattattaaatttttctctaccaagaaacatctcatggaggaaaaataatgggctctctgatacagtttggatgtctgtccctgaaatctcatgttgaaatgtaatctccagtgttggaggtggggcctggtgggaggtgtttggatcatgggggctgatgcctcatgaatggcttggtgccatcctcttgttg

SEQ ID NO: 883340 - DNA, 592 bp, Homo sapiens
aacctagctatgttgtgatgggggagaagcagggagcacctatatgtttttattgagtagtgataaaaaaactatactaaattgttggctaggagacaacataactcatttcctttttttcctatgaatattccaggaatatttccacatacccatggcaaaatgcacttggaaatgatcagtaaatccagatatttgtatgtaagctcaaataatttttactaactgcttacattctgcaggcacactagctgtgacaaattgatggtctggtaggaagtactctgggggaactttaagactgctctcagggacaaggcctgaatgcaggattcttgacaaatatcccttagccagaaaagggtgatcaacagtttatgtggtgagcagattcttaatattattaaatttttctctaccaagaaacatctcatggrggaaaaataatgggctctctgatacagtttggatgtctgtccctgaaatctcatgttgaaatgtaatctccagtgttggaggtggggcctggtgggaggtgtttggatcatgggggctgatgcctcatgaatggcttggtgccatcctcttgttg

SEQ ID NO: 883341 - DNA, 670 bp, Homo sapiens
aagtttcagtgtgttataaagattttttcttctaccagattgcatcttccttgaaggccagacccatgtctgattcataytatctccatgtgtctagtagatttctctctataaattagctatcaaatatttgttgaatgcagaacccatatgccatccttttgcaaattagaaataaaagcatgcattctccagaacgtgtttcttaaagcacctgcctctcttgtgtcctttttgaaattaatcacatgaattcagaaatgagaagggatagttttatgttaggtcttttgtaggaaagtaatgcactgtgtcaaagtttcttaaattcaggcttaaccactggactgaatcataagtacaaaatgtgccatgggattaaaggtcttattttttactgtactaaaaaataaataacagtttggtaaaatggtgtaattatagtttcttctagtatttggatattaaattagagggtaccataattcaggaatgatggccttttctttatctgaatgtgtctagatagagggccctgtgttttgctgaagactgtaattgttagtgtacttataataattctctagtcactcatcatcagcacctaaacagcttgccttggaaagttatgaaatcccggagttaatgaccacgcttaaattttggccaa

SEQ ID NO: 883342 - DNA, 603 bp, Homo sapiens
actaactttcaggaatttaaaaaatgtggaaggatgatgctatggattgaaatatgtcctccctaaattcatatgttgaaactccaatccccagtataaaacgcagcaagaagggggccatcagcaggccaggaagagagccctcacaaaaaacggaatcagccagcaccttgatctcggacttcccagcctccagcatcatgaaaaaataaagatttgttgtttaagtcacccagtctatcatattttgttatggcagcccaagcaaacctatgcagcygggtcaagtattttatatatatattataggagaatacatgctttgagtcatatagaacaggatattaacaccaactctaaattgctatttgtagatttggggaaacactccaaacttcagttttctaaattaaataagtacagtattttcttcattattgggctttttttttttttttttttttttgagatggatttttgctcttgttgcccaggctggagtgcaatggcacaatctcggctcactgcaacctctgcctcccgggttcaagcgactctcctgcctcagcctcccaactagctgggattatgggcatgaaccac

SEQ ID NO: 883343 - DNA, 631 bp, Homo sapiens
ctcagttgcctcagttgtcagtgcaggattcacttgtttttgttcttcttggtggaagcccctaaccacagttgtttctagttggccattttagtccctcctcatttttaaaaaggagttgtttgtcttttgttgttgagttaaaagagttctttataaattctgcctataggctcttattagatacatgatttgcgaatatctgctcccattttgtaggttgtattgtcactctttgtagtgtgctctgatgcataaagggattttcagttttgatgaagtctaatttatttattttttttgcttttgttgtttgtgctttcaatgtcrtatctaacaatgcattgttaagcctaagattatgacgattaaccttctaaggttttaagagttttgtagtttttattctatttaggtcattaatcagctttgagttaatatttatatatatgaaatcaaggaacagctttattctttggtatgtagatatctggttgtcccaacacagtttattgaagaaactatatttccccattaaatggttttgacacccttattgaaaagtaattgtgcatagatgtatatgtttatttctggactcccaatttcattccattagtctatgtgttta

SEQ ID NO: 883344 - DNA, 586 bp, Homo sapiens
attgccattaggatcaacatggaacactcaaacaatggttctgttattaattcagaaacatccaacccacttatgagttaaagcaagatattaggcacagatctatgagctattaatattgtctgttttaataaaacatatcagagcttacactaacaaaagttgttgcttcaaggttgtagacaccttagtaagctagacaatttagtaaactccaaaactgtcattgccccattctccaaccattttaaatgttgtagacctgaaataaaggccatcctgagtctcaacaaraactcatttttgtttagaattacatctaattttggttaactggatttttatctacaaaacttgtttccaacattcaaatccacatttaaaagtttaatatggccgggcacagtggctcaagcctgtaatcccaacactttgggaggctgaagtgggtggatcacttgaggtcaggagttcaagaccagcctagccaacaaggtgaaaccctctctctattaaaaatacaaaaattagctgggcgtggtggtgagcacctgtaatcccagctacttgggaggctgaggcatga

SEQ ID NO: 883345 - DNA, 632 bp, Homo sapiens
acttaaaaaaaagttgagatttgtgacagagttatagtgaattgctggatcagtttggggaaagcagacatttttattatattgccttttaaccatgaacataatatatctttccatttatttaggccttctttaatggtaatttaatgcatttttataattttatccaaaaatgtctagtacaacttttattatatttagttctagcaattttatgcattattgttctctttacttgaatttttaaaggtacattttctgactggtttttgcttgtatataaatgaaatcgattctcatatacagattttatatccagaaactttgctaaactctcttatgaattatactggcttgagaattctcctggattttctatagagtcaatcatataatttgtgattaattacaattttaattcttctgtctrtatttcttttacttttttattttattttcttgtcttattgccattgactagaaccttcagctgatgttctatgtacttggttatagagagtattcttttctgctcctaattttaaaatgaatgtttttatgttttaccactgatcatcaaatttatcaggtgaacctagttacctgttagaaccttactagttagctgtttt

SEQ ID NO: 883346 - DNA, 538 bp, Homo sapiens
cagttctgtggacaccattcagcctctttccccagccacctctgtcatagcccagtggtcccatgaacaaagtggccatggtggcagggatggagtttacatatgggctcagcaacatggacttccactcaccaaggctaacctggctatggcaactgctgagtgcccagttttccaaaagcagagaccagcactgagccctcaatatggcatcatttctcagggtgatcagccagctacttggtggcaggttgattatattggacctcttccatcatggaaarggaagaggtttgtcctcactagaatagacacttactgggtttgcctattctgcaaccagtgcttctgcgaagactaccatctgtgggctcacggaatgccttatccaccatcatgatattccacacagcattgcctctgaccaaggcactcactttacggctaaagcagtgtggcagtgggctcatgctcatggaattcactagccttaccatgttccccatcatcctgaagaggctggattgatgaacgggag

SEQ ID NO: 883347 - DNA, 580 bp, Homo sapiens
attaggatcaacatggaacactcaaacaatggttctgttattaattcagaaacatccaacccacttatgagttaaagcaagatattaggcacagatctatgagctattaatattgtctgttttaataaaacatatcagagcttacactaacaaaagttgttgcttcaaggttgtagacaccttagtaagctagacaatttagtaaactccaaaactgtcattgccccattctccaaccattttaaatgttgtagacctgaaataaaggccatcctgagtctcaacaaraactcatttttgtttagaattacatctaattttggttaactggatttttatctacaaaacttgtttccaacattcaaatccacatttaaaagtttaatatggccgggcacagtggctcaagcctgtaatcccaacactttgggaggctgaagtgggtggatcacttgaggtcaggagttcaagaccagcctagccaacaaggtgaaaccctctctctattaaaaatacaaaaattagctgggcgtggtggtgagcacctgtaatcccagctacttgggaggctgaggcatga

SEQ ID NO: 883348 - DNA, 657 bp, Homo sapiens
actcaaattgtgatgtaaatgtactgtaaagttttgattacaaaattttctcggggatggaatttacttagtaggactaatttgaaacatctgggaattctttttcttgtaaatatattgaccagttatagaagtttgctagtaatatcaccctttaacttcaaagtatatagctggggtaggctacaacagttatagatagctttgcatacttattattttagatactgagaccaatattttggtagaaagggggaacagaatgtaagaaagggaatataaacaaagagaagattgtacagataatggcttaaataatcttttggytgctggcaacattagcctgtctttaggttagacatcaaccccacagctagtcaggattatttttgtcctattcacttggtacttttatgtagaaagtactgattgcagctgttccccactagggtgtcactgaatgagttagctatttggaggtgtatgttcttctctgtagctctgggacatgtcgttgaagtggtatgggtgctcatgatgatccttagccccttagcacctttccatttggatgccgagaagtaaggtgctcatacttctcagtttgcttgtcatagtcccttttactcctattgtagatctgttggcacctgtcac

SEQ ID NO: 883349 - DNA, 631 bp, Homo sapiens
ttgctgtgtaatattggcaaattactcaaccactctaaggctaggtttctgcatttggagaatggagagtatgccctgccttgttccacgggacagttagtgagagtcaaatgagacacactgtatgttgaagtgatttgtatatggtaaagcactaaataaagttatattagttataataaattagaaaaataggtcagtgcaaaaataatggccattccctttaatggcaaaaaccacaattacttttgcaccaacctaatatgtactatagttattgctctattttgaatatttgacccttcaagccccatgttgaaattttatccccaatgttggagataaggcctagtgggaagtgtttgggtcacgcgggtggatccttcatgcatgtattgatgccatcytcatggtaatgagtaagtacttcctcaattagttcccctgaaaattgttttttgttttgttttgtttttgtttttgtttttgtttgagacagagtcttgctctgttgcccaggctgaagtgcactggccagatctcggctcactgcaagttctgcctcccaggtttacaccattctcttgcctcagcctcccgagtagctgggactacaggtgcccgccaccat

SEQ ID NO: 883350 - DNA, 616 bp, Homo sapiens
ataaatgtctgttgtttgcaactaaataatcttaaatctacaggaagtgatgaaagtaagttctgatatctcgagggaattttccacttggaagagaggaaggaatagcacagttaaatggataatttataaaaagaagtgttgacctacatatttatttaggtaatggaaataccttaatatctctgaaaattatctagttattttgacctatgtgctttttaaaatgtccatattgatgataaggagtggyttttcattccggtaaattcattctgctttgaattatgtaatttaacatgtattcaaattacttctatttaaaagtacacaaattgatctcattttcacttggcattttaatttatcaatacctgtgtggatatttcacagtattttcagtacaggaaatttccttccaaacagtagagattagatacatgtattgtataagatggtatatttatattgccataaatggatacgttaaaaataatgtctacttcaagaaagattgtgggactttattttgttaaagtaatattttggatttcctacatttttatgtcattattttgaaacaaatttatatgcgtaccattaattattattgaat

SEQ ID NO: 883351 - DNA, 587 bp, Homo sapiens
atagtagaaataataaaagaaaataaagctttagctatatgggaataggatggaagaaaggtaccaaaaaaggcaaagacaaaacaaaaaagggggagggggatggccattgatttgactgaatctggttaaactgcactttggcaatgataacagcatgttcccacaacagtattttccaacctcggccacactgtcctcaaatatgcagacttaccccatgctatcccccaggattgtggcaggccaggyttcactaacgcaggcctccgtgacaactgtttcagcactgactgagtggttaagttaaatattaaaagctaaaaaagccagtgcccttatacaaaggctggaatgtaacaaaagcccattaagagtttttcccagacctttcctgggccttaaagcgtgacaaaataatgaaggaattcctaacagtacccatttaggtttaaacacgttttactgggggtctgaagaaactccccaaacctccgtgatttagcaggagacaagataaaggtaatcaccccagcacctggacccatttagactaaatttactgaggctctagaagcaggtcttca

SEQ ID NO: 883352 - DNA, 571 bp, Homo sapiens
tttaacaagatttattcttcttatacacaaacatgctatatagctccacttattatttaggaaatctttaatttctcacgtcatagttttatagttttcaatgtttgaattttgctcacgttattaaatttttcctgaagtgtttttgtgataagtacttcataatacattattactatttttgctttaaccagtcaattatcttttaaacaattttaattgtgataaaatacacataaaartattctgtgttaaccatttttaagtgtacaagtcagtaatgttacatatatcacattgttgtgcaaagaatatccagaatgtttttatcttgcaaaactgaaactctatacccttaaacaacaactcctgattttcctctccctttagcccatggcaatgaccattctaattttaatttctatacatttgactattttagatatctcatatgagtggaatcatacagtatttaccatggctggcttacttcactttgcataacgtccttaaggttcatccatgttgtagcatgtgacaggacttctttcctttgaaagactgaataata

SEQ ID NO: 883353 - DNA, 635 bp, Homo sapiens
tcatgctttttttggatgttcaaatttaaatttggtatattcttaacttattgacagatgtgtggtggcattttgtgacacttgaaattatcacacacaatagattatgcagcagtttcgcatattgcagtttataataagcacttcagaactattttatacttctgttctttgttgatttacatacaatctttctttctctttaaatacatatgcttatgtataatttgaggttgtatatgaaaataattttcttttaaaaatgttgaatttcatgcttaattgaacagttaccaaagcatgtatggggattaggggctgggggtargggaaggaaattacggctatactcattatcagaatttggctcatagcaatgagacattcaattctttaaacactagttattttaaaagattttaagtaaattactctaagtattaactttttgttagtgatatgtctttttcataaattagtatgaaatccagcagaggagctaaagctaaaacaggaaaacaccattttttcatttttagtatgagagttgtgacgatttatgatataaatttttttttgagtactccctctcataagttattttatcacaggattttgatgctttggttaagtat

SEQ ID NO: 883354 - DNA, 635 bp, Homo sapiens
tcatgctttttttggatgttcaaatttaaatttggtatattcttaacttattgacagatgtgtggtggcattttgtgacacttgaaattatcacacacaatagattatgcagcagtttcgcatattgcagtttataataagcacttcagaactattttatacttctgttctttgttgatttacatacaatctttctttctctttaaatacatatgcttatgtataatttgaggttgtatatgaaaataattttcttttaaaaatgttgaatttcatgcttaattgaacagttaccaaagcatgtatggggattaggggctgggggtaggggaaggaaattacrgctatactcattatcagaatttggctcatagcaatgagacattcaattctttaaacactagttattttaaaagattttaagtaaattactctaagtattaactttttgttagtgatatgtctttttcataaattagtatgaaatccagcagaggagctaaagctaaaacaggaaaacaccattttttcatttttagtatgagagttgtgacgatttatgatataaatttttttttgagtactccctctcataagttattttatcacaggattttgatgctttggttaagtat

SEQ ID NO: 883355 - DNA, 629 bp, Homo sapiens
ggatataagcccagtaccatagatcaaagggaatttttcatttattctgaaacttggcagcacatcagaatcacctgggaagcctgataaaaatacaaattgttaaaaataaaaattcccaggccctcccctaggggggctgagtttgttctgtagcctggaaatgacaactgttccggaaaagcttatgggccacagggagctacaggggcccctcccagtggctcaagaagccccccgacatgtgggtctcgggcacaaggatcacactgaactgatggatggggctttcattcctgagtaggacgtcagagtagccttgggagaagcacaggagtggggatccccaaagactctcctcctctttttcctccrtagctcatgtttttcattgttctgcccccaacataaggtagaagattatgacacaatcttatctagcttttcaggttgccgttttctaaaaatgtttgtattatggtaactctagattccgtaagctcgacctcagtgagcgctgggcagacctacatgacctaaatgtgttaggaaattgatagcagagtaaagttatctgtgtgcagaattccctgctgccatgggtggtgcctggagcagacgacttccaa

SEQ ID NO: 883356 - DNA, 568 bp, Homo sapiens
gacttaaagacagaaaattttcagtggcaaggcttaaataggaaaatgtttgggaggccgaggtgggcagatcacaaggtcaggagattgagaccatcctggccaacaaggtgaaaccccatctctacttaaaaaaaaaaaatacaaaaaattagctgggcgtggtggtggtgggcacctgtagtcccagctactcgagaggctgaggcaggagaatggcatgaacctgggaggtggagcttgcagtgagccgaggtcgcaccactgcactccagcctgggtgacagagccagactcygtctcaaaaaaaaaaaaaaaaaaaaaagaaagaaaaagaaaaaataggaaaatgttcgttgaaatcttgctaaagtcttagaatgcaatctgactaaaatcataaataaatacataaacaagcagacaaacaaattatccctgcccctgaaaagcagtcaatcagaagttctttgtgctacactcctactaagaggagataatagctaattggtatttaccctcatggtaaaaattcccttagtgccttcagaaaatattaccatttacc

SEQ ID NO: 883357 - DNA, 681 bp, Homo sapiens
tactcctggctacattagactatctctaatgcttttcttactttctgaatgtttatttcttttactacgttctctttcttctcctcccactggattggagtaattcctcaagcattagtttttagttttgtttttctctacatttattccacacaaatttaatctgaatgaatggtttcaatgtcccctttatttgctggtattttctcctgactgtcctcaatttttttttacaaggaatttccagacttaattcttaaaacttcctttaaacaatttcctcagatttctcgctatcattaaaaatacatacttggctctaaacccttctccaactctatcagtgacatagmagttctcacaccaacgtgatccaaagaaaattttagggtcacaaactgcatgtttcccactgactccctacacaatcacctcaaaacaaactcaatttcctcctttgtttcaatctttattaattgtttctgtacaatttttggtgtgttaaaaatatctcagacattgacagtttgtatttcctttatacttgtaccaaaactatttcatactcaaagcttttgtatttgccccccttgatataagagttttaattcactaaaattcacagctgacagcattaatcagttattataaagtgacagtaaaaattacctctccattgta

SEQ ID NO: 883358 - DNA, 655 bp, Homo sapiens
cactagggaaaaggggaatgtgtcccctagatctatgtttctgtcacatggtaaattcttgaaaaagattagctatttttattattattagtcactatactaattaacgtccttctatggaaactgctgtgagagatctagccttcattggccgtccctgacttttgctcctttacctctgtcaataaatttgtaagcatctaattactttaatgaattctttcttgcttaaaatattcaaagtgtkttctgtttcttcattaaactcttaacaaatgaagggtataggaaaaattgaaagagctgttttattttttaaatatctacaagatattggggcatgagtagacaccatggacaaccatatatcgtaacaaagtgaaacagaccaataacaatacctccctttttcattggaacacaaatgagggattgaggtacacaagactgattcaccattaaaaaattcaataaatgtaatccaccatatcaacatgttaaagaaaaaagtatatgattatatgagttgatatcaaaaatgcatttgacaaaactcaacactcatttatgataatgaatctcagaaaacctaggataaaaggggaattttctcacctcaataaaatacatttacacaaaacctgcagttaacatc

SEQ ID NO: 883359 - DNA, 650 bp, Homo sapiens
ctgcaaaggggctgttggaattttgataagaattgctttgaacttgtagatcactttgggtagaattggaaacataacaatactaagtctctcaatattttcatttatgtaggtcttctttaacttttttagcaatgttttgtagttttcagtgtacaagtctttcacttccttgttcaaatttgttcctaggtattttattctttgagataatattatacattggaatgctttattaattactttttttctrcttgtattcataggaaatattgttctgtaactttccgttctttggatttcttcagctgactttggtataaggataatgcttgtctcatgtaatgacttgagaaatgctccttcttctattttttggaagaatttaagatgaattggtatttattcttttttacatgtttgacagaattcaccagtgaaacatctgatactgggcttttgttgttgttgaggaggagttttgattaccggtctattctccgtacttgttgtaggtctgttaagaatttcttcttcttcttgaatcacattaggtaatttgtgtgtggctaaaactttgtccatttcatctaggttatctaattttgaggtgtacagtccatttcacctaggctgtctaattttggggt

SEQ ID NO: 883360 - DNA, 606 bp, Homo sapiens
taggttctacaatagtggtgttgtctacaggagtaattggagaagttgaaaatcttgtggctaatttattagtcctataataccagtcttgtcaccagcaaagaaggaggtttgtttcagcaaaggactgttatcatccttgtttcaaagttaaactgtaaactaagtttctcccacagttagttcagcctatgcccaggactgaacaagggcagcttgtttagaagcaggatggagtcaaagtccgatctctgtcacagtcatacttttcctactgttatcatttttgcaaagacagtttcacatttacattgggggtagcatttatagaacagatatagcactagtatgaacacccatatgactagcccttgaggaagccagttagtgtggggtagggatagatagaaagaaataatttgccctgctttttgttgttrttttgttttccttttttcctatgggacatgagggaagaaaaccttgtgggccagtagaaaggaaggctccaatgaggttgtgcagtatggacagtgaatggctgttaagtttttaaaattggggcaaattaacatgaaatataaagcatattttggaatatggtat

SEQ ID NO: 883361 - DNA, 626 bp, Homo sapiens
ggccctgggactctctgagctgacttggaaactgcacttccaagggagaattaggaaattccaccggcctgagaaagggggctggggtttctgggattttttagcggggtgggcaggggaggcttcccatctcactattctcaccccatatacactctccttcccctcagcctcccgcagacctgggaagttggaggttgggccctatgcctggtgctgtggccactcccacctcaaatctcaggcagcccagacctgcaccctgtaacatgctcctgcgtcctcatattgctcgaagggagccccaagtaccctccaggggctcaattacaactgtgcacacaaaggtctagggtaaaagcaaagaattgggcaaggcctgaaacgagaggcatcttctgcctcygttcctgccctgcaagaccatgggcaccaggagccccttggaagccagaggcccgctgactccaaacttttttcccctaccacagtatgacagaatgcagccctgaagcccccctggaatgtgacttgggtccttggggtcactttgccaaaatggctggtaggtatggtggtgtcataaaaggaaccagtttatgagcagagaataaacccatgtaggg

SEQ ID NO: 883362 - DNA, 590 bp, Homo sapiens
cccatttccgctgtgtccgcatccacccctgccagggtcgaggtgtcctgtgattgcttttgtccctgccaagggctgtatcagccccgccaggtctggtggccattgattttgaaagagcagagtagtcagcatccactgtgagctgtgtggactcgcaggccctggctcctggatctctgggctagccagtgggactaagcacaattgccatcatggtgtgatgaaggagaagtcagactgacctctctgagtctcattttcatcagaaaggggaggtagtgctgggagttgctgtgagaatgacatgagataatggatgtgatcatgtgtgcagggttcctasaacagtgcgtgacacataattggtgcccagtgaataaatgacagctccctttcctacatagtcatggcttaatacgccttcaggccagggtagaagatatatattgagcaccttccatgtttgttccaggtactgccaggctccaggcactggggaatgcagtccctgctgtcagggagtttgtcacacagctgggaaaccagtcccccaccatgatgagatcacagacaaaggggaccacaga

SEQ ID NO: 883363 - DNA, 590 bp, Homo sapiens
cccatttccgctgtgtccgcatccacccctgccagggtcgaggtgtcctgtgattgcttttgtccctgccaagggctgtatcagccccgccaggtctggtggccattgattttgaaagagcagagtagtcagcatccactgtgagctgtgtggactcgcaggccctggctcctggatctctgggctagccagtgggactaagcacaattgccatcatggtgtgatgaaggagaagtcagactgacctctctgagtctcattttcatcagaaaggggaggtagtgctgggagttgctgtgagaatgacatgagataatggatgtgatcatgtgtgcagggttcctagaacagtgcgtgacacataattggtgcccagtgaataaatgacagctccctttcctacayagtcatggcttaatacgccttcaggccagggtagaagatatatattgagcaccttccatgtttgttccaggtactgccaggctccaggcactggggaatgcagtccctgctgtcagggagtttgtcacacagctgggaaaccagtcccccaccatgatgagatcacagacaaaggggaccacaga

SEQ ID NO: 883364 - DNA, 576 bp, Homo sapiens
agagattggaacagtttggaaggctcagaataaggtagaaaaatgtgggcaagtttataacttcctagagactgggagggctcagaagaaggcagaaagatgtaggaaagtttgcaacttcctagagacttgttgaatggctctgaccaaaatgctgatagtgatatggacaataaagcccaggctgaggtggtctcagatggagacgaggaactcattgggaactggagcaaaggtgattcttgctatgttttagcaaagagcttggcggcactttgtccctgccctagagatctgtggaactttcaacctgaatgagatgatttagggtatctggtggaagaaatttctaagcagcaaagcattcaagaggtgacttgggtgctgttaaaagcattcagttttatgcattcacaaagatayggtttggaataggaacataggtttaaaggggaagcagagcataaaagtttggaaaatttgcagctagaagatccgatagaaaagaaaaacacattttctgaggagaaattcaagccagctgcagaaatttgcatacataacaaggagccaaat

SEQ ID NO: 883365 - DNA, 647 bp, Homo sapiens
gtgttcctgatcttaaagctttgggtgccaacaattcaggtggtgattgttatgggttttgcataaaggtgttttatcatgtgaagaaaattcgaatcttcagcttattggtggtttttatcattaaatacgttgattatctttaagtactttctgtaacagttgagataaacgtgtttttcccatcattttaattatatagtatacggaaaaggaatggctttagtatgttgaaaaacctttgattttctgaaaaaaaaaaaaaaaaaaaaaaaaagacctcttcattgtggtgtataatgttttcgctatgtaccaaattccacttactatgatttggttaaacattattaagtctatcattatgagttttattaacatttagtttttttgtcctggtgatatcatatgtttgagtcagtactcgattggggttaraaaaaggtatggcttggtgtactatttagggtattagtggttagcagttagagggttagaggttataccaaaaaaaaaaaaaaaacccagaatttttgaaggattatgggctaaggttaagtgtaggatagacgttggggattagggttaaggagttagaatgtcagagcaaagattaggcttagggtgagggttagaattagagatta

SEQ ID NO: 883366 - DNA, 650 bp, Homo sapiens
gcttgtaatttggaggtttgggatattctctactctagtgtcctggattcctgcagcgatgataggcccccattctgttagtattatagggatgagtcttgggtttattagctaacgaaaaataatgtatcaatgccattgccatgtaattcgcttggcaatggcatttttcctcctcyaattgagcctttttttatttttgaggttgcctcccagtcattgaaaaccttaaaggctgtatttagtaaagtagggaagggaatgtgagtgccttgctctaatttttggagtttttgtctgatgtctggggaagcctgacgtataagctgtacagccagaatggattggcccttagggctttcagggtgtgaatttgtatatttatgcattgcctccaccagtccagcttggaaaagggtggagttctcagatggttcctgagtgatttcttgtaacttagaaaaattaacaggttttatcacagcctttttcattccttccatcaagcacgttattatataatctcatcggcagatgagataacgtttgttattgccaattgggttctctgttgaggacagcttctgcctcaacccttttatcattaggattatgagcatgaactttatttgtctacgcttgagctaaag

SEQ ID NO: 883367 - DNA, 594 bp, Homo sapiens
gtgttcttaagaggcttccagagaaaacggcacaccaatcaataaagaactgagcagaaaccaacagtgtgcttttaataaaggacctctagctgtgcaggatgcaaacgtctcggggtcagtgactgcctcctgcccctgttggtccctaggcagtgggggcagaagctcccagctgacctgtttctctgggagagaagggcagtcagcaggggcagctgttgcagatgggaggaatagtytcccacaaaaaaggtttcagtgacagacacggggtctctaaaaatagtcatgctgagagcccaatggcccttggcacaattgctggtgttggggtagaagatgtcttggagtttgctcaagtggttgagagggagggaggtgccatcaacttggaggaactggcaccaagccagggagatagaaatccaggcaaggctgtggggcaggttagggagcaaggctgcaggggtgactcaggaagaaggtgggggaggtgacaagcccccaggcaggggccctgtggccatggggatctttttaaattgagactagggggtgaatagtccagggcagctaactttagttattata

SEQ ID NO: 883368 - DNA, 594 bp, Homo sapiens
gtgttcttaagaggcttccagagaaaacggcacaccaatcaataaagaactgagcagaaaccaacagtgtgcttttaataaaggacctctagctgtgcaggatgcaaacgtctcggggtcagtgactgcctcctgcccctgttggtccctaggcagtgggggcagaagctcccagctgacctgtttctctgggagagaagggcagtcagcaggggcagctgttgcagatgggaggaatagtctcccacaaaaaaggtttcagtgacagacacrgggtctctaaaaatagtcatgctgagagcccaatggcccttggcacaattgctggtgttggggtagaagatgtcttggagtttgctcaagtggttgagagggagggaggtgccatcaacttggaggaactggcaccaagccagggagatagaaatccaggcaaggctgtggggcaggttagggagcaaggctgcaggggtgactcaggaagaaggtgggggaggtgacaagcccccaggcaggggccctgtggccatggggatctttttaaattgagactagggggtgaatagtccagggcagctaactttagttattata

SEQ ID NO: 883369 - DNA, 648 bp, Homo sapiens
tgttcaggaatttggcatctatgtttataagagatagtggtctgtaatttatttttctctttaggttttggtatcaggaatatgctggcctcattaaacaagttgggaaatcttacctctctatcttctgagtttgggtactattggtattatctgtcttagatgtttggaagaatttactagtaaagcagattgggcctcgagttttcttcgttggaaaatttaaaatctgccatcttgctgtttgtttcctatttataccatctagtctttgttccctttttgttctgccttccattggatttagtacatttgttattccattatgtctcctttgtcagtttattagctatagctccattytgtcattttctgattgctttagggtttacagtatgtctttgatttataatctcccttaaagtggcatttttccacttcatgaatagataagaaccttataatagtatacttctagctgtttcttcttggcctttatgctattgttgacatatttttatttacacatgtattaaaaacttcataatacattgttgttgtttttgtttaaagagttgattatcttttaaagagatttaaataataagggaagtcttttctgtttacccatgcagctaccatttcagt

SEQ ID NO: 883370 - DNA, 712 bp, Homo sapiens
actatagattctactcatttccaaagtgacttaggttagcactttctgcccatcacctgcagtgagtttttccataaatttgtaatacagttagattcctgatcccattctatattttatccttggatactactgcaccctaaatgtttgatttaatttgtatagcttgtgatttattctttgggctgtaaaactatatcagttttataaaatgcatagtgtcaggtatccaccattgaagtaccttcaaatacccaccctatgtaaccactgattcgtttatctctgtaattttgcctttcccaaaatatgatataaaatggggtgaaatggtgggtagcctcttcagactggcttccttcacttagcagtatacatgcaagatttacccatgtcttygcatgcgtagatagtttattcctttctatttatgaatggtactccattgcatagatgcaccccaatttgatcatgcattcagctattgaaggaaattctgattacattttgaccattatgaatagaactgctgtacataattacatgctggtatatgtttgaacataacttttcaaagcagttgtctaaatacaggcaatttaggagtgcaattgtcagattataaggtgagagttgttcagctttggaaaaaaaaacgcgaaagtgtcttctgaagtgactgtaccattatgcgttctaccagccaatgaat

SEQ ID NO: 883371 - DNA, 578 bp, Homo sapiens
ccagatccgggagagggaaataggaaaaggttcccaggcagagaagaaaaaaactgtacacctgacacctgagcatcttctcatactaaaattctgtgtgtctcctcccattgcaaggtctgctttacgaccagacttaccagatcctcggcaagctcccccgctgggtgttaaacctccttaatccttcctcccacacaagcttctttccccctatgcttcacggagggatgggggtagaagcccaagaaagcaataggattgtttttctgccggaaaatcagagatgaaggacccattcccagggtacggtgggtaagaaggagaaaaagaccgtttagatacggagtagcaccagagactggcctccacccgtccccaagctgaagcttgctgtgcggggttctsgtttctcctgggggagggagagggcctgccggctgtgcctcctctctgcaccctccttcccctcccagatttctggtggtcaagggcacagttcatcctccggacaggaggggaaggagtttgggggtagggccccacctcgcaggcaccttaccaagataagcagaatc

SEQ ID NO: 883372 - DNA, 605 bp, Homo sapiens
tgtgaaaaattaatacttagttcagttgtaagatctgtgaagacctttccagaactcacactccaagtctttagttacctacccctgtgtgggagagtcctgacttcataaaaacaagaaggatgacctactctgactaatttcagacccctacagagtagttatttaggtctggctgccagtgctcggctcaggatcttgtgtgacctgcatggaagaaaaaaccttgagcttggagctagasatacatgggttcagttcctggcttaactgcttattagctgaccttgaacaagttcttgaaagcttcatttcccttatatttaaaatggggataattattactcaccagggcaatggttagaatcagaatcaaattgaaaaggaaagtacatttaatgtgctacataaattgtaagactctataaaaatgtaaggggttttattgttatttctaatcttgcctcttgaaactaccaaaattagacggactgtgtaggtgtaagctctgggcagcatcttcagcccagacttgcagctttcctattgtatgacatattttaaggcagtaatgataagtctccttccatgatatcaatcacatg

SEQ ID NO: 883373 - DNA, 612 bp, Homo sapiens
tgtctggaacaagggaggagacacagtcacagagcatgtgccacagaggaagaagttcggatgctcctgactgacattttccaggaataagattttggtggtttataaaatattattccttcaaggtagggcctgagggtaaaaggggaaaagtacttaaactactgggcatgtggtcattcaacacttggcattggaattaatgaataaatacacagtaaagagatcacagacaacattttatatttctcaaacaattaataagggaaactctgccattcttttccatgtgacatctattagttttcaagaaattttgttatttcctcttgcatttttttaattgaggtgaaatttatgttacataaaattaaccattttaaagtgaatagcttagtggcatttagtacattcagaatattgtgcaatcacccctccatctagtttcaaaacattttcatcaccccaaaataaaamcccataaccattaagcaatttcttcttcttgttccctcttcccggtccccagcaaccaccaatctgcatcctacctctatggagttgcttattctagatatttcatattaatggaattatacaatatgtgacctt

SEQ ID NO: 883374 - DNA, 620 bp, Homo sapiens
cgcctctgacaagctgagtgattaaggcagaaaggaaattattgaaggatattgtgttactcatggaagttccaggagtgtcagaatcatcttaaatgccacccacccaagaaaaacgttcaaaattccctcatataactgattctgtgaaggcacaactgttgcttttaccaggcacagactcaactgcttgtcccactggcaacactgatgctggacattggcccctgctggctgctggaaccattaccatgarccctggaaactggatctagccaccacagacaccattaacttcaccaagatagcttcctggtggccctggctctttggattcctaccttctaagttacaatctgccttggatggaactcatgaatcatcatgtatcttgagtcatatgcctataatctatctagaaggaaggttagaatggtatgtaagttctactgagtgaagaggactctgctctctgccaaaaaggagaatgtctcaagataaaaggagaagagttgagtagtcagccaaaaagaatgacaaatgtccagtttcccaaaatattttttatcctccccaacttccttacttcatattcagttagactttgctctctcaacctc

SEQ ID NO: 883375 - DNA, 645 bp, Homo sapiens
catggtattactccctcattttggtggatcacaccctccactagcttcctaataaaagatgtatgttagcagatttttaaaatgtttcatgtctcaaaacgtctttaatttaccctaagtaggaatttgggtggtatagagttttaagttgtattgctgtccctccatattttggaggcatcattccattaccttccagttttcaatgctgataaggagaagtctgatgtaattctgaatcttgatcctttgtatgacatcttttcccccatctcaaaaattgtagattttcattttttatttgtgttattctgaaattgcacagtgatgaccctctgtgtgattttattttcattcattgtacagaactctggtactcatgtcttttggttctaagaaattttctgatttaattattgatactttctttctcttcaatgtaccttttctctctgtctggaaatttttatttggatgayggacagtttttaaaatcttttctctcctatttccttttgcttttatattcttctttctgggagagttcattaaccttatattccaaagcttctactgaaatttttatttctacttttacatctttaatttccaagagctctctttttgttctctgggtgttatttt

SEQ ID NO: 883376 - DNA, 632 bp, Homo sapiens
tctgaaggaagcactaaacatggaaaggaacaaccagtaccagccactgtaaaaacatgccaaattttaaagaccatcaacgctgtgaagaaactgcatcaattaatgggtgaaataaccagctagcatcataatgacaggatcaaattcacacatgacaatattaaccttaaatgtaaatgggctaaatgcccaattaaaagacacagactggcaaattggataaagggtcaagacccttcatcaatcttgagataatttttgtgtaaggtgtaaggaagagaaccagtttcagctttctacatatggctagccagttttccaaataccatttattaaatagggaatcctttccccactgtttgtttttgtcaggcatgtgtgctgtactcaggagtcccatctcacgtgcaaagatacrcatagactcaaattaaaggtagggaggaagatctaccaagcaaatggaaagaaaaaaaaaaagcaggggttgcaatcctagtctctgataaaacagactttaaaccaacaaagatcaaaagagacaaagaaggccattacataatggtaaagggatcaattcaacaagaagagtaaactatcctaaatatatatgcactgaatacagcagc

SEQ ID NO: 883377 - DNA, 632 bp, Homo sapiens
tctgaaggaagcactaaacatggaaaggaacaaccagtaccagccactgtaaaaacatgccaaattttaaagaccatcaacgctgtgaagaaactgcatcaattaatgggtgaaataaccagctagcatcataatgacaggatcaaattcacacatgacaatattaaccttaaatgtaaatgggctaaatgcccaattaaaagacacagactggcaaattggataaagggtcaagacccttcatcaatcttgagataatttttgtgtaaggtgtaaggaagagaaccagtttcagctttctacatatggctagccagttttccaaataccatttattaaatagggaatcctttccccactgtttgtttttgtcaggcatgtgtgctgtactcaggagtcccatctcacgtgcaaagatacgcatagrctcaaattaaaggtagggaggaagatctaccaagcaaatggaaagaaaaaaaaaaagcaggggttgcaatcctagtctctgataaaacagactttaaaccaacaaagatcaaaagagacaaagaaggccattacataatggtaaagggatcaattcaacaagaagagtaaactatcctaaatatatatgcactgaatacagcagc

SEQ ID NO: 883378 - DNA, 649 bp, Homo sapiens
aggaaaaagttgaatctctgaatagaccaataacaggttctgaaattgtggcactaattaatagcctaccaaccaaaaaaagtccaggaccagacagattcatagccaaatgctaccagacgtacaaagaggaactggtaccattccttctgaaactattccaatcaatagaaaaagaaggaatcttccctaactcattttatgaggccagcatcaccctgatacccaaacttggcagagacacaacaaaaaagaggactttaggccaatatccctgatgaayatcgatgtgaaaatcctcaataaaatactggcaaaccgaatccagcagcacatcaaaaaacttatccaccatgatcaagttggcttcatccctgggatgcaaggctggctcaacatatgcaaatcaataaatgtaatccatcacataaacagaaccaaaaacaaaaaccacatgattatttcaatagatgcagaaagggcctttcacaaaattcaacagcttttcatgctaaaaacactcaataaactagatattgatggaacatatctcaaaataataagagctatttatgacaaacccacagccagtatcatactgaatgggcaaaaattggaagtattccctttgaaaaccagcaaaagacaa

SEQ ID NO: 883379 - DNA, 598 bp, Homo sapiens
ttgccactactgaggatggggaagctgttctttgtggcaaaaaagtttcatcagagtttaaaaactcagtgtccccagcttcatcagggccctcccacacatccccattctaagttgcagggtcccatttttttccgatcaatgccctcactttaacagtagacatctggagaggctgtgcatgcacctttcattatagatcagccactcacatgataagagcttgtgtctgcttttcaacaatttcagctctttctctacaggagataagactctcactcagggcaatcttagcagatttgaggctcagtatctgcttctgaagcttggagaaagaatccctgagttcatcattttctttcatcactttgtccactgaacttaggagcaaccaaccagcttcattatgttccttgattctccacatatggtcaaaggtattatgtatagaatagctaaactycttgcctctcatgagcagtgaatcaagagtgtcaaatgcatttattttgcatatctctcacagtttatgccaaggactatcaatgttctccatactattaaaagtagaatccttagcattttggggtctaatcat

SEQ ID NO: 883380 - DNA, 641 bp, Homo sapiens
atgtcagttgttaccattctacgatcaccacacaataattacatgacacagtttagcatttaattatctaatgtcttgtgttagctattgttccaaattcttaggtcttgttttcccaactaatttgtacactgattaatggcagaaattatgacacatgtcttttatccctaaaactgctgagcacgtaagaggctcaagtgagtacttatccagtgattgcttatagcacatggtggacaatttamgactctactgttctctaattgcttcatgtgtttgaaggttttggattatgatccttgagggcgggaatgacatctgatctggcatttttcctgtgccatgtttgacacaaagctgggggcacagaatcaaagaactggcagggacctttttgttcatctaatcccaccaactcattttacagataaatcatctaatgcttaaagaggttgcatcatgtggccaaaccaatcagtgaatgagctggaatgagaaattagctctcccaggatctttctctttcagtattttgttaattttcttgatttctctatactcttgagtaccaagcacagggttctgcatgtagaaaaagtttttttaatgacgtagattattgatttctggaacttaag

SEQ ID NO: 883381 - DNA, 641 bp, Homo sapiens
atgtcagttgttaccattctacgatcaccacacaataattacatgacacagtttagcatttaattatctaatgtcttgtgttagctattgttccaaattcttaggtcttgttttcccaactaatttgtacactgattaatggcagaaattatgacacatgtcttttatccctaaaactgctgagcacgtaagaggctcaagtgagtacttatccagtgattgcttatagcacatggtggacaatttaagactctactgttctctaattgcttcatgtgtttgaaggttttggattatgatccttgagggcgggaatgacatctgatctggcatttttcctgtgccatgtttgacacaaagctgggggcacagaatcaaagaactggcagggacctttttgttcatctaatcccaccarctcattttacagataaatcatctaatgcttaaagaggttgcatcatgtggccaaaccaatcagtgaatgagctggaatgagaaattagctctcccaggatctttctctttcagtattttgttaattttcttgatttctctatactcttgagtaccaagcacagggttctgcatgtagaaaaagtttttttaatgacgtagattattgatttctggaacttaag

SEQ ID NO: 883382 - DNA, 641 bp, Homo sapiens
atgtcagttgttaccattctacgatcaccacacaataattacatgacacagtttagcatttaattatctaatgtcttgtgttagctattgttccaaattcttaggtcttgttttcccaactaatttgtacactgattaatggcagaaattatgacacatgtcttttatccctaaaactgctgagcacgtaagaggctcaagtgagtacttatccagtgattgcttatagcacatggtggacaatttaagactctactgttctctaattgcttcatgtgtttgaaggttttggattatgatccttgagggcgggaatgacatctgatctggcatttttcctgtgccatgtttgacacaaagctgggggcacagaatcaaagaactggcagggacctttttgttcatctaatcccaccaactcattttacagataaatcatctaatgcttaaagaggttgcaycatgtggccaaaccaatcagtgaatgagctggaatgagaaattagctctcccaggatctttctctttcagtattttgttaattttcttgatttctctatactcttgagtaccaagcacagggttctgcatgtagaaaaagtttttttaatgacgtagattattgatttctggaacttaag

SEQ ID NO: 883383 - DNA, 669 bp, Homo sapiens
ttctaaagctcccagatctggccttgtggccgagggtcttcattcactaacaaatgttgaccaacaacttaccatttgccagacacttcctgctcacaagagctcacagtgcagtgtgggagacagagaaacaggtaatttcattactgcggggcaggcttcatgctgggtcagcatggagtcctgtgagaatacaaaggagaggcttctacctccgtcttggggagtcaaggaggtggtgactgagctgggacccaggcaggtagagattgggtagaggtaagagtttctccttaaatgtttcccatgtaaaggcagctcccaaataataacacagcagtgctaaaatccatatgagcttaacccaagcccctcaaagttagttgatttcttgtgcccaataacatttactatgttacccaataatatgyactaagcaaagcaattgctgtcaaaacataagaaataggagagaactcataatttatttgaatgtgaaatttccacagctaacaatgtaagccctggaatcttgggattgaaagaggtcatatggactactaaatcctctctccaggtatggcagtcccctccacagcacccctccaggtggtcatccagtctctgtgtgaattgcttcagtgatggagaaactcatcattgatcaag

SEQ ID NO: 883384 - DNA, 650 bp, Homo sapiens
gggaaacgcagtctaaattccatcaagaaagtatctattcctcatggttcctggtatgaaatataacaattaaaatgcaaacatgaaatgcaaacaaatgtcatttccaaattagacttgtaattagaaataaatgaataagtttgttggtttggttattatgaccatataactaattactttgttaattataagatttgccaggatgtgtctttagccttaatatatgttaaaaaataatagacttagaaaataaataggaatgttggtaccagctgcatggagaagccctggacaagttgggcctgtccctgaggtgtaatggtcaggcccacagacaaaccatcccatctcctctgaccagcaccagatgtaaattatggggccaccattcagtggagtagaaatttttgcttgaaagtctaagggagcccacattgaatatagataacataaagtcaaggyttctgttttgattaagattattctcaaagctcagaattactggaatttgttggagtagttgaactttttgacatgaaaagatggattttcctgtgtgtaaactctattgtgttacagttgttggtgcaaaaccacttaatgcattttctttaggaactctcaaatacctgtttatgcatttttgt

SEQ ID NO: 883385 - DNA, 650 bp, Homo sapiens
caggtgttcactttgtgataactgagcagtacacttatgttttgctcactaatttacatgtaggagaacatttaacacaatagaaatcccggtagaccagtttagtaagcaatagtatctataaataacatataattttaactttagaaacattaaattatttgaaggcaattggaagaaaaccaacyagcattaatttataagcacagaatccacaatcaaattgtggcaaaaagtaattttgccattacttttaatggcaaaaaccacaattacttttgcacgaacctaatataaataatgaaacctaaacatgtgtctttaacaatttctggaatactacaggtgcatcacttcttccatcctctctggttacatctgtgtcattagttatgtaattatgtatgcatgtgtcacatctgtgacactaacggattggtatctctgcctggaggaacctggggtctgaaaaaggtgcttggtaaattgacctgggattgcagtgaccttagcagcctcttgcttggaatgctcttcctgcacactgctctgcccttttctgctcctgctccttccccagtcctgccttccagaggcacccaacttcaactctgcatatctttcttcagttatttcatctccatatttct

SEQ ID NO: 883386 - DNA, 650 bp, Homo sapiens
caggtgttcactttgtgataactgagcagtacacttatgttttgctcactaatttacatgtaggagaacatttaacacaatagaaatcccggtagaccagtttagtaagcaatagtatctataaataacatataattttaactttagaaacattaaattatttgaaggcaattggaagaaaaccaaccagcattaatttataagcacagaatccacaatcaaattgtggcaaaaagtaattttgccattacttttaatggcaaaaaccacaattacttttgcacgaacctaatataaataatgaaacctaaacatgtgtctttaacaatttctggaatactacaggtgcatcacttcttccatcctctctggttacatctgtgtcattagttatgtaattatgtatgcakgtgtcacatctgtgacactaacggattggtatctctgcctggaggaacctggggtctgaaaaaggtgcttggtaaattgacctgggattgcagtgaccttagcagcctcttgcttggaatgctcttcctgcacactgctctgcccttttctgctcctgctccttccccagtcctgccttccagaggcacccaacttcaactctgcatatctttcttcagttatttcatctccatatttct

SEQ ID NO: 883387 - DNA, 653 bp, Homo sapiens
taggaatagttagcagtatctctggatcaagtcagaatgtgacaaccagatgtttgacacgtgtgactaattatataatatggaatatttgccaggtgttgaagagaaaagttgtagtatgaaaatataggtctcgttaaggtctkattttctaggaatctgccattgaagatttgggcacagtactagtatctccaagaagttgatgttgtgtttggagttaggctgatccctcttcctctcgtttgcaaagcccgacaaagggaacaggctaacttaatcatatgctgctggtttgtactctcactggatggatcctggaaacagaccaaggtaatggctaatcagggtgctagcaaaagaggttggttgacagaagggtggtcatgagatatcacagcctgaatttttttatttcaattggtttttggggaacaggtagtgtttggttatatgaataagttatttagtggtgatttctgagattttggtgcacccatcacccaggcagtgtacactatacccaatgtgtaatcttttgtgcgccaccacaccccctttcccccaagtccccaaagtccaatgtatcattcttatgcctttgcatccttgtagcttaactcccatatatgagtgaaaacatataatgtttg

SEQ ID NO: 883388 - DNA, 591 bp, Homo sapiens
ttcctcaaatatgttttgcaaacttttggatttctcttcctcaggaacaccagttattcttaggtttggatatttaacacagtcccaaacttcttaaaggctatgttcattttttaaaaaattattttttccttgtctttaatagattgggttaattcaaagccttgtcttcaagctctgaagttttttcttatgcttgttcaattctattgctgaggctttmcagtgcattttgcatttctctaagtgtgtccttgatttccagaaattgtgattgttttttatttatgcagtctatttcactgaagaattttcccttcatatcctgtatcatgttcttgatttctttaaattggacttcaactttctctggtggctccttgattagcttaataattgactttcttgaccttattcgttttctgtcaattcagagattttgtcttggtttgattccattgctggtgagctggtatgatcttttgggggtgttaaagaaccttgttttgtcatattaccagaactgtttttctgattctcatttgggtggactctctcagagggaagatctagctacgactcaagggctgt

SEQ ID NO: 883389 - DNA, 634 bp, Homo sapiens
cggtactggacccttcctatcaatgggaccatttcagggctgccacttggccagggcatcgcagtgggctgttggatcagaccgagaggcaccaattcaaacgcccccggcaagaacctatgtcaggtggatgggatggttataaacggcagagctatgcctgctatcaaggattagaatgaaaatatctgagcagcctcagcagacagtagctggtggcacctcaggagaccggaaaagccctacctgccaggacccctagacccagcccttgcctgtcttgaaacagcaaagggagtgatcttggggacaccagaacagtctgcttgcagagattaggaayaggacagcttattccagtcaaacagcgagactaaaagtgagtctaaggctccagcctctccagattcctcctggcccacgcatgaacatggtctccgtggccatcgattcttctgagcccacctcctccacgtgagtacacacgcttgtctacctatggtctgtgaaagtgcacagactttgggtcaaacagatttgagtgtagagtctggcttagaattccagacccagctcttcttcactgtgtgatttggggcaaaataacctggcctctggaagcctgagtttttca

SEQ ID NO: 883390 - DNA, 641 bp, Homo sapiens
accccagctgacatctccctagatcacatgccccccacgtccactggctctaagcccagcacagcagtaggacctgcctaggtgttgcattccttgtggcctagacagcctttgaagtttatttaggacctccaagcactttagcctatagtgatgaggcttgctaaaactcacattcttaccatttggatgagtgatttccttctggctagggctggtctaaatgctccctcagtaggcatggactgttttgcccagtgctggcagcactgacttccaatgcaaagtcccacarttgctgcactctcccttcccaagtgcacagattctctttctacaccacagagccacttctggggagtgggggaggggtggtgttgacaaatcaaaactgtctttcttaccttcttcagtgcttctttcagcaatatgaagttaaaaacaggtactgtggttgctcacctgatttttggttcttatgaaggtgctcttttgtgtagatagttgtcaagtttggtgttcctatggggaggatgatcagtggaggcttctattgtgccatcttgctacaactccctcttgctgtgtcttcattttcattcatctgaaagcattttctaaattcctatgatttcttcttt

SEQ ID NO: 883391 - DNA, 585 bp, Homo sapiens
acttgtttaaatatgtttttcctttatttacacagagatggcttataataaagctaccgttaaacactggtgtcagaaaaccaccaaagggaattcattttctaacatccatgatgataatatagatgcccaattcatgacatgcagttttcctttctctgtacaaatattaaaataatatttctgcttgcagtggtaaagatattgttgccttgatcccagccacagaaaaataaattaargaaaggactatttgattatatgtagaaattttaaatatatttgcctttgccaaaaatgtatagtttactgaccgacccaaaatatttaaccagattaaaaagaatccacaattcaaatgcaactatggaaaatcttgtggtgatttaaatatttataaccccagtctcaaagtactgtttccactttaggaacataaaggaacatgtccctgatttgcaattgagttgcctaaaaaaatagggatttgtgttagggcgggggcgggaggcagagagaagaatacaattctaatggaaaagtagacagtttttatatttggctaatgaaaagtaatgttcattt

SEQ ID NO: 883392 - DNA, 585 bp, Homo sapiens
acttgtttaaatatgtttttcctttatttacacagagatggcttataataaagctaccgttaaacactggtgtcagaaaaccaccaaagggaattcattttctaacatccatgatgataatatagatgcccaattcatgacatgcagttttcctttctctgtacaaatattaaaataatatttctgcttgcagtggtaaagatattgttgccttgatcccagccacagaaaaataaattaaggaaaggactatttgattatatgtagaaattttaaatatatttgcctttgccaaaaatgtatagtttactgaccgacccaaaatatttaaccagattaaaaagaatccacaattcaaatgcaactatggaaaatcttgtggtgatttaaatatttataaccccagtctcaaagtactgtttccactttargaacataaaggaacatgtccctgatttgcaattgagttgcctaaaaaaatagggatttgtgttagggcgggggcgggaggcagagagaagaatacaattctaatggaaaagtagacagtttttatatttggctaatgaaaagtaatgttcattt

SEQ ID NO: 883393 - DNA, 579 bp, Homo sapiens
tttatccagtgggtaggcactggataaatatttgttgaataaatgaatagacattatttagtataattaatggtctcttctataaggtaccatgtagcagtggctgaattgatttaacgtcttgaagtcttcatcaatttctgatgacgaccagttcctagaattagaaattcacctctaagtggtaagagaatagaggaaaccagtgggttgtaactgcaaagataccacagatactgacatttgcatcacactcagcagattatatactcaaatgaggtttctcctactccctgtcattgtgtgtgataaggcaatcatgaataaaatctcacacaatgaagctgaagattgtccctgagttatatagcacctaaactttgtctagatgtcttacaaaggawataaaaaatgaaagaggaaaagggaaggaaggagggaaggtggaagggagggaggaaggccaactgtatttctaggattggggaatttcctagtataatttccatcttagatctgccattttcatcatggccagagttagtcactctgtcatctccttgttgttcattacctcaa

SEQ ID NO: 883394 - DNA, 594 bp, Homo sapiens
aatattcaacatgctgtattacttttcttggaacactctttccttgtgttttttactggtgtcattttagcttttttttttttttttttttttgatatttacatgttgctgtgggaaagtcagaggcaagtctgatttatttctccacataagtgaattgatctttctgcttggctgtccagaarattcttttgctccacaaaccacaaactgatcattttaataagttataatctggtgttgtctacaggtcattttccttttattacaaagtgttatttccatatgtagattcaaatcttctttgttttttttttttgttgttgtttgtttgtttttttcttgagacagagtcttgctctgtcacccaggctggagtgcagtggcacaatctcaggtcactgcaacttccacctcccaggttcaagcaattctcctgcctcagcctcccaagtagctgggattacaggcacctgccaccatgcccagctaatttttgtattttcagtacagatggggtttcaccatggtggaccaggctggtctcaaactcctcacctaaggtgatccgcccactttggcctcccaaagtgc

SEQ ID NO: 883395 - DNA, 594 bp, Homo sapiens
aatattcaacatgctgtattacttttcttggaacactctttccttgtgttttttactggtgtcattttagcttttttttttttttttttttttgatatttacatgttgctgtgggaaagtcagaggcaagtctgatttatttctccacataagtgaattgatctttctgcttggctgtccagaagattcttttgctccacaaaccacaaactgatcattttaataagttataatctggtgttgtctacaggtcattttccttttattacaaagtgttatttccatatgtagattcaaatcttctttgtttttttttkttgttgttgtttgtttgtttttttcttgagacagagtcttgctctgtcacccaggctggagtgcagtggcacaatctcaggtcactgcaacttccacctcccaggttcaagcaattctcctgcctcagcctcccaagtagctgggattacaggcacctgccaccatgcccagctaatttttgtattttcagtacagatggggtttcaccatggtggaccaggctggtctcaaactcctcacctaaggtgatccgcccactttggcctcccaaagtgc

SEQ ID NO: 883396 - DNA, 594 bp, Homo sapiens
aatattcaacatgctgtattacttttcttggaacactctttccttgtgttttttactggtgtcattttagcttttttttttttttttttttttgatatttacatgttgctgtgggaaagtcagaggcaagtctgatttatttctccacataagtgaattgatctttctgcttggctgtccagaagattcttttgctccacaaaccacaaactgatcattttaataagttataatctggtgttgtctacaggtcattttccttttattacaaagtgttatttccatatgtagattcaaatcttctttgttttttttttttgttgttgtttgtttgtttttttcttgagacaragtcttgctctgtcacccaggctggagtgcagtggcacaatctcaggtcactgcaacttccacctcccaggttcaagcaattctcctgcctcagcctcccaagtagctgggattacaggcacctgccaccatgcccagctaatttttgtattttcagtacagatggggtttcaccatggtggaccaggctggtctcaaactcctcacctaaggtgatccgcccactttggcctcccaaagtgc

SEQ ID NO: 883397 - DNA, 584 bp, Homo sapiens
ggacacaaagcctaaccatatcaggtataaaagagaacttaaatgtgtttcctggtaaaagggttaatcttgtaaaaagttctctggttggctaaaatgaaaaaggaattatttaggttttcaagtattaaatactctaaagtccagaaaataacatatttagcttatttggcatattaaaatcacacaggatgtactgtcaaatataaagtggtgtttagcwttctttaaactgcatttatattatgggctattggtgtgtgttccaaaattgtataaaattcctgtaatatttctcagtatatgttatcagtaataattataattattttgttaaattagtgtcacaaaaataaccaaatattaactgtggctgttctgaaacttttgtcactcacaattgttgtaagacttctaaattgttttaaaacttttgtcactcccaattgttttaccttaattatattcaggttggttttataatcagctatagaactacaacaggtgctcttaaatgggtttctaacaactttaaagattgtaacatcaaattgaaaagaaaaacacaaaaaaaaactactaat

SEQ ID NO: 883398 - DNA, 584 bp, Homo sapiens
ggacacaaagcctaaccatatcaggtataaaagagaacttaaatgtgtttcctggtaaaagggttaatcttgtaaaaagttctctggttggctaaaatgaaaaaggaattatttaggttttcaagtattaaatactctaaagtccagaaaataacatatttagcttatttggcatattaaaatcacacaggatgtactgtcaaatataaagtggtgtttagcattctttaaactgcatttatattatgggctattggtgtgtgttccaaaattgtataaaattcctgtaatatttctcagtatatgttatcagtaataattataattattttgttaaattagtgtcacaaaaataaccaaatattaactgtggctgttctgaaacttttgtcactcrcaattgttgtaagacttctaaattgttttaaaacttttgtcactcccaattgttttaccttaattatattcaggttggttttataatcagctatagaactacaacaggtgctcttaaatgggtttctaacaactttaaagattgtaacatcaaattgaaaagaaaaacacaaaaaaaaactactaat

SEQ ID NO: 883399 - DNA, 613 bp, Homo sapiens
caatgagagaatacattctaattgtttcttatcagacttaaggtctgtgttgatgttaatgcggtcagcttttcctgaattctaaaagggaggagagtataatgaagcatttctggcttccccttcccatcatggcctgagctagtttttcaggttaactttggaaagtccttggccaagaggaggggtccattcagaatgctgrtggccttataattttatttttggtttacaaaaatttttacttttcaaaattaaggtggtcattgttaccaagcataaagcatatgatatttcaagagcataaaagactgttatgcatcctgtgatagccatagtaacttgaaataatcagtatacatatagtatttacagccatcagaggagatgaccttttcaaaggagtgggtatagatggaaaagagattcaggaagagagacactccagtttgtaagggttatttaaacaaagagggtggaggtatgtgaaagattatgagacaagagcagtaaaaaagattgagaataaaaaactggtgagaaaaaaagtcaactgtgggagcacaattttctataagtgaaataaagaaaagtgtttcataaagaatggagt

SEQ ID NO: 883400 - DNA, 642 bp, Homo sapiens
aaaatgtcccttcgtgtcatttgctcacattttcatgggattatttggtttttttcttcctatttttttaacttccttgtagattctgaatattagttttcctcttgtggatgtatagtttgcaaatattttctcccttctatacgttgcctgtttattctgtttattatttcttttgctgtgcagaagctttttagtttaattaagtccaayttatttacttttgttttacttatatttgcttttgaaatcttagtaataaattccttgcataggccaatgtccagaagagcttatcccaggttttcttgtataattttaatggtttaagcctttaatctaactttacttaatccttgtgtgtggtgagatatagggatccagtttcattttcctgtatgtggccatccaattttctccaccatttattgaacaaagtgccctttctccagtgtacattttttgtttttttgttttttgtttttggctttgtcaaagattagttgttgtagccattgggctttatttaaaggttctctattctactccattggtctttgtatctatttttatacaattagcatgcttttttggctactataaatttcaattttgtaatgtgatgcctacagatttattttt

SEQ ID NO: 883401 - DNA, 642 bp, Homo sapiens
aaaatgtcccttcgtgtcatttgctcacattttcatgggattatttggtttttttcttcctatttttttaacttccttgtagattctgaatattagttttcctcttgtggatgtatagtttgcaaatattttctcccttctatacgttgcctgtttattctgtttattatttcttttgctgtgcagaagctttttagtttaattaagtccaatttatttacttttgttttacttatatttgcttttgaaatcttagtaataaattccttgcataggccaatgtccagaagagcttatcccaggttttcttgtataattttaatggtttaagcctttaatctaactttacttaatccttgtgtgtggtgagatatagggatccagtttcattttcctgtatgtggccatccaattttctccaccatttattgaacaaagtgccctttctccagtgtacrttttttgtttttttgttttttgtttttggctttgtcaaagattagttgttgtagccattgggctttatttaaaggttctctattctactccattggtctttgtatctatttttatacaattagcatgcttttttggctactataaatttcaattttgtaatgtgatgcctacagatttattttt

SEQ ID NO: 883402 - DNA, 575 bp, Homo sapiens
gcatttggattatttatattgaacattaatattgatttgttatgcagtgttgcagttgtcatattgattgttacctggttgctttgttttctttaatgggttacagttttataagccctgtgtgttttttatttttaagtatttatttatactgatgcatattatgcatattgacctttcagttcaatatttataactcctttgggcatgtkgtataaggctagtttagtggtgataaattccctcagcctttgcttgtctgggaaagattttatttctcctttatttatgaaacttagttttgctggatacaaaacacttggctgacagttactctatttaagaagactagatatagggaccccaatcccttctggctttcaaggtttctgctgagaagtctgctgttagtctgaaacatttttctctatactttattactttctctcactgttcttaaaattatttccttcatattgactttatgtagcctgatgaccatggcttggtgatatcccttttgcagtgaatctttcaggagttccatgaccttcttatatttggatgtataaatc

SEQ ID NO: 883403 - DNA, 608 bp, Homo sapiens
tgagcagaacaatgtaccacaatgggtgcacacacagtatggcacctgctactatagttcatatctagagggaaaaggaagggaccttatgtgagcaaaataatgccctagagaagtccccaaattgcagtcaactcaagtactggactagcaagggcaaataaactctccttgatcttggacaccaccaacaagggtgggagaggctgagagcactcctacctacattttcctcaaaatactaagtatcttagggtttaaccttgctggcttcttgttactttgttttgtgtgtgtgtcatagattcttccagttaactctctgatgagctccagcattctccccttaacactycatttgggctgtgattattcatctataattttggttcttcattctgaggaacattggtcattgagttctctagtcagctctctggagaagctctccaatgcctcaggatattgacagatctgtgggatgtgcaatagctgtgctcaactcagcttccatagtgggcaatgttgaatggagctgacccaaactgatctgtcccctagtctcccagtaacaggtgtaagcaccagctctaataagagtggcaggg

SEQ ID NO: 883404 - DNA, 670 bp, Homo sapiens
tttctcttttcaagtgggtgagacacactgacaaagcttccccatataattgcttttatcaccatctctttcaccctttatccttcccttatagttaactttttaattaatatttagtttaacctaactttttaaaactataagcaaatatatacacacattgtatgcatatgcatatatacacacattgtatgcatatgcatatatacacacattgtatgyatatgcatatatacacacattgtatgtatatgcatatatacacacattgtatgtatatgcatatatacacacattgtatgtatatgcatatatacacacattgtatgtatatgcaaatacacatacatgcatatatgtgtctcctcattctttggaaaatgacattatctgtaaaaactagaagtgctctttaatggcttctttcttgatgaattaaaaatattaaaaacagttaattaattaatttatttccaataaagatgggtgtctcactatgttgctcaggctggactcaaactccagggcttaatatatcttgcctcttcagccattcaagtaactgggactaccagtgcacaccactatgtcctaatgaaaatgacattttatttcccatattgaatcaatgaatatgtgagcaagtattgtgattttgatactttgtatt

SEQ ID NO: 883405 - DNA, 613 bp, Homo sapiens
attattgatttatagttgtattctactgcggtcttataaaatgtttgacactattattataataattattattattactgttttaagacgtgtttggctagacacagtggctcacacttgtaatcctaacacattgggaaaccaagcaggtgcatctcttgagctcaggagttcgagaacagcctaggtaacatrgcgaaactccatctctacaaaaggaaaagaaaaatacaaaaattagccaggcatggtggcacatgcctttagtcccagctacttggtggtgctgaggcaggaggatcgtttgaacctgggagtttgaggctgcagtaaggtgagatcatgccactgcactctgtcctgggtgacaaagtgagatcctgtttcaaaaaaaaacaaaaacaaaaaacttgttttttaacctaacatatgctgggattacaggcgtgagccactgagcctgatcagatatgtctcttttatttctagtttattgtagtttttatcaggaaagggtgttggatttaatcaaattttttctacatctattgagataataatttgtttatataattttattaataggatgtattgcattgattcagtttttata

SEQ ID NO: 883406 - DNA, 613 bp, Homo sapiens
attattgatttatagttgtattctactgcggtcttataaaatgtttgacactattattataataattattattattactgttttaagacgtgtttggctagacacagtggctcacacttgtaatcctaacacattgggaaaccaagcaggtgcatctcttgagctcaggagttcgagaacagcctaggtaacatagcgaaactccatctctacaaaaggaaaagaaaaatacaaaaattagccaggcatggtggcacatgcctttagtcccagctacttggtggtgctgaggcaggaggatcgtttgaacctgggagtttgaggctgcagtaaggtgagatcatgccactgcactctgkcctgggtgacaaagtgagatcctgtttcaaaaaaaaacaaaaacaaaaaacttgttttttaacctaacatatgctgggattacaggcgtgagccactgagcctgatcagatatgtctcttttatttctagtttattgtagtttttatcaggaaagggtgttggatttaatcaaattttttctacatctattgagataataatttgtttatataattttattaataggatgtattgcattgattcagtttttata

SEQ ID NO: 883407 - DNA, 622 bp, Homo sapiens
cctggccaacatggtgaaaccccatctctactaaaagtgcaaaaaaattagccaggcatggtggcgcacacctgtaatctcagctactcgggtggctgaggcatgagaatcgcttgaacctgggagacggaggttgcagtcagccaagatcgcgccactgcactccagactgggtgatagtgcaagactctgtctcaaaaaaacaaagaaacaaacaaaaacaaacaaacaaacaaaacccagcaaattgaaaaggtgagattattttacccatcagattggcaaaatggaaaaagatggtgaatatccagtgttaataagagtgaagagaaatggaaactctagtttactgttgggaagtataaattggcacagtctttttggaatgtactttggctatatctattaaaatctaacatrtgtgctttctcttcattatatcgattctacttctacatatatagcctagggaaatgtttgaaaatacaagttgagcatccctagtccaaaaatttgaaatcaaaatgctccacaatcagaaactttttgagtgccaacgtggtgctcaaaggaaatgctaattgagcgtttcagattccaggttagggatgctgaactggta

SEQ ID NO: 883408 - DNA, 617 bp, Homo sapiens
gacattctaagaagaattgttaccaatccttttgacacaattccacaagatagagaaagaaggaaccctccctaattcattctgtgaagccaccatcaccttaataacaaaaccaggaaaggacataaccaaaaaagaaaactatagaccgatatctttgatgaacatagatgctaaaatccttaacaaaatacttagctaactgaatccaacaacatatcaaaaagataatccaccatgttcaagtgggtttcataccaaggatgcagggatggtttaggatatgcaagtcaatacatgtgatacaccacataagtagaattaaaaaccaaaatcacatgatcatttcaatagattcagaaaaagcattcgacaaaatccagcatygcttgctgattaaaactctcagcaaaatcggcatacaaggagcattgcttaatgtaataaaagccatctataacaaacccacagccaacatgatactgaatgaggaaaagttgaaagcattccctctgagaactggaaaaacacaaggatgcccactcacaccacttctcttcaacattgtattggaagtcctagccagagcaatcagacaagagaaagaaataaaggga

SEQ ID NO: 883409 - DNA, 619 bp, Homo sapiens
ccggccatgtgaggtgtcagtctgcccctactgggggatgcctcccagttaggctactcgggggtcagggacccacttgaggaggcagtctgtctgttctgagatctccagcttcatgctgggagaaccactactctcttcaaagctgtcagatagggacatttaagtctgcagatgattctcctgccttttgtttggctatgccctgcccccagaggtggagtctacagaggcaggcaagcctccctgagctgcagtgggctccacctagttcaagcttcctggctgctttgtttacctactcaagcctcagcaatggtgggcgccccttccccagcctcactgccaccttgcagtttgatctcagactgctgtgctagcaatgagtgaggctccgtgggcgtaggaccctccaagccaggcgcgggatataatctcgtggtgygctgtttgctaagaccgttggaaaagtgcagtattagggtgggagtgacccaattttccaggtgctgtctgtcacccccttctttgactaggaaagggaattccttgacctcttgtgcttcccgggtgaggcgatgcctcaccctgtttcggctcacgctcggtgcactgcacc

SEQ ID NO: 883410 - DNA, 599 bp, Homo sapiens
cttggtagtcaactgcaaggtcagaaggggcatcagttcctccttcctgcattatgcttccttagggaagtgtcatagcgtggccatttgggtcctggggtgttgcaaagtttagtcagcacatttgccttttactcacagtctttatatcccagagcacacatttgcccagtcagaggacttgggctgagatgtccgagagttttttgaaggacaattttgttgaatacagaattctagatggtgttttgtttttcttttaacactttaaatatttcactccgtgcttttcttgcttgcatggtttctgatgagaagtccaatgtaattcctatctttgttcctccatasataggtaagttgaattttctcctctgatttctttcaaaaaatttcccttgtctttggttttcttcagtttgaatatgatatgctaacttgtaaattttatatttatcctgcttgatattttctgaatttcttggatctgtggtttggtgtctgccattaattttggaagtctcagccactattatgtcaactatttcttctgctcctttctattatagttatctagatatttacaattacttggcttt

SEQ ID NO: 883411 - DNA, 676 bp, Homo sapiens
agtttatgtatttcttaaccattaacacatgtaaaactgtcctgccattactctctggttttaaatgtgtcactgatgtttttactgttattcccccaaccccattttcctcataagccatgcactttttaatgtataattttccaaattagartaatttttaaagaatatgtcatgttataggaaaactgactatttttttttcttacctagcatagtgaacttttgtggatttggcaagcaatgaaaataaagtcatcaaagattctgtattgcagaatcaaaaagaataaggaagagaaacctacaagtattcactattcagtggagatgcctctctttggtggaggaccattcagagcttctatctaaagactaaccttgggtggattttctcactaatagtttattattctggcttctgggtttcctgctcttctgaacctgagcatcctcttcctcagcaagtggttttgtttctttggcacatagggccgtgaatggatagtgcaatactgttaaagaatttggactttattctcttgcatctctgaccttgaacaaggctattagttcttactgacttcatatcccctctgggaacacaactttatgacccaccagtggcacttgaccttgggtctgtggcacctgatgctgaggggtcagaatcaag

SEQ ID NO: 883412 - DNA, 581 bp, Homo sapiens
actgtactcagagcaaacaggaaatgaaatccagacaagcacggtggctcatgtctgtaatgccagcacattgggaggccaaggagggaggatcactttaggctagaagtttgaaaccagcctgggcaacatagggagaccccgtttctacaaaaaaataaaaaataacaattaatggggcattgtggagtatactgtcgtcctagctacttgggaggctgaggaaggaggatcacttgagcccaggagttgaaggctgcagggagctatgattgcatcactgtactccagcctgggcaacaagcgagaccctatttctaaaaataaaaatgaaagacagacatgaaattcaaaacttgcatccaaagccaacttttatttaattttttcctcattagaagcacagtgcttactcacaataagaatatctggcaaaatttagcaraggataaagaagaaataaaagtcttccacaacttcacactcaggacaaaatcacagtttcagggttgaaatctcagagctcattccaactcctttaaatctccacatcttgccatccaccctcccaggtaaatgca

SEQ ID NO: 883413 - DNA, 559 bp, Homo sapiens
attagtcagcatctaccagccgtaaataggagttggcactctccctgcattccgtcatttaatcctttcagatacacctgcacatgattaatattcccatttaacagatgtgaacaccgaggaaaggtgggattaggacgttaggacatttgtcatgctcatacactataattgaaatgatatacagatgattagcatggtccctgtgcaaggatgacatgcaaatttgtgaagcatgttaggacatttgtccagccagcatgtygcagacctgagatttaaaccacgtgatctgtctctaaagcctgcattcttcttcttcttcttcttttttttttttttttttttttttgagacggagtctcgctgtgtcatccaggctggagtgcagtggcgtgatctcagctcactgcaacctctgcctcctgagttcaaacaattctcctgcctcagcctcctgagtagctgggattacaggcacccaccaccatgcccagctaatttttgtgttgttagtagagacagggtttcactacgttggccaggatggtctcgtact

SEQ ID NO: 883414 - DNA, 639 bp, Homo sapiens
ccctggctgtatatggccagcagatgtgatgacattttattaatgtagagttgtgaaaattctgaagtctcatatctaaattgtactcctctttaaaaattagatctggtgacaccaggctgacatccctgcatgacatcagacttcctgccttggcaggaagaaaagggtagtgctgccttctttcaatgagacttgtattgcccattgtgccccagtctccatcattccctatttctcttcacctggcccacctcgctccctcatgtgcacctctgtccagcccctgtaggtatttgagtctgtagcccctgaactcagaacctctctggcactaaaattatttggatctgttctatctcaacagctctgtgaagaagatagtattatcayacaccaattttactggtaaggagactgaagcttatagagtagaagggacatgtttaaagcctcaaacctcctgagtctggcctggagacagaacccatgacttttaacatccaaccctctatggagaggttagaggcctaggctaggaccccaagccagagccaaaacctctccccaaggcctggccaggtactttttcccctgattctgtttcttcatccttcagacactgcaaggaagccagat

SEQ ID NO: 883415 - DNA, 646 bp, Homo sapiens
tccacagggctctggccaaggtctggactgattattgacaaattaaaaatataagctattgaccagatgccgggatggagtcccagagctgcagacctgaatctcaatgaggcagctgagcgtgaagatcgattctgcaggtggaggaggaggcggacaaattgccccatgcataatgcagaatctgatgttctggttaataactgcctggtggggaacagacagggggtggcctgcctgagtcagctctctcaccatccaggaaggctcccaccttttacactccagatccagccctcaacagtcccattggagaaggaatcgctaactccattttatggacaagcacatttagagacccacaggtattgtccaaggctgaaagccactaagtgtgagggctgggatttgaacccaggtcctcctaactacaaagcctggtgcttagaggctcaagcaaactatggtttcaatcccagctccatctcttctatctccatsttttctgtgtgactttgggaaaatcaccatacctctctgaacctcagcttccttcctctctttaaaaaggtggataataaaatctactttaaaagactgttgtagggatgaaagagaaggctaggcgtggtgctttctgtgttgg

SEQ ID NO: 883416 - DNA, 543 bp, Homo sapiens
gcaaaaagctatactaaaaatcattgccatctgtgttgctctcgtcaattagtgtctctctctttcattcatccatccatctccctctaacatccctcagtgagcactcatcccactaaatctaaacataccagtttatacaggggctgcctctactgggcggtgacctcctcgagggcagagcatgaggttatgcaacactgcttctccatgtacaacaccttcacggggccatggaccaaagaagggctcagggagtgtttggyaaataaataaatgagtcgtagatgactttttgaggccacacagtgaaattctgacatggaactagaattcaggtctcccagctctcagaacaaggatctgaaaatgtctgctggacgaataagtgaacaaaatacggatagatgaatggcacccccagagacaacagatgaaaagtacttcttccttatccctgcctcactggtgctcaactgggggtgatttttgctctccctaccccgtgaggagacattttggcaacttcttgagatatttttg

SEQ ID NO: 883417 - DNA, 670 bp, Homo sapiens
aatttttgcttttgttgcaattgcttttggagtctttgtgatgaaatctttgcctgttcctatgtccaggatggtattgcctaggttgtcttccagtgtttttatagttttgggttttacatttgagtctttaattcatcttgagttgatttttgtacatggtgtaaggaaggggtccagattcattcttctgtatatggctagccagttatcacagcaccatttattaaataggaagtsttttccccattgcttgtttttgtcagctttgtcaaagatcagatggttgtaggtgccttaattctgggctctctattctgttccgttggtctatatgcctgtttttgtaccagtaccatgctgttatggtcactggagccttgtaacatagtttgaagttgggtaacatgattcctccaggtttgttctttctgcttaggattgccttggttattcgggctcttttttggttccatcattggtagtttgataagaatagcattgaatctgtaaatttctctgggcagtacagccattttcattatgctgattcttcctatccatgagcatgggatgtttttccatttgtttgtgtcttctctgatttatttgtgcaatgttttgtaattttcattgtggagatctttcacctccctggttagctgtattt

SEQ ID NO: 883418 - DNA, 597 bp, Homo sapiens
ttccaattctatataattacaacttataactacagacatgcttggctaactggtcaagcataaattcacacaagtatgtattatgtaggtgtttttagaatgagttcttgagctgtgatttttttatcctgtattaggaatgacagtasaaaagttgtagagtaagaggtatgttggaagatgacaaaaaataactgggtgacaggtcagataaacttttttggagataacagaaccatctgaaaaaaatgtcaaactataatgaattaaatgcctgctgtatacatagcattatatatacactataattaagtatttatttaaaagagtcaaattttaatatgggaacttgccatgaaaagaaacacacagtgcatatttttgaaaagtaaggaatccatttgtaaaatgaacactttccataagaggaaaatgatgatgatatctattattttccataagaggaaaggatgataatatctatttcacacactgtgagaattaaatagatagcttatgtaaatttagcacttgccacagcgtctggctagaatcaacctctagccttatgtcctgctactcacttgtctaaacttg

SEQ ID NO: 883419 - DNA, 640 bp, Homo sapiens
gtagctttggaaaggacaacacccaccagtgtgccatgtcagttcatcattgccatggcaacactcagaacttactgcccctttccatggcaacaacctgacaacctggaagttaccaccctcattctagaaatttctgcataaactaccacttaatttgcatataattgaaagtaggtataaatattagtgcagcattgcctctgagctgctactctgggtacacttcctgtggcgtggccttgctcctcaaggagcagtacctctgctgctgctgtacagttgctgctttgataaaagttgctgtttaacagcactggctcactcctaaattctttactgggagaagccaagaatcctcctgtgttaagccccagtttgagggcttgcctgtcctgcatcggtgtcatcttctaaatctcaaattacttgcaamtggtacatctgtgagttgctcttaaagagccaagcagtccttgtgttagttcaaatccctaagtgttttaagtcttgcatgtgcctggcactgtattaaattcattggggaatacaactgaagtctatgacaaagtctccagtcccaaggaatttatcttctcattatgaaatcgaaagactcatgcctggccatactgtccaa

SEQ ID NO: 883420 - DNA, 620 bp, Homo sapiens
tgccttgatatgttggtacaagctgaaggtaaacgatgtaaatggtctggaaggacagtgaggaagtgaaatcctcccaatgggcagaactttgaacagtatactcagttatttctctcgtatgaaaggaaaaatgagatgcactagggctcctgtgcaatggacaatggattaaccgattgatcagggtgctggaaaaagcaagattggcagattggagacaagtatagggaagaggcatgtgaatggacccattggaatgaccacaaagtgcttagatttgtgtctcacctgatgtycaagagggagtcatccactaacctggcagagatcctctttccttgaccaggctctttccttggccactactttgcttatgcatgggtccatggtggccatgatatcagtgacaagtgctatgcaaaggcccaacagcatgggcttcctcttgctaaagctgatctagcttctgccactgttgagtgttcaatgtgccagtagcagagaccaatactgagctttgatatggtatcatctcttgcagaggctggccagccactgtgtggctagttgagtgcatcagatttcttccaccatagaggaggcagcaatttgtcctt

SEQ ID NO: 883421 - DNA, 620 bp, Homo sapiens
tgccttgatatgttggtacaagctgaaggtaaacgatgtaaatggtctggaaggacagtgaggaagtgaaatcctcccaatgggcagaactttgaacagtatactcagttatttctctcgtatgaaaggaaaaatgagatgcactagggctcctgtgcaatggacaatggattaaccgattgatcagggtgctggaaaaagcaagattggcagattggagacaagtatagggaagaggcatgtgaatggacccattggaatgaccacaaagtgcttagatttgtgtctcacctgatgtccaagagggagtcatccactaacctggcagagatcctctttccttgaccaggctctttccttggccactactttgcttatgcatgggtccatggtggccatgatatcagtgacaagtgctatgcaaaggcccaacagcatgggcttcctctygctaaagctgatctagcttctgccactgttgagtgttcaatgtgccagtagcagagaccaatactgagctttgatatggtatcatctcttgcagaggctggccagccactgtgtggctagttgagtgcatcagatttcttccaccatagaggaggcagcaatttgtcctt

SEQ ID NO: 883422 - DNA, 549 bp, Homo sapiens
attatattaatacacaatctttgtgctataatccatattctcttctatgaaataagagttgtggtagactacataatgacccccatccaaatatatccatatcatgatccctggaacttgtatctgtcatcttatatgaaaaaaagattttatacatgtgactgaatatcttgagatgggatcctaaatgcaatcacaggtttccttgtgagtgagaggtggagggaaactagacacagacagaaaacgataatataatatgaccatagaggcagagatcrgagtgattcagctacacgccaagtaatgcttgcagccaccagacactgaaagaggcaaaaaaaaagagcttctccattagaacctctggagggagcagggcctggccaacatcttgactttgtctcagtgaaatgggcttctggcctccagaatgatgttataataaaattctgtcctcttcagccaccaggtttgtggtaatttgttacagcatctaggggaatttaatactgtttataataaaatgcatgaaacatggtctctggc

SEQ ID NO: 883423 - DNA, 647 bp, Homo sapiens
tgggcctctgggtgccatattaactttactgaaatactcaaacagtccatattagcagattgctttgtttgtgaaatctagagagtgatttggaatttagtgagagctaggggactagcatatttgggagatgttttataattcttatggacaaagaagactggctaaagggaaataaaataattactacttttggtataatagcctataagatatttgttttgcttaagacattatttataggcaacttatccatccacactttttgttttcttgattcacatgtatccaatggtwttaggcaaggaatatttttaatttctaaagactgtggcacatgatgttggtccttttcagtggccactgctctacagcattgtagcaagctgcttaggaatgaaaattaatattaagcacatagatccaaggatatctgtccaaagtttcaggttgatttccacagtgcttttaaaaatcaaataacagtttacaccgtacaaaatctcacatagctcttcactccagcatagtaatcattagtgtcctatgatttttcgtacagatcctataacctaactctaatagtgctgggaaatgtcatggcagctaatgtttacatttcaaggaccctttttatttgaatcagt

SEQ ID NO: 883424 - DNA, 665 bp, Homo sapiens
gaaataatactaaacatctacaacattctgacaaaaacaagcaataggggataggattccctgtttaataaatgatgctggaaaaactggctcgccatatgcagaaaactgaaactggaccccttcctaacaccttatacaaaaattaactcaagatgaattaaatacctaaatgtaaaaccccaaactataaaaaccccagaagaaaatctaggcaataccatgcaggacacaggcatggacaaagatttcatgacaaaatctccaaaagcaagtgmaacaaaagcaataattggaaaatgagatctaattaaactaaaggacttctgcacagcaaaagaaactatcatcaaagcgaacagacaacctacagagtagtagaaaatttttgtaatctatccatgtgacaaatgtctaatatctagaatgtataactaagttaaacaaatttataagaaaaaaaaacgccattaaaaagcaggcaaatgccatgaaccgagacttctcaaagaaagaaatttgtgcggccaacaaacatataaaagaaagctcaacattactaattagtagaaaaatgcaaatcaaaaccacaatgaaataccatctcactcctgtcagaatggtgattattaaaaagtcaataaacaacagatgctggtgaggtt

SEQ ID NO: 883425 - DNA, 610 bp, Homo sapiens
gctgttcctacacactctgcagatgttcccattagttaagaagactcctgatttgagtagctgtatgtggaaaaggtcacagaattattcagacatgtaagacagcctgcatatttgtttttgcaaagactaaaaattatgaggtacagacacaagcttatctataaaatggacaaatagactttaaaaattttaaaacaatgcatttcatttacatgacatgcaataaatacaactgactatatcaccaaaacattccattcttttcacattatgtagctatgtgttcaattctcaaagtaaaattcagtgtaaaatgcacataccttgataggtccagaagttatgggaatcaaamaggagacagcggaataaaggtcacccttgtaattcctgtaaacaaattaggccaaattatccttcaaacatatgtgcatgcaaatccaaagcagtccttatatgaacgaatggaagagatacatgtggggtagggttggaagtggagatgagggttgtgaatataagaacattcattgtgcaattcacaagagataaaggggtccgctttttaaaaggtctacttgaaatttcaactgattatattaagtat

SEQ ID NO: 883426 - DNA, 610 bp, Homo sapiens
gctgttcctacacactctgcagatgttcccattagttaagaagactcctgatttgagtagctgtatgtggaaaaggtcacagaattattcagacatgtaagacagcctgcatatttgtttttgcaaagactaaaaattatgaggtacagacacaagcttatctataaaatggacaaatagactttaaaaattttaaaacaatgcatttcatttacatgacatgcaataaatacaactgactatatcaccaaaacattccattcttttcacattatgtagctatgtgttcaattctcaaagtaaaattcagtgtaaaatgcacataccttgataggtccagaagttatgggaatcaaaaaggagacagcggaataaaggtcacccttgtaattcctgtaaacaaattaggccaaattatccttcaaacatatgtgcatgcaaatccaaagcagtccttatatgaaygaatggaagagatacatgtggggtagggttggaagtggagatgagggttgtgaatataagaacattcattgtgcaattcacaagagataaaggggtccgctttttaaaaggtctacttgaaatttcaactgattatattaagtat

SEQ ID NO: 883427 - DNA, 658 bp, Homo sapiens
acagcaggagaaacctggagtgagattcagatgaaggaagaggcaagtttggccaaaaagctacttgtgaattttacatggaagacaccctggagatacttaaagggcattcaaactttaccaactggactgagataaaaagaatatcaaagaggcatctgtttatttgaaacaattattttcaggaggaaaaagttttcaaagaaattcacttaatgggtactttgaattgacacccatatgctttttgaaaagccatttcaaaggagaagtcatgagcacaaagaaagtgggtatgagaaataaggattgtgataggcaagtatcataattaccatcatcaccatcaccatcatcaccaccaccaccaccagtatcatcrtgatcattaccaccatcaccatcatcatcatcatcatggttaacacttttttcacatttgctgcatactaaaatccttttaataagactttatacgtttatttttatttatctccctcaacaaccctataagcaaggtattattattttcattttttagattaagaaacagaggcacagagaggttaagaaacttgcctcaaatcacacagctagtaaatagcgagttcagaattcaaacccaggcccctctgggttctaagcctatgctctcagt

SEQ ID NO: 883428 - DNA, 576 bp, Homo sapiens
agtacataaaaggtgctcaaaatattttgcctaatgattaaattaagaagaaaatctggacttactctaggcaatatttcctattaaaattagtcaccaaatattgtcttataattatgagatttagtgtagagtcctgaaaaaacaaaaattcttgccttaatagagtttactttctaatgggatggttgcgtaagagayaaaaaacaagtaagcaaaaactatagtaaattacatggtgataacagctgtaaggagggaaagggtgcaaggaatggaggtaagtttgcaattttagagtggcctggaaatgccctatttatagggtgtttcaagtcaagacctgaagaaggtgaaggagtgaacaaaaaaggcatttggaagagcagttcagctagaggaaagagcaaggtctgagtctcagaggcaggagtgttcctgcagtgattgtgaaaagggaagaagccttgtgttgctgaaaataagcaagagtgagcaagagggaaaggtagcggtagatgaggtcaggccaggtcaagtctttctggggccttacggacccttgtaattttgtat

SEQ ID NO: 883429 - DNA, 576 bp, Homo sapiens
agtacataaaaggtgctcaaaatattttgcctaatgattaaattaagaagaaaatctggacttactctaggcaatatttcctattaaaattagtcaccaaatattgtcttataattatgagatttagtgtagagtcctgaaaaaacaaaaattcttgccttaatagagtttactttctaatgggatggttgcgtaagagataaaaaacaagtaagcaaaaactatagtaaattacatggtgataacagctgtaaggagggaaagggygcaaggaatggaggtaagtttgcaattttagagtggcctggaaatgccctatttatagggtgtttcaagtcaagacctgaagaaggtgaaggagtgaacaaaaaaggcatttggaagagcagttcagctagaggaaagagcaaggtctgagtctcagaggcaggagtgttcctgcagtgattgtgaaaagggaagaagccttgtgttgctgaaaataagcaagagtgagcaagagggaaaggtagcggtagatgaggtcaggccaggtcaagtctttctggggccttacggacccttgtaattttgtat

SEQ ID NO: 883430 - DNA, 658 bp, Homo sapiens
catggaaatccagtgctactggctgaccttctgtagctggttgcaagagatgggcaaccaggttcacctggaaaatacagagcacttttcccacagtttctttacactgtcatgagactggatccaatgccgtgttggaaaatgattctcattactttcatattgtgtttaaacagcacctctatgcttcctgaaatacttctatttgttattattcaatatatccttcataattcaaacacaaattataacattaaagattaaaggatgatattttgacatttctttattctgccatactcctgttaatgtctttcattgtttgttttctttcttttttttttttttttttagatggagtctcrctctgtcacccagcctggagtgcagtggcgggatctcagctcactgcaagctccgcctcccgggttcaagcgattctcctgccacagcctcccgagtaattgggattacaggcacgcattaccaagtcctgctaatttttttttttttttaatttttagtagagatggggtttcaccatgttggccaggctggtctcgaactcctgacctcaagtaatccacccacctcggcctcccaaagtgccgggattaccggcatgagccaccatgcccggcctactaatgtttttaaa

SEQ ID NO: 883431 - DNA, 641 bp, Homo sapiens
ctgcagctgtggtttaggcggctgcagcggtaaccaggtaaccagcaaccggggagcgccagtcccaactcagaaggggcgaggctcccacaggctctttggagtgtgcagccgcagcggcgcctccctgctgcagccagaatgatggcagcagcctctgccatcactgacatgacctcaaactgcaccccctacccagtaaatccactatgcctgggccccaggccccttctttctctttctgcaacatagatgctctttccttctctgttctcttgtacttgctgttccctctgcctcaaatgcagaactgtcttcttctcatcacttagatctcaccacctcagagaggccttccctsaacacccaacctaaaacatactctctggtcccattattccatttaattttgttcatagcgctagtttattatctgtgccaacccccacttatacatgctccgtgaaggcagggactttgtattcattggtacctcatactgtgcccagcatgtaacaggtgactattgggcatttttgcatgtataaataaacaaaagtagatgtatttctacacctttaccattctttgtactggctgagtattttctcattgtaaaatgtactataattcatgtcctt

SEQ ID NO: 883432 - DNA, 641 bp, Homo sapiens
ctgcagctgtggtttaggcggctgcagcggtaaccaggtaaccagcaaccggggagcgccagtcccaactcagaaggggcgaggctcccacaggctctttggagtgtgcagccgcagcggcgcctccctgctgcagccagaatgatggcagcagcctctgccatcactgacatgacctcaaactgcaccccctacccagtaaatccactatgcctgggccccaggccccttctttctctttctgcaacatagatgctctttccttctctgttctcttgtacttgctgttccctctgcctcaaatgcagaactgtcttcttctcatcacttagatctcaccacctcagagaggccttccctgaacacccaacctaaaacatactctctggtcccattattccatttaattttgttcatagcgctagtttattatctgtgccaacccccmcttatacatgctccgtgaaggcagggactttgtattcattggtacctcatactgtgcccagcatgtaacaggtgactattgggcatttttgcatgtataaataaacaaaagtagatgtatttctacacctttaccattctttgtactggctgagtattttctcattgtaaaatgtactataattcatgtcctt

SEQ ID NO: 883433 - DNA, 601 bp, Homo sapiens
agctggcacctgagaataatttcttgccctagaaccaagagtgacgggacttggaacaggttctatttgtgtgataccatgtggtgccagatgcagtgccttagaatgacccagctcttccgaaatgttcgttgcacgggtctgagcttgcacacagaagcttcctatttaatacttgttttgaaatgtgaacgctcttcttgctgggctcaattctgcctgtttataaatttaaygagactcggtggccatgagcgtcctcctgtgtgtgcgctgggcaccaggtgcctccccttgccgaatcatttgggtaaaagggactctggtgagtggcgcggaggcctctgtgcgcagccctgttttccctggctgtttggcccagcgcgttcacagatgggaaaacgcgcatcgatgtgggagctgctcgcctcacatccatgttagtggtgcaggaagtatgaaaccgccgcagtcggctccccgttgccacctattcccatgcgaaaggacatcttcattacacttgctttctcactgaaatgcgactcctggaagcatggctctctttggagagaagccgtagcgtggttgatgtcatctc

SEQ ID NO: 883434 - DNA, 601 bp, Homo sapiens
agctggcacctgagaataatttcttgccctagaaccaagagtgacgggacttggaacaggttctatttgtgtgataccatgtggtgccagatgcagtgccttagaatgacccagctcttccgaaatgttcgttgcacgggtctgagcttgcacacagaagcttcctatttaatacttgttttgaaatgtgaacgctcttcttgctgggctcaattctgcctgtttataaatttaatragactcggtggccatgagcgtcctcctgtgtgtgcgctgggcaccaggtgcctccccttgccgaatcatttgggtaaaagggactctggtgagtggcgcggaggcctctgtgcgcagccctgttttccctggctgtttggcccagcgcgttcacagatgggaaaacgcgcatcgatgtgggagctgctcgcctcacatccatgttagtggtgcaggaagtatgaaaccgccgcagtcggctccccgttgccacctattcccatgcgaaaggacatcttcattacacttgctttctcactgaaatgcgactcctggaagcatggctctctttggagagaagccgtagcgtggttgatgtcatctc

SEQ ID NO: 883435 - DNA, 601 bp, Homo sapiens
agctggcacctgagaataatttcttgccctagaaccaagagtgacgggacttggaacaggttctatttgtgtgataccatgtggtgccagatgcagtgccttagaatgacccagctcttccgaaatgttcgttgcacgggtctgagcttgcacacagaagcttcctatttaatacttgttttgaaatgtgaacgctcttcttgctgggctcaattctgcctgtttataaatttaatgagactcggtggccatgagcgtcctcctstgtgtgcgctgggcaccaggtgcctccccttgccgaatcatttgggtaaaagggactctggtgagtggcgcggaggcctctgtgcgcagccctgttttccctggctgtttggcccagcgcgttcacagatgggaaaacgcgcatcgatgtgggagctgctcgcctcacatccatgttagtggtgcaggaagtatgaaaccgccgcagtcggctccccgttgccacctattcccatgcgaaaggacatcttcattacacttgctttctcactgaaatgcgactcctggaagcatggctctctttggagagaagccgtagcgtggttgatgtcatctc

SEQ ID NO: 883436 - DNA, 583 bp, Homo sapiens
cgtttctattgcgctaccctccagttcacagattctttcctctgttccctcttttctgctgtgagctggtccactcagcttggtgtttcagtaatggtatttttcacttctaaaatttccatctgttccttctttatagctatttcctttctgagctgtcttatttctttgctgaggatttctattttttttcgtttgtttcacacatttgtagttgcttgttggagcatatttatcaaagtatctctacaatcactgtgagagaattctcacatttctgtcatcttagtgttgacatatattaattgtcttttttttcactcagtttgagatcttcctggttcttggtatgmaaggagattgttgatgaaaacctggacattttaatattatgttatgagaccccaaatctatttaaattttctgtcttagctggcttctgacactgctctgaaaggataggtggcaggggtgccacctagtcactaccagaaggaggtagaagtccacatttttcatcactgacactcaaaggggggtggtttcttgttattaccaagtgggtttgagagttacagctacc

SEQ ID NO: 883437 - DNA, 615 bp, Homo sapiens
catgtgttatgcgagggacccagtgggaggtaactgaatcatgggggcaagtctttgctgtgctgttctcatgatagtgaataagtctcatgagatctgatggttttataaagaggagttcccctgcacaagttctctctctttgcctgctgtcatccgtgtaagatgtgacttgctcctccttgccttctgccatgattctgaggcctccccagccacatggaactgcaagtccattgaacctctttcttttgtaaattgcccagtcttggktatgtctttatcagcagcatgaaaatggactactgcagtaaattggtaccagtagagaggggtgctcctgaaaagataaccaaaaatgtggaagtgactttagaactgggtaacaggcagaggttggaacagtctggagggctcagaagaagacaggaaaatgtggaaaagtttggaacaccctagagacttgttgaatagctttgaccaaaatgctgataatgatatggacaatgaaatccaggctgaggtggtctcagatggagatggggaacttgttgggaactggagcaaaaatgactgttgttatgtttcagcaaagagactggcagcattttgccc

SEQ ID NO: 883438 - DNA, 567 bp, Homo sapiens
ccttttgagcattagtctgatcatgtcaacactttgctcaaaacctctgatgtcctcctattagagtaaaatctaaagtctttaccatggccttcaaaccctatatgatcttccctcccctaaacaacttatttgacttcatcttcttcattcaccccagtcaaaacaaaccgttctctttgttactctgtgagcagagtaagcacatcccctcctgtgggcttttaccccratggtccctctgcctagattactctttccccagaagccacatggctttttcccttatttccttcaggtctctgcttatacattacttcttaagaaacacctttatgttctatccaagataaaattgcaccccatcctcttcatcactctttttttttaaacatttgtttttttgtttgttagttggttttttgttttggtagagacaaggtctcattatgttgcccaggctgatctcaaactcctggccttgagtgaccctcttgccttggccacccaaaagactgggattacaggcctgagccatggtacctaagcccttcatcactctttatc

SEQ ID NO: 883439 - DNA, 593 bp, Homo sapiens
gttatgtgtcagtaggtgcctaccaatttaagatagtgacattttcttgtagaattggcttttatcattatgaaatgttattctttatctttgctaatacttctcatctttaagtatactttaatattattacagatacaccagtttttctgtttattgtttgagttagtgcttgcacagcatgtcttttcccatccttttacttgcacttattttctgtgacctaatgttgtaaatgtcttttataaayaacatatagttggtgtttttggtttttaaaaaatcctatctggtagtctttgtgttttaaatggtgcatttcattcacctatatttgatgtaattactaaaatatttggttttaaatgttttaatgatgtggtttttttggtcccacctgttttatattcttctttcttctcaatttttgttttcttcttttggataagtgcattttgtcattccatgttttccttaatattaccttggaagttacattttcttttactgttattgcaactgttaccctagagattacaaaatgcatccgtaacataatattgtaaatattgtttggtattcctggacaatcc

SEQ ID NO: 883440 - DNA, 593 bp, Homo sapiens
gttatgtgtcagtaggtgcctaccaatttaagatagtgacattttcttgtagaattggcttttatcattatgaaatgttattctttatctttgctaatacttctcatctttaagtatactttaatattattacagatacaccagtttttctgtttattgtttgagttagtgcttgcacagcatgtcttttcccatccttttacttgcacttattttctgtgacctaatgttgtaaatgtcttttataaatawcatatagttggtgtttttggtttttaaaaaatcctatctggtagtctttgtgttttaaatggtgcatttcattcacctatatttgatgtaattactaaaatatttggttttaaatgttttaatgatgtggtttttttggtcccacctgttttatattcttctttcttctcaatttttgttttcttcttttggataagtgcattttgtcattccatgttttccttaatattaccttggaagttacattttcttttactgttattgcaactgttaccctagagattacaaaatgcatccgtaacataatattgtaaatattgtttggtattcctggacaatcc

SEQ ID NO: 883441 - DNA, 593 bp, Homo sapiens
gttatgtgtcagtaggtgcctaccaatttaagatagtgacattttcttgtagaattggcttttatcattatgaaatgttattctttatctttgctaatacttctcatctttaagtatactttaatattattacagatacaccagtttttctgtttattgtttgagttagtgcttgcacagcatgtcttttcccatccttttacttgcacttattttctgtgacctaatgttgtaaatgtcttttataaataacatatagttggtgtttttggtttttaaraaatcctatctggtagtctttgtgttttaaatggtgcatttcattcacctatatttgatgtaattactaaaatatttggttttaaatgttttaatgatgtggtttttttggtcccacctgttttatattcttctttcttctcaatttttgttttcttcttttggataagtgcattttgtcattccatgttttccttaatattaccttggaagttacattttcttttactgttattgcaactgttaccctagagattacaaaatgcatccgtaacataatattgtaaatattgtttggtattcctggacaatcc

SEQ ID NO: 883442 - DNA, 635 bp, Homo sapiens
tttttagtgattactttcttagggaaactttgaatttatggttgtagcgaatgaggtgtcacgtaaaataaaactgttatataagaacaacatttaaattctattgtcataacagcatatagaaaacaattgaagccatgggtaagaccgtgactgctttaaaaagctgtgtctaataaggggaggggttggagagaaaggaggcttggggaatagggaaatgtatgtggcatgaagtaaagmctgcaaaagtgaaaagtgagagtcagggcacctgagtgttcatcagcaatggctgatctggtgagactcatcggaatggaggtggtgtctgcttctcatttctgtaatggcctcacctagcacagggcctggtcagtaggtactttatacctaataccccaatcaacagagccatatgttgccaagaaggcagaaaagccacaaatgccattgcctgtggcaactcagtgattggggatgtgtgtgagtaagctgagtgtcagcagtggggaaagagtgaactagaagtgagaaagtaaagacatcaactgagggcttctcctcctaaaagtttggctgaaaagagagatgtgggaatagttaaagggagatatatggttaagaaagctttc

SEQ ID NO: 883443 - DNA, 595 bp, Homo sapiens
atcctgactgtgttgattgttgcacaaatctatacatggaagaaagctgcatagcaccacagatgcacacacacagcgaacaaatgtgtgcctgtaaaaactggtgagaacccaacagggtgtttagtgaacagattgcaccaatgtcaatttcctgactctgctaatgcactatagttatacaaagtgtcatattggggaagcyggggagggttctggggattctacttattgttgttgcaacttcctctgagtctataattgtttcaaaataaaggtttttaaaaggagaaaaaaaaagaaaacctctcctgagctctgcttcttcagtgggcagcctgtgtctggatggaggggagggatgcgtgtgtgtgtgtgtgtgtgtgtgtgtgtttgtgtgtgtgtgtgtttctgaactggacatctttttttttttttttttttaagacaaggtctcattctattgcccaggctggagtgcagtggtgcgatcacagctcactgcagcctcaacttccctggctccagtatcctcccacctcagcctcctgagtagccaggaccacaggtgtgccaccacacctggctaaatttt

SEQ ID NO: 883444 - DNA, 600 bp, Homo sapiens
tcgcctccagaattggtcagatctgaagagatcattttacagtgatttcagagagctttttttttttttaaaaaaagacaaactaaatctctattccccaaagaagctaaaggccactcaccaatgccacgcggtgcccacagctctgcaccaggatgcagagagagagcagaggtggctggaaggaggacatggagagatctcagcgctgccgcccttagatcaaaaggcatctttcttcagaaaacatcacacaggccgagagaggcgctggaggggctgctcctgggaagtggaccccccaaatgtcttcggatgcctggagaggctgctggcatccgcctcaggcatgagtcacatcaggtgggggctcctaggtccgagtaggaggaagggacttgactttggccctcctagaacaccggcccaggaggagtatttctgttatacgcagtctccacgraaaagccaggcagcctctccttggcctggagaatgacctccccaagagaaacctgttgccttctggttcttcagagccaggctctgctgggagcacaaagctggctgctcacggctgctcacggctgctcacggccc

SEQ ID NO: 883445 - DNA, 638 bp, Homo sapiens
tttattttggataatacaggctcagaaattactagggctgagacataagatgacaaatttcttaaacttcatttatgtgttggaaaagactgatataattatagaagataattaaattacatgatacaggtcatggaaaaccttatatctacaagtttgctcataaaatgtgaaakgtactcacatttcaggggtcaaaccactggcaatgttttctgctatttgtatgtggcccgttgcatacaatggacattttggctttaataacatgtcattcttcctgtaatgttttaacatggcaggagtatccaaatttctaaaaataaagctatgaatcacagcacagtgattttttcttacaaaattctccctaaattgttctgaaaaatcttgaacatttttttccttctctaataggtcatgtatttatttgcctggtgtttttccatcccattttctactttccatcaattgcaggtattatctcattcaagtagaaatgccctttcaattgtagatattttctccagttaatattttaattgagctaaaatttactttcagtgaagtacagaaattgtaaagatttttataaacaaatatacctgtgtaatcactaccctaataaagatacagac

SEQ ID NO: 883446 - DNA, 589 bp, Homo sapiens
tagaaaaccccatctcctcctacttttggagagaggatcttattttctgtcattctctgtgaggacttttgcatttcctctttccatctgtctgaaaatgcagttacctttctctggtgctgagttgcagaaaacccaagttaattctgtttttcctttgtcctgaaatgcagatacagtttcagagatccagactttaaaatcaaggccctcaaaacaataagcagttgtaaatgctaatgaaagctgtgaccttggtgttytggaaacggcagaaagcccattagctctgtgcagcacaactaatctctgtcagcctcaacaagtcagaccaacaaaacctacaagggttttgtcacttctctagggagatgctgtaatgtgcaaagacaatgctgcctgctctgcatacatttaaagcatcttgccactacattctctaccagtcttctttttccaaggtcaaaactgaagtgtcctttattttgggcttttagtgtttttttttttttttttttttttcagtctttccatgcaaaaagaaaacttcaatttatttgattatttcttatggtcaccagtagagaca

SEQ ID NO: 883447 - DNA, 669 bp, Homo sapiens
cacctttgggtactatggttattaactgggtgacaaaataatctgtacaccaaactccagtgaccgtaattcacccatgtaacaaacctgcacatggatccctgaacctaaaacaaaagttggaaagaaaaaaatgcaacagtaggtcaaaagtccttttaagaagttatgagaatagtgcagataaagtttttagcatatgcctggcacaatagatgctaaatttatcagtagttttgctggtaaggttcaagtcttttattcaagacttcctctccaccagactttgcttacatgaacatcaacagtatttgcctttgtgactttccttttmtacattttcttagttgctaacctggttatatttgtatagcccttttcaaaacaggatacaatactccgataatgtttctgattagcaaatgataaccactttccagtcctgcctctcagatttttcccagagtccaccttgattagcatctatgggttctgtaatctcttgagtctctatttatagaaaattttgagttaacaattactcatgataaatcactttgtgcagatttatgcaagttgactcttaacaggccaatctaatgtctatggtagtaaggtatacgttctcatcatgcccacagactaacaacattgtttaaatgccttcag

SEQ ID NO: 883448 - DNA, 602 bp, Homo sapiens
aagtctaatagtcttctctttcttggttctggagctaagagtatcaaatctccagtgggaaagtcaaacctactttccagtcaaataatgaagccttccatgttaacccctacacaagaggtgcaaagagaatgtatacagggatcmttttatggatgttctggaaagacaacacctgttctttgggccctagtgcctttggttacacccaggttttaaggggatgaatataaatcattttggaagattaaaagaaacccaaaaattataatattcttttgcctcccaagagaaacaatcttcagataattgggatttgatgagagtggtggagctatgcaaatcttatgccattatgagcatgcaataattcagactgttaaaattacgaagcaatccctttgctgtgtgattcagaaggctcggctccctaccttcagattaaaatgaagactgaaagactaaacttcaactatgtctgaatgtctgtgggctgttttccccacaactaacaacattatttaaactcccaacttttaaactgctaaaaccatggaaacattaataatggccctccttcattaaacctcaacttcccctcc

SEQ ID NO: 883449 - DNA, 548 bp, Homo sapiens
aggcaacacccaatcatctgaacaatgagtgcaagcttcaggggaaggggctgctggcggaggttctacctgcatctccgaactctcccccactgcctccctcatgcccttgggaaggggtggcagcctggacataggtctgcagtgccctggtggggagtggtgtgtgtaccgtgcytctctgttctgaggccggggggccaggacctaagtactgcgggaagtttctcagaaaagcaacttggatctggggtgtgcctattccatttatcacattttgagaacacaaggggaagaaaggggaagtggaaaaaagggaaattggcccaatatccattgaatgggctagtccaggccagcaatcagggcccgaggaggaagagacaagaacagaggcagttgcttgtcccagcagagtcagcccagtgttggaaattgaagcccaggactggccttttgagctagaccagtcttctccccttcccactctgcctccccgcaccgcagccaggtacacaggaggactacaaatgtgcgtttcatgtgct

SEQ ID NO: 883450 - DNA, 673 bp, Homo sapiens
tacatttaaggttaatactgttctgtgggaatttgattctgtcatcatggtgctatctggttattttgcacagtagttgataaagtttcttcatagtgtcactggtctttatattttggtgtgtttttgcagtggttggtactggtttttcctttccatatttaatgcttctttcaagaggtcttgcaaggaaggcacggtgataacaaaatccctcagcatcagcttgtctggaaataattgtatttatcctttgcttatgaagatgactttggatggatacgaaattctgggttgaaaattcttccctttaagaatgttgaatattggcccacaatctcctctggcttgtagagtgtgttcttcagctgctggatcaaatattatrtaaatatctattagatccatttggtctaccatgcagaataagcctaaagtattataaatcattctactataaagacacatgcacaagtgtgtttattgcagcactattcacaatagtaaagacttggaagtaacccaatgatagactggataaagaaaatgtggcacatttacaccatggaatactatgcagctgtaagaaaggatgagttcatgtcctttgcagggacatggatgaagctggaaaccatcattctcagcaaactaacacaggagcagaaaacca

SEQ ID NO: 883451 - DNA, 612 bp, Homo sapiens
tttgccaaatgtatgcatatcaaatatatgaattagaattgtatctgatattgtagaattatacagtagagttttacttccttggaattcttaatgtgatatgccaattaatctcatccttcctccaacctcttacaaacactgatcattttactatctttatagttttgcctaatttacaagtcttaccatctcacgccagttagaatggcaatcattaaaaagtcaggaaacaacagatgctgatgaggatgtggagaaataggaatgtttttacactgttggtgggagtgtaaattagttcaaccattgtggaagacaatgtggtgattcctcaaggatctagaactagaataccatttgacccagtaatcccatctaacagatgtgagacggtatctcattgtggttttgatttgcatttctctaatgaccagcratgatgaacatttttttatatgtctgctggctgcataaatgtcttcttttgagaagtgtctgttcatatcctttgcccactttttgatggggttgtttttttcttgtaaatttgtgtaagttctttgtagattctggatattagccctttgtcagatggagagattgcaaaaa

SEQ ID NO: 883452 - DNA, 521 bp, Homo sapiens
aaacagaagaaaggatgtcagagattgaatatcaacttaatgaaacaaagtgtgaagacaagattagagaaaaaagaatgaaaaacaaagtctccaagaaatatgggactatgtgaaaagaacaaacctacgtttgattggtatgtctgaaagtgacagggagaatggaatcaagttggaaaacagtcttaaggatattatccaggagatctcccccaaacctatcaagacaggccaacattcaaattcagaaaatacagagaacgtcacaaagataaccctagagaagaacaactccaagacacataatyctcagattcaccaaagttgaaatgaaggaaaaaatgttaagggcagccagagagaaaggtcgggttacccacaaagggaagcccatcagactaacagtggatctctctgcagaaaccctgcaagccaggacagagtaggggacaatattcaactttcctaaagaaaagaattttcaacccacaattttatatccagccaaaccaagcttc

SEQ ID NO: 883453 - DNA, 597 bp, Homo sapiens
tttttaatgtctttgtttcaatttctatgggctcatcaaaaagactacaaacaatactctcttgtcatttcttttgctagattttattggttcattatttttaacattgtaaggctgtttttagtgttttgcagaagttttatgtttctgtggagtttaccatgttggtatttttttttggaattgtgtttaaytctcagacttcaaatttattctccaatctactgccattgacagttcctttattgttatgttacaatattattattattattattattgagacggaatctctctctgttgccaggctggagtgcagtggcacaatctcctctcactgcaatctccacatcctaggttcaagcgattctcctgcctcagcctcccaagaagctgggattacaagcacatgccaccacgcccagctaatttttgtatttttagtagagacgaggtttctccgtgttggccaggatggtctcaatctcctgacctcgtgatctgcctgcctcggcctcccaaagtgctgggaatacaggatgttacaatgttattttagtgtattgttatttaactattttctatctagattatgaa

SEQ ID NO: 883454 - DNA, 598 bp, Homo sapiens
tcacctttgtgacatctccactatggtctgtgctagtctggcccggtgatccacactcatggttgctcttgcacatttacttagtaagtgcaaggttctgggcgggattgtgatgtattatcttagtatatctttcctgaaatggggtcgggcagaaggagagggattcttttcattttttcagatgaatagatcaaaattatgataacgatcaagggagtatgtgatcaatttctgggtacataatattgagcaagtcacttcrtcttctcagatgtcagtttcttcatttgtgtcctgttgctgtgaggattatttggtataatgcaagaggaaataccttttaaattattatgaaaaggatagggagtgaaatgttttgttatcctgggattgttattttattctgtaacatacgcatgtttcaagcttataagaattattcttcttattatttacccttcaaccattcttaacattctagaactgcttaagatcccacagtacctgaatataggtcttactggaaaaggttaaacttctaagaatagtcacataaattgacatctaacttctcttttggattttgaagaatttg

SEQ ID NO: 883455 - DNA, 636 bp, Homo sapiens
agatggggacaatagatactagggacaccaaaacagggaaaaaggctgaaaaactacctataaggtactatgcttgctctctgggtgacaggatcaagtgcaccccaccctcagcatcacacaataaacctatgtaacaaatcgtcacatgtaccccccgactctgaaataaaagttgaaattgagaaaaagaaaagtaaaaacaaaacgcttaacaacaaataaagtaaagtaccttcattccttaaagcttttgcttgtgttgtttctttgctccggaaagccacccactcccacctgttctacctactatcacgcatttatctctaaagttctaaatyaaatggcactttaaccttgacattcctgatactttctagtcatgattaacattaccctttccctcctctgtgctctggtaatatgctgtttatctacttgaatatttaaaatcacagagctagaatcagagttaaaaaggacctgagaaataatgcggttcaatctagccctcttacattgtaactgagtcacataagtaattagcacttccctttgttattagagttatttgtgaacacatacattttccccactaaacttatacactccttgaatgtttatgtgtttttgtct

SEQ ID NO: 883456 - DNA, 586 bp, Homo sapiens
ggaaagaatttcaaagaaggacgggtacaaacaagcccggagagtggactataatacatacctaataccccaatgcccagacactgaaggccatgttctagcatcagtggcattcaggaaaacatgacctcaccaaatgaactaaataaggcaccaggggtcaatcctgkagaaacagagatatgtgacctttcagacagagaattcaaaataattgtgttgagaaaactcaaagaaattcaagatgacacagggaagaaattcagacttttatcagataaatttaacaaagagatagaaataattaaaaagaatcaaacgaaattctggaactgaaaaatgcaataggcatactgaagaccatatctgtcctttaatagcagaattgatcaagcagaagaaagaattagtgagcttgaagacaggctacttgaaaatatacagtcagaggagacaaaagaaaaaagaataaaaaacaatgaagcacaactagaggatctagaaaatagactcaaaagggcaaatctaagaggtattggctttaaagaggaggtagagaaagagatagaagtagaaagtttgttaa

SEQ ID NO: 883457 - DNA, 581 bp, Homo sapiens
tttacattatagaagagaaactcacaaaagagcactaatttaaagaaaataataatttggtaatactgcaagtgaaaattacaataagaggcattttcaggatagattgataaggtactccctggtatcttatcccttgaataactttatcagctcttctcagcctacaaattatgttaccctaccattatttgayatgtgaggaccaactgatttgctatggaagttttataaatcaatatccccaaagacctagatttccaggcacattttaccagtcttttcttaatgattgacttaattgattttttattttaggttcagataactgaacctgaaatacagaaatagtaaaataatgttaaattggacttgcattcactttatataaggcaacatagagtttatgagtttatgaacttatttccacattatttcactttctcctcctgcacattcaattcctgccacatctaatttctcttaggcttaagtgcttccttgttaatatattctcacacttctgctgccttctttgccttcatgtgtcaaaatgtgcaataagaattgaaagtcccatg

SEQ ID NO: 883458 - DNA, 581 bp, Homo sapiens
tttacattatagaagagaaactcacaaaagagcactaatttaaagaaaataataatttggtaatactgcaagtgaaaattacaataagaggcattttcaggatagattgataaggtactccctggtatcttatcccttgaataactttatcagctcttctcagcctacaaattatgttaccctaccattatttgacatgtgaggaccaactgatttgctatggaagttttataaatcaatatccccaaagacctagatttccaggcacattttaccagtcttttcttaatgattgacttaattgattttttattttaggttcagataactgaacctgaaatacagaaatagtaaaataatgttaaattggactygcattcactttatataaggcaacatagagtttatgagtttatgaacttatttccacattatttcactttctcctcctgcacattcaattcctgccacatctaatttctcttaggcttaagtgcttccttgttaatatattctcacacttctgctgccttctttgccttcatgtgtcaaaatgtgcaataagaattgaaagtcccatg

SEQ ID NO: 883459 - DNA, 656 bp, Homo sapiens
cttggagatttcttaaagaagttaaaacagagctaccatttcacccagtgatataattactgggtgtatactccaaggaaaataaatcattctgcctagaagacatatgtagttgtatgttcatcgctgtgctattcacaatagcagagaaatggaatcaacctaggtgcctatcagtggtggattggataaagaaaatgtggtacatatacatcgtggaatactacgcagccataaaaaataattcaattatgtccttttcagcaatatggatgccgctggaaactgttattctaagcaaatcaacatagaaacagaaaagcaaatactgcatgttctcacttataagttgaaactgtaygttgagcactcatggatataaaaatgggaacagtagacattgtgcactacctgaagggagaagaagtctgtggggcatgaggtgaaaaagtacctactggctactatgctcactacctgggtgatgtgattatctgtatcccaaaccttagcatcatgcaatatacccatgtaacaaacatgcacatgtacccccagtatctaaaatataagttgacttgttttaaaaaaagaaaatgtccattttgatgtgttctatgtgcacttgaaaagaatttacattaacaatattctat

SEQ ID NO: 883460 - DNA, 614 bp, Homo sapiens
aaaaattacctccctgctatggagtgtccctatttgattaataagttatctttaattataatgactagtctccagggatgtaattttttctggacatggtcacctgagactagctttaaaattttagcacaatgggaccagccatgtactgttgacattatatatccttggtttcaggacaatttgaatatgccatgtgcacataaaattttgtgtatgccatgtaacagtcaatcagggatattcgatccttaagtacagctcagtctgattgtgccatgaggtgaccctgragagcttcaaaagataatcattagtgttatgtggcctctgtatcactcctttggggtcatgcaagctgtgtaaaaacttttcttataaatatttctccacattcgcagcctgtatatttgaagaagcaaatcaagctctgaaatattgggcaagtatagcagcattctttttcccattatatccaggtatttgtcttggcaggtgtcaccataatttacatccacagtgaaaaaattgctcagctgcaaatcagccccctacccatgcaattcaatggtggcagttctcttaggatacctgaaaaaaaataaaatagtaaa

SEQ ID NO: 883461 - DNA, 663 bp, Homo sapiens
ctttgaaaactggcacaagataagggtgccctctctctccactactattcaatgtattattggatgttctggccagggctatcaggcaaaagaaagaaagaaaggcatccaaataggaaaagagaaagccaaactatccctgatagcagacaacatgrtattaaatctagaaaaccaaatagtctcagccctaaagcttcttaagctcttaaataacttctgcatagtctcagtatataaaatcaatgtggataaatactagcatttttatacaccaacagtcaagctgtgagccaaatcaggaacaaactcccattcacaattgtcacaaaaagaaaaagttatctaggaatacaggaaattaggaaagtaaaagatctctccaaggagaactacaaaactcttctcaaagaaatcagagataacacaaacaaatgaaaaaatattcaattctcatgcatacgaagaatcaatattgtaaaaatggccatactccagaaagcaatgtatagatttaatgctattctattagactaccactgaaattcttcacagaactagaaaccctattttaaaattcatatgaaatgaaaaggagccccagtagccaaggcaattgtaagcaaaagaacaaagctggaggcatcatactatgtgacttca

SEQ ID NO: 883462 - DNA, 663 bp, Homo sapiens
ctttgaaaactggcacaagataagggtgccctctctctccactactattcaatgtattattggatgttctggccagggctatcaggcaaaagaaagaaagaaaggcatccaaataggaaaagagaaagccaaactatccctgatagcagacaacatggtattaaatctagaaaaccaaatagtctcagccctaaagcttcttaagctcttaaataacttctgcatagtctcagtatataaaatcaatgtggataaatactagcatttttatacaccaacagtcaagctgtgagccaaatcaggaacaaactcccattcacaattgtcacaaaaagaaaaagttatctaggaatacaggaaattaggaaagtaaaagatctctccaaggagaactacaaaactcttctcaaagaaatcagagataacacaaacaaatgaaaaaatattcaattctcatgcatacgaagaatcaatattgtaaaaatggccatactccagaaagcaaygtatagatttaatgctattctattagactaccactgaaattcttcacagaactagaaaccctattttaaaattcatatgaaatgaaaaggagccccagtagccaaggcaattgtaagcaaaagaacaaagctggaggcatcatactatgtgacttca

SEQ ID NO: 883463 - DNA, 656 bp, Homo sapiens
aagcaagaaacaacagctgctactggaatgagcttcagctgtcaggttaaaacacattgttagggtcaggctgacagggactataagatttatctagaaatgggaaagcacatgactcttctttcttctttagcctcccagacctctgggtagtgctttccactggtcaagcataacaggtagacagctkggggtgaagaaatgtggtttgcccactgctttggcatcataaagcagagtacagcagggtgactatgaagctaagaccaaggtttaataactctctgttttttcataaatcgttctagaattttcctaaagttatttcatttcatattaaactgtgaggctaaaatatttacattgcgtgggcatgtctttctgctgtgtttttatttctaaagtagtgctatttaacttacaccgacaataaggactccttcctgctcttatcaagaaatgttaaaaaatctaactttgatttcttgagatttacctagtctgctcctctctccactctctatctggatattctcttgtcttgtctttaatgtctctgtcctgcccaatttaaattctgttcttagcagtttctcattggtgcaggttttgtcctggaaaaggtgctctcaattggtaacaaggcccagcctacc

SEQ ID NO: 883464 - DNA, 647 bp, Homo sapiens
tgtctgctttctacaatacaaggcagtctcaatctaaagagagttacaacgtttctgtctgtcacactgtactaaacacttaaaatctacctaacactcgagttaaaaaaaatcaagtattctcattatagatttgttggtttagtctggcagaggctagtaagataggrtagacttggtgacactgccattaagtgctggaatgatatggactccagatgaggctaaatatataatgtccttcttcctcttctctggagtcatcagcagaagaccatcaccaacactatcaacgacaagaagagaggatcaggaaaacttccttagtgaaattgcagttcagtgagaatcactgatgtgttttcagaatggtttttagggaaaaccattaaaaaaaattgttctaaaaaacctggttgcatacaactaattttacaatttctaagtcagccttgcctgctaatcattggtttctgtaaggccagaccctctacgatgttatagtcttggcacagccactctttgccaagataaatattcataatccaagataaatactggtgattctgcttgttagttggtgtctcatcaatgctcttgctaaactgtagcttaatagggaatcatttgttcccaagaatttataa

SEQ ID NO: 883465 - DNA, 576 bp, Homo sapiens
gtgtccggaatttattccttcctgtgggttcttggtttcgctgacttcaagtatgaaaccccagaccctcatggtgagtgttacagctcttaaagatggtgtgtctggagtttgttccttcagatgttcagatgtgtttggagtttcttccttctggtgggttcctggtcttgctgacttcaggagtgaagccatggaccttcacagcgagtgttacagcttttaaaggtggcacgtccggagttgtttgttcctcccagtgggttygtggccttgctgacttcaggaatgaagctgcaggccctcacagtgagtgttacagctcataaaggtagtgtggacccaaagagtgagcagcaggatttactaagaagtgtgaaagaacaaagcttccaccctgtggaaggagacccaggaggttgccactgctggctcggaggctagcttttatgcccttatttggccctgcccacatcctgctgattggtccattttacagagcgctgattggtccattttacagagtgctgattggtccgtttttacagagtgctgattggtgcatttacaaacctt

SEQ ID NO: 883466 - DNA, 476 bp, Homo sapiens
accatcggtctgatatccatcctctaaaatgtacatgccttaatccagtgaatttaatgtgtattttaccagctttataatgtggatgccctctttagaactgaagctaggtcacatacaattatattatagaatgcagctgctctacactcccctcattaatgagcagacctaatatcttctccttctcttatggtggccatgacttaaaatgtccttgcctggaggaaaaataagcctatcgaatccgtttatacatttattagttgaaagcctcttttaggacacatagaagttrtctatctatattgaattaattacccacatgttatctacattcaagacaggttggttctgggttaacttagtgcccttctgagcagcttgcattgattcacataattttaccaaaaacaattgtgtcattttgccccctttttctctttctcactaaaaagatttctttcatgcttaac

SEQ ID NO: 883467 - DNA, 594 bp, Homo sapiens
taaattctactacaaagagattctctctcagccagataaatttaagactgtggaaattagaagatgccagtgtttttaagcaaaagcccactaaggaaaggataacatatattggcagatagatgacagcagataggaaaagctgcagtctttcaaaccaaaagtaattgattagtaacagaatcatctgagactatgctgatagtagagaggtaattgttattttctctatatatacattaatggagacaatggatcttgtcatatagcactgaatactaaatcacttccctgaaacacatttaagatctagtgagaatggcttgagaaagttggggttcactgaagatttaagtagtacagatgaaaaragaatcatcaccattgtttaattagttcttcaatggatgttcattgagtgcctactttgattcaagtaccgtagtcccactggattcatgggggatgatacattccaagactgtcagtggatacctgaaattaaagctagtaccaaactctgtatatgttatgcttttttcttttctataatacatacttatgataaactttcacttttttagtttaaggaag

SEQ ID NO: 883468 - DNA, 635 bp, Homo sapiens
ttggaagaaccacatatcttctcagcaatcttcaacttgaagtactgtgttagctgccaactgaccgtttttagctctacttgaagagatgcctgagaataaaatcaacaaagagctacgagattaaacatgtatagatatctggtaacattgcataagcaagagaaatcagatacacttgaaaataggtctacctacaaaattttcaatatcatgagctaataaattctatttctgcatatataattgtaagctgcaacagaaagattcctccctaaaatagagtcactataagtaaattaccaacagataactgctaatttcttactggygagttattggaagtttagactaagatgctttcacaggcaaatggagcacacagtagcaatggcaccaggttggatttatttgaggaactttatattgtcaaactcatgcataatctgcattcttgacacaatggcagctttgatcatgagtgcaagaacagtcattggtcactcttggaagatagatgctcgacagctacagaattagtcattatggcattctggtgggaattacaaagaacttctgccatagaaggattttgggcctttcacataagaaacaatatcttctggattttgatt

SEQ ID NO: 883469 - DNA, 603 bp, Homo sapiens
tcacaagtccaagaagtctgtgatgtgtcttacagagaaaatacatgcattaaataaactccattcaggcgtgagtgctgtagtgccgttggctgtgagttcaatgttaatgaatgaacaatgtatattatttatttattcttcatttaattaattattattattattttttttgagatagagtctcactctgttgctcaggctggagtgcagtggtgcagtcttggctcactgcaacctctgcctcctgggttcaagcgattcccctgccttagcctcccaagtagctaagactacaggcatgcgccaccatgcctggctaatttttttttttttttttttttttgtagttttagtagagacggggtttcaccacgttggccaggctggtctcgaactccagacctcaaatgatctgcccgccttggcttcgcaaagtgctgggattacaggcrttagccactgtgcctggccaacaatatatattaaataagcacacatacaacaaaagtaggtgttggtaagcttacaaaagtgtgaccagtagcttgctgaaacctaactttttatttgttcatggaactttctagaccgtaactacac

SEQ ID NO: 883470 - DNA, 643 bp, Homo sapiens
ggtattacatattcatagcatgccgcagaaatcattttaagtctatcaaaaacaactatattgtgcattttcaaataagcacatataaaagatgagctataagaagagagaaggatgctaaaataaataagtgaaagagaaaaatggctgggcacggtggctcaagcctgtaatcccagcacttttgggggccgagaggtcaggagttcaagaccagcctggccaacatggtgaaacctggtctctacaaaaatacaaaaattagctgggcatgttggctcatgcctgtaatcccagctactcgggaggctgaggcaggagaatcccttgaacctgggaggcggaggttgcagtgtgccaagaccgcatcgttgcactccagcctggacaacaagagtggaactcygtctcgaaaaaaaaaaaaaaagagaaaagtaggtgaaaagaagtaattaaatggtaaggaaagaataggtcaggacaggaatccaggatgactttactatatttgaaccatagaacattaaccaaaatcttatttttcttcccctcagtagtttgaagttgagcaatatctgtgtcttttgcatcacactctgaaattgcaaattatttcttgtcctttcagataaatgattatgca

SEQ ID NO: 883471 - DNA, 643 bp, Homo sapiens
ggtattacatattcatagcatgccgcagaaatcattttaagtctatcaaaaacaactatattgtgcattttcaaataagcacatataaaagatgagctataagaagagagaaggatgctaaaataaataagtgaaagagaaaaatggctgggcacggtggctcaagcctgtaatcccagcacttttgggggccgagaggtcaggagttcaagaccagcctggccaacatggtgaaacctggtctctacaaaaatacaaaaattagctgggcatgttggctcatgcctgtaatcccagctactcgggaggctgaggcaggagaatcccttgaacctgggaggcggaggttgcagtgtgccaagaccgcatcgttgcactccagcctggacaacaagagtggaactccgtctcgaaaaaaaaaawaaaagagaaaagtaggtgaaaagaagtaattaaatggtaaggaaagaataggtcaggacaggaatccaggatgactttactatatttgaaccatagaacattaaccaaaatcttatttttcttcccctcagtagtttgaagttgagcaatatctgtgtcttttgcatcacactctgaaattgcaaattatttcttgtcctttcagataaatgattatgca

SEQ ID NO: 883472 - DNA, 667 bp, Homo sapiens
gtagagatagtaacttgtgcataaatgactagaatgttaagttgctaagtgacaagtgacaaaaatgtttaacctgtaaaatcttccccttgggaaattgaggaataaaaacttccaactaaaggaacaaagattgtcatgagcaaagttgtataaaaaataaattaaatgtaggataataaaggtagtgtattaaagtgagaagggttagggtttcttaggtgacagactggcttgattttgtgacttgtgtgatggtagcaagttatgtaacacctctgagtttccatatcttcatctgtgaagtagacatagctgaaccaaccacatggaattgttgcgagggtgaaatgcaatggtgtgtgcaagtttctaggcagtgttggactggatctactattacgctatacaaatgatacttagaatttttacagttatgcttaatattgtcataattccaggaaatgagaaaaatctcagcagaggtacaaaacgsgcaagctctgggaaaaatgatcttagtgggtttatttcaaaggatgcttgaaagtgatctgtggaaaacaaaattgacaaaaagtgcatgttgaaatggaaattaacgggtctttgaatgttaagagaaagatagcgggcatgctctttcatctgtctatccctggccctt

SEQ ID NO: 883473 - DNA, 667 bp, Homo sapiens
gtagagatagtaacttgtgcataaatgactagaatgttaagttgctaagtgacaagtgacaaaaatgtttaacctgtaaaatcttccccttgggaaattgaggaataaaaacttccaactaaaggaacaaagattgtcatgagcaaagttgtataaaaaataaattaaatgtaggataataaaggtagtgtattaaagtgagaagggttagggtttcttaggtgacagactggcttgattttgtgacttgtgtgatggtagcaagttatgtaacacctctgagtttccatatcttcatctgtgaagtagacatagctgaaccaaccacatggaattgttgcgagggtgaaatgcaatggtgtgtgcaagtttctaggcagtgttggactggatctactattacgctatacaaatgatacttagaatttttacagttatgcttaatattgtcataattccaggaaatgagaaaaatctcagcagaggtacaaaacgggcaagctctgggmaaaatgatcttagtgggtttatttcaaaggatgcttgaaagtgatctgtggaaaacaaaattgacaaaaagtgcatgttgaaatggaaattaacgggtctttgaatgttaagagaaagatagcgggcatgctctttcatctgtctatccctggccctt

SEQ ID NO: 883474 - DNA, 679 bp, Homo sapiens
gcccgagatggccctccttgccatgaagtaggcagaaggcgcttagagctctagtttcccaaatggagctcaattgcttgtcatattacatacacgtgctgttatgtgtgatgatgctctgttctaaccctgaaagacctggtggagccttagcaaatcactggccattctcccaaacactgcgtgtgcttatgctatgccgccatagttttacaagcatttttcagcgtttatgcaaatgctgcccttctgtctttggtaactgctttgctcatctttcaggattcagcttacatcttgtcttctctgtgccacattcctgtcagcagccacctcacaccacccgctcctgtgcacacaggcgtacagasatagtcttgttcctctctgctcttagagcaccattcagctacccccagtggagcactaatcccagtgagctgtgatggtttcttggtgtctgtctccccgcgagaccatgggctcttggtgaacagcggctgtagcctgttcagctctgaccctccggaccctcatataacctgtatgacccatgaaggtgcacagcaatgggaaggatgagggaagaagaaggatcttttcaaactctgtacattcttcacacagaaaagcaggctcatatcagctgacttgttctcccaggcagagaacaagagtg

SEQ ID NO: 883475 - DNA, 567 bp, Homo sapiens
ggacattagccaaggcatataacttatgacaaattcctcaaaagcaagcacaacaaaaataaaatcagacaaatgggatataattaaattaaaactttctatggaagatgaaatttagataattataaaataaataggcaaatatgaaaatattaaaattataatactttgtgaccatgaaaagattgtcataatttacatttctttcaaattgataatggtatcctgggattttgtgttgtatccaggcataatttcagatgaaatataattgttagtatgattttttttattaactgagaggctgtatgattattataagtcctcagatttggaactgttagagggcttactcttattcttccaagaatataaaaaaagtaatggttrtccattgcttagtgagtaggtgacataaagaaaaatattttcaagaattctttttacagcaagtctttttctaactgagtagattcaccagatattgcttattgggatgcatatattataatccttctaacagtggttctcaatattcattgaacataaaaacccttgggaacttgt

SEQ ID NO: 883476 - DNA, 499 bp, Homo sapiens
tcaagggtattctcaaacccataatctagtataggccaaactactgggctgctttctgtagcccttctcattgacttacttggtcgttgtctagtaagttaccataatgataacttatagctgatgttattgaatcactgcaaacattctctggaccaccaagctctaactagcaaagaaagaggttttgttaatctctacatttgccccttccccaaaaataaaaataaataaaaagtagccatgtaatgtcatagcgaattcatttgagcacagaagtaataagttcaattttataaaggttggtgcaaaartaattgtggttgaaagtaatggcaaaaccaattacttttgcaccagcctaatatgagtcaagcttcataagagttattggccatctgaagagctgtgttgagaaggaatctgataccataccaaagatcaatgtgaaatcatgatttgattaattaaatatgctatgaatatgagagaggggaaa

SEQ ID NO: 883477 - DNA, 596 bp, Homo sapiens
taaaagtgtggcactttcccctttctctctctcttgctgctgtgtaagacttgacttgctttcccttctgccatgattgtaagtttcctgaggtctccctagccatgtggaactgtgagtcaattaaacctcttctgtttataaattacccagtctcaggtagttctttatagcagtataaaaatggactaatacagaaaaatggtagtgggagtttggggcactgytataaatttacctgaaaatgtgaaaatgattttggaactgggtaatgagcagaggctggagcagtttggagggatcaggagaagataagaatatatgggaaagtttggaattttctagaggcttgttgaatggttttgaccaaaatgctaatagtgatatggacaataaagtccaggctgagattgtctcacatgtagatgaggaacttattgagaactggagtaaagttactcttgctatgctttaggaaagagactggtggcaatttgtccctgccctagagatctgtggaactttgaacttgagagagattatttaggctctctgggagaggaaatttctaagcagcaaagcattcaagaagtgac

SEQ ID NO: 883478 - DNA, 596 bp, Homo sapiens
taaaagtgtggcactttcccctttctctctctcttgctgctgtgtaagacttgacttgctttcccttctgccatgattgtaagtttcctgaggtctccctagccatgtggaactgtgagtcaattaaacctcttctgtttataaattacccagtctcaggtagttctttatagcagtataaaaatggactaatacagaaaaatggtagtgggagtttggggcactgctataaatttacctgaaaatgtgaaaatgattttggaactgggtaatgagcagaggctggagcagtttggagggatcaggagaagataagaakatatgggaaagtttggaattttctagaggcttgttgaatggttttgaccaaaatgctaatagtgatatggacaataaagtccaggctgagattgtctcacatgtagatgaggaacttattgagaactggagtaaagttactcttgctatgctttaggaaagagactggtggcaatttgtccctgccctagagatctgtggaactttgaacttgagagagattatttaggctctctgggagaggaaatttctaagcagcaaagcattcaagaagtgac

SEQ ID NO: 883479 - DNA, 456 bp, Homo sapiens
catgggctggatgcagtggctcaggtctgtaatcccagcacttcaggaggctgagtcaggtggatcacctgaggtcaggaattagagaccagcctggccaacatgatgaaacctcatctctactaaaaacacaaaaattagctgggcatggtggtgggcacctgtttcagctactcgggaggctgaggcaggagaatggcttgaacccrggaggcggagattgcactgagccaagatcatgccattgcactccagcctgggcaacaaaagcaaaactccatctttaaaaaagaaaaaaaacaaagaagaagaagtgacctggctttttgtgaaagcatacattcatgtgttcacaaagagatggtctgaaattggaacttatgtttaaaagggaaggagaaagcagagcataaaaatttggaaagtttgcagcctgaccatatggtatgatatggt

SEQ ID NO: 883480 - DNA, 580 bp, Homo sapiens
cttctgtttatcaataatatggctttgggcaagtcattccaattctctgagcctcatttttttcatttctatttgaggaaaatgatttctttgtcatagtcactgaaaacgttgggtaaaattatatgacgaaaacatccctagtgcttcttacatgccaggcactattctgtgggctttacatattataactcatgtgatcttcacaatatatctacaagctagctaccactaccatcatcaattaataaaggaggaaactgatgcatagggaggttaagttgagcagctagatagtgattcagagtggattcagacctggrtggtctgatttgtgagcctgtgctttaattactttcctgccttttctaacttgcatactggcttaaatggagtttaataaatgctcctttaatgctgctgtttattcatccaatatatagaagctcaggacagaaaataggcaaaaatggcctgttagtatttatctctaacttgaactcaagatgaagagactgatccatgtatctttccccctgcccattacctgtttcaaaggatatagctgtcagtctttttc

SEQ ID NO: 883481 - DNA, 594 bp, Homo sapiens
agcattcacagtgactggttcaggctggcctgtgtttttcctagatcatctttattgccagtgtccgcagttgctggaagactttccaggatcctgcatgcatatggcttttgatggaaaaatgtctcccttggcatctccttgtaggagtcacatatatcaaaacccagctcccagaccacccttccagccaaacattcataaacgtccaggagggaaagaagttatgcaggaagactatatctcttaataaaatcttgagagagtttccatttcatttctaataaatcttctgtaagtgagtgttgtacaatactttcttaagaggcaaaattgcctccaaatcttttcctggatcaggactacagaatcatttgtacccgtctaacacatcataatctatctttggcttgacagtartagacactattttttatttcatatagtatattattattcaagctcttttttaataagtaggttttcactgaatacaccttcttcttaataaaaaagtctaataaaatttagcataaatgtcattatttccccttttattaaaacttgttttaggagctctgctctatatttttg

SEQ ID NO: 883482 - DNA, 630 bp, Homo sapiens
acacaaaagcttacatttattattttttctttctttaatctttttttttaaaaaaagaaaacaacttttattttagatttaggggtacatgtgcagctttgttatacaagtaactcatgttacaggggtttgacgaacagattattttatcrccgaggtactaagcctagtacccaatagttctttttttctgctcctcttcctcctcccaccctacaaattaaatctgattctaacgtggttaagagaaacagtttctattatattcagtgatcctttcatctccccaaagtcacgaagtaagaataataataattattttagctatttcattatagtcagttaaacatggttaacacatagcacactgtggttcagacaccatctaagtgtttcatctttacaaactcacttttcacctcaaccaccctaggagttaccattatttttacccattttatagatgaagatgttgaggcacaaagatcttcagtccaagctcacagagtacacacagaagctgacatttgaacccagaaggcttgttctagaatatctgctcttaataactatggaaaataacaatcctagcacttagaggtcacctagcaaaatggagaaaggccttgt

SEQ ID NO: 883483 - DNA, 560 bp, Homo sapiens
attactgtaattagtatccaataatacaaagaaaaataagcagaatgttctacctataatcagatataataaaatttttacagttgcatctttgcccatttttaaagggtcagagactaaatccaattaagaatttggtgtaattctgtgaaattaaaactatgttttatgttttcttctatgaaagaagctaaaaataatgtgtaaatacaggtcaagagaaggaactataattacagtaacaatattaaaagcaataaatctatatgaaataagtgtggaacccattttgagaaagaaaatataaaaatcaagcaaggttgatattcctgctactggtataatcgcaatttcttgaaatgccctaattcaggtatggctttcattttagaaagcattttaatgccatgtaacagctctygagttcataactcttcaagattgacaagaaatagttcattttctatactgtgctttattaaaatatagaaaaccgagacatcaggaacggaagcactttgcacaaggacaaaagcctgacagaaagaagttcagatggc

SEQ ID NO: 883484 - DNA, 503 bp, Homo sapiens
accacatcaagcttatttatttatttagactaagatggtaggccataaaataagtcacaataaattgaaaaggattaaaataattgagactatattctgactataatgaaattaaattagaaatcaagagatctgcaaaatccccaaatgtttagaagttaacatgcttataagtaatcaatgagtcaaaaaagaaatcacagaagacaagaaaatattttgaattgaattaaaaacacagtatataaaaatttgtaagatacagctaatgcagtgctgaaaaggaaatttatggcttaaatgctattagaaaaaagaygtaaaaatcaatggtttaggcttctactttaaatagctacagaacaaattaaacccaaagtatgtgtaagaaagaaaataggccgggtgtggtggctcatgcctgtaatcccagcactttgggaggatgaggcagacggatcacctgaggtcaggagttcgagaccagtctgaccaacatggaa

SEQ ID NO: 883485 - DNA, 610 bp, Homo sapiens
attctttctcagcaactttctaaagctgagagtaagtccaggtgcctcaaaactgagctccataacacaagagaggctctgaaagaaaacgctttggtttttgaacacatacaaagagagctaaaccaaacggtgtcaaatgaaggacattgaaaaaatgtacacaagtggccaagataaagtagaaaaatgcacagaaaagcaagtaagattatgtcaactacgaagayaaaatatgttgcttcaacagcaactggatgatgttcacaacaaagctgacaatcaagaaaaaacagtaattgatagtcaagccaaatgtgatgctacagcacaaaatcttcaagctgagtgcataaagcaccgtcttttgctagaagaacaagaggatgatcaataaagttaatcatttgaaagaaaaacaatgtcaatatgaaagagagaaagcagaaagagaagtagttgtgagacaacttcaacaaaaacagggtgacgtcctaaacaatcaacaacaaaagctttgctggatgcttcattgcgtcactgcgtccattgagaaagtgagatgtaggattcaaggaagaaattaggtcagatgagaattcaatttcaa

SEQ ID NO: 883486 - DNA, 610 bp, Homo sapiens
attctttctcagcaactttctaaagctgagagtaagtccaggtgcctcaaaactgagctccataacacaagagaggctctgaaagaaaacgctttggtttttgaacacatacaaagagagctaaaccaaacggtgtcaaatgaaggacattgaaaaaatgtacacaagtggccaagataaagtagaaaaatgcacagaaaagcaagtaagattatgtcaactacgaagacaaaatatgttgcttcaacagcaactggatgatgttcacaacaaagctgacaatcaagaaaaaacagtaaytgatagtcaagccaaatgtgatgctacagcacaaaatcttcaagctgagtgcataaagcaccgtcttttgctagaagaacaagaggatgatcaataaagttaatcatttgaaagaaaaacaatgtcaatatgaaagagagaaagcagaaagagaagtagttgtgagacaacttcaacaaaaacagggtgacgtcctaaacaatcaacaacaaaagctttgctggatgcttcattgcgtcactgcgtccattgagaaagtgagatgtaggattcaaggaagaaattaggtcagatgagaattcaatttcaa

SEQ ID NO: 883487 - DNA, 610 bp, Homo sapiens
attctttctcagcaactttctaaagctgagagtaagtccaggtgcctcaaaactgagctccataacacaagagaggctctgaaagaaaacgctttggtttttgaacacatacaaagagagctaaaccaaacggtgtcaaatgaaggacattgaaaaaatgtacacaagtggccaagataaagtagaaaaatgcacagaaaagcaagtaagattatgtcaactacgaagacaaaatatgttgcttcaacagcaactggatgatgttcacaacaaagctgacaatcaagaaaaaacagtaattgataktcaagccaaatgtgatgctacagcacaaaatcttcaagctgagtgcataaagcaccgtcttttgctagaagaacaagaggatgatcaataaagttaatcatttgaaagaaaaacaatgtcaatatgaaagagagaaagcagaaagagaagtagttgtgagacaacttcaacaaaaacagggtgacgtcctaaacaatcaacaacaaaagctttgctggatgcttcattgcgtcactgcgtccattgagaaagtgagatgtaggattcaaggaagaaattaggtcagatgagaattcaatttcaa

SEQ ID NO: 883488 - DNA, 644 bp, Homo sapiens
tttccttttccaattatttctgagaaacagcagagagggtctggttttatggtcgaaaagtatgtctgcttctcacttttcagttctttttttaagtttttgtgcatacataataggtatattaatatatgaggtacataaaatgttttgatacaggcatacaatgcgtaataatcacatcagagtaaatgggatgttgatcacctaaagcatttactctttctttgtgtkacaaacaatccgattatactctttaaatcattgttgactgcagtcaccctgttgtgctaccaaatgggggatcttatccatatttttgtacccattaaccattcccactacctgccccacctcaaaacccttcccttttgttttactctctatcatgagttctattgttctaatgtttaccccccacaagtaagtgagaacatgcaaagtttgtctttctctgcctggcttatttcacttaacataatgacctctacttctctctaagttgttgcaaatgacaggatctcattctttttatggctgaatagtactccgttgtgtatatgtaccacactttctttatccattcttctgctgatagacatttaggttgcttccaaatctgagctattgtaaatagtgctgtaata

SEQ ID NO: 883489 - DNA, 628 bp, Homo sapiens
tacctatattagtctgttcttccactgctatacagaaatacctgagactgggtaatttataaagaaaatgtgtttaattgtctcatggttccacagaaagtataatgccagcatctgctcaacttctggggaggcctcaggaaacttaccattatggcagaagggagaacacagacatatgaccagggtaggattaaggaggtgggggwtgtgctacacactttcaaacagccagatctcatgagaactctatcataagaacagcaccaaggaaatggcagtaagccattcatgaaagatccacccccaagattcagtcacctccccctaggccccatctcaaatattgaggattaccaattcacatgagattttttggggacacagatgcaaaccatatcatatgtcttcttttaagaaatgtcttctcagatcttttgccattttaaaaattagattattagttttttctctatagtgttgagttcttcatatattcttgatattaattccttgtcagatggatcatttgcagatattttcacccattctcttggttgtctcttcactttgttgttttctttgctgtgcaggagctttttaactttatgtgataccatttgtccat

SEQ ID NO: 883490 - DNA, 602 bp, Homo sapiens
ttttctacagagttgcttgagcttcttattaatatatattttggttattaatctcttgccagatgggtagttttccatttttttttactcttgttatctcttcattttgttatttactcttgttatctcttcattttgttgattgtattctttgctgtgcagaagctttttaacttgatgtgatcccatttgtctatttttattatagttgcctgcgcttgtggggtaaagctcaagaaatttctgcctagaccaatgtcctaggaattttccctaatgtttttgtctagtaattttgtagtttgatgtcttagatttaagtttttaatctatctttattttacttttgtatatggtgataggtgggatctagtttctttmttctgcatagggatattcacttttcccagcatcatttatttaagagaccatcttatccccagtgtatgttcttggcatctttgtcaaaaatgagtttactgtaggtgtgtggatttatttctgggttttctattctgtttcattggtctatgtgtctgttttcatgtcagtaccatgatattttgattactacagctctgtagtataatttgaagtcaggt

SEQ ID NO: 883491 - DNA, 639 bp, Homo sapiens
ctgctaggaaacctcattaggtctggattctggccctcagaggtggattcacttcaaccaagctcacagagggccatgtttaaaattttaaaatgcccaggatttggaggctcaaaactcaatttgataatgttccagattgattgaacccacactatcaaaccctccaaagactgctagaataaagctgaacactagtgtacccatttacaatgacatatataatatatgtaacccatttataatgatacatataattcatgaggtgacagatcctcatataatctccctactgataaataacataggaagacaaaatataatccaaagctcgcttagtgaccrtggaagcaatgtcaacccaaggtataagctttgaatatctaattatggcatcatgttaaaatatatctctataaatagggtattataaataaaatattataataatagctaacatttattgagagattactgtgtgtcaggcaccatactgaatacataaattatctccttttattctcacaatggctctatatggtaagtaccattattaaaattcccatgttatagacagaaactgaggctcagaaaggtataaccacttgcccagggtcatgaagctggggagtggtgggc

SEQ ID NO: 883492 - DNA, 577 bp, Homo sapiens
gttcccaaagactcacattatttcccaaaaaaaatccagtttacctttatgggaagaaacatggcccacacctcttcacctttactctggacatttacatgggctgctcaaccatggtataatagtaatgacaacatcaacaccagctatcaattatttaagtgcctatgtgccagaacttatcttcacaacagccctgcagagtaggtatcattactcccatcttataaataaggtaacagaatgtcatattaaatgtcctgcccaaagcacacagctggtgtctgaacyaggattaaaatatccatctggggccgggcgcggtggctcacgcctgtaatcccagcactttaggaagccaaggagggcagatcacttgaggtcaggagttcgagaccagcctgaccaacatggtgaaaccctgtctctactaaaaatacaaaaattggccaggcatggtggcacgtgcctataatcccagctacttgggaggctgaggcaggagaatcgcttgaatccgggaggctgaggttgtggtgagtcaaaattgtgccactgcactccagcctgggtgaca

SEQ ID NO: 883493 - DNA, 621 bp, Homo sapiens
atccagtattaagcactaactaatcattaaagaagatctattatgtgaaagctttgggaaaaaaaaccatgagtggtgctgaaatattcaaaatgttaaatagcagtgttaaaattcatggttttccctcaaacaaatgtgatgaaatttgcactgatgcaaaagctatggtgggtaaaactgcttgcactttatcataagtcagggtagtgacaccaaactgcaatagtagtcattgtagttttcactgccaagcacacacattttwaaaaaagctagtttcacttaagaatatacttgaagaggcagtaaaagttaatttcatcaaatcttcacccttgactacatgtcttttttgatattatgtgtgatgaaatgggaagtatgcataaagtacttctggtacatactaaagtatgatggtcatctagaggaaaagcacaagtgtgattgacttgtgagatgaactgaacactttttaaatgtaacactatttttacttgaaagaaaaactgacagacaaactcttattcaaactcaagtattttgtaggcattttcttggaaatgaacaaagcaagcctgttacttcaaggaaaacaactgacagtgttcatagcca

SEQ ID NO: 883494 - DNA, 707 bp, Homo sapiens
acacagagccaaaccatatcattccgcccttggcccctccaaatctcatgtcttcccatttcaaaagcagtcatgccttcccaacagtctcccaaagtcttaactcatttcagcattaatccaaaagtccacagtgcaaagtctcatctgagacaaggcaagtcccttctacctatgagcctgtaaaatcaaaagcaagctagttacttcctagatacaataggggtacaggtattgtgtaaataaagccattccaaatgggagaaatgtgccatagcaaaatggctatagggcccatgcaagtccgaaatctagtggagcagtcaaattttaaagctccagaatgatctcctttgactycaggtcctttgacatccaggtcaccctgatgcaagagttgggtttccatggtcttgggcagctccgcccctgtaactctgcagggtacagcctccctcctggctgcttttatgagctggtgttgagtgtctgcagcttttccaggtgaacgtgcaagctgtccgtggatctaccattctagggtctggaggacagtggccctcttctcacagctccactaggcagtaccccagtagggactctgtgtgggggctctgaccccacatttcccctctgcactgccctagcagaggttctccatgagcaccccgcccctgcagaaaacttctgtctgggtatcccggcat

SEQ ID NO: 883495 - DNA, 655 bp, Homo sapiens
ccagcctattcagaaaggtaagtacaaagtcttttggcaaatgttgaatgtcaatgttcctaaggagagtaaagctgggaccaggcaaacagcacaggctgcatggtcctgggtctgggggagcagaagctgtgagatggagtcaaatggggcaaagagccagatgcaaaggtgagtgatgcaagcagggttagccatcacccgagtgtggaatgcagcctgggggcaaattttcacagggtctctgctggctcacatgatttcctgggcttgcatttctcacgctgagcagctgagcaggtgcactggccgaccatggagagaagcactgcaatcacacttcagacaagggagaaagyggcaaagctccaccccactaacaaccgtaagaatcttccttttaggaattttgaattctccaaatgtgggccaggctgctaactaaacgtaaatggtactggacaaggttaaatcatgaagtcaaaaatagacacacaacattatgcacttgagttctacgttttaagatgggctttggcgtttcataatccaaggtgatttccagccccaggttatgtattaaacatatggcatattgtggtttacaaagcactttcctatgattatctatttagagcttcacaacaaccatgta

SEQ ID NO: 883496 - DNA, 655 bp, Homo sapiens
ccagcctattcagaaaggtaagtacaaagtcttttggcaaatgttgaatgtcaatgttcctaaggagagtaaagctgggaccaggcaaacagcacaggctgcatggtcctgggtctgggggagcagaagctgtgagatggagtcaaatggggcaaagagccagatgcaaaggtgagtgatgcaagcagggttagccatcacccgagtgtggaatgcagcctgggggcaaattttcacagggtctctgctggctcacatgatttcctgggcttgcatttctcacgctgagcagctgagcaggtgcactggccgaccatggagagaagcactgcaatcacacttcagacaagggagaaagtrgcaaagctccaccccactaacaaccgtaagaatcttccttttaggaattttgaattctccaaatgtgggccaggctgctaactaaacgtaaatggtactggacaaggttaaatcatgaagtcaaaaatagacacacaacattatgcacttgagttctacgttttaagatgggctttggcgtttcataatccaaggtgatttccagccccaggttatgtattaaacatatggcatattgtggtttacaaagcactttcctatgattatctatttagagcttcacaacaaccatgta

SEQ ID NO: 883497 - DNA, 603 bp, Homo sapiens
aaaacaaaatagaagcaacaaaatcatcaatatatgtgcaggtaatagagatgaattaacaacaccaaagtatacaaatcatgtatttcgatattctagggcacaaaagtgtatgtttctacatactagcaacaaccaattaggccccatratgtgatgctgctgtaaaccaattccaggtggctaaaatttcttttaaaatacctgaaaactaacaatatcagttgttcataaggatgtgagacagctgaaacttgcatactctactcctgggaatgtaagttgatcctaggaaaatgttttgcagtatctactaaaactatacagatcataacccatgacttagaaatttcacttctagatatgtgccccaaataatataaatacatgttcatcaacacacatgcaagcatgttcatagaaactattcatgacagtctatgactggaaaccactcaaatatccaacatacttagacaaatcagttcgatgtgtaaatagaatgtattgcacaataaaaaagaagaaagacctgcttcatgtaacaacatagaagactctcacagacataatggtgaataaaataagtcacaagatactaac

SEQ ID NO: 883498 - DNA, 603 bp, Homo sapiens
aaaacaaaatagaagcaacaaaatcatcaatatatgtgcaggtaatagagatgaattaacaacaccaaagtatacaaatcatgtatttcgatattctagggcacaaaagtgtatgtttctacatactagcaacaaccaattaggccccataatgtgatgctgctgtaaaccaattccaggtggctaaaatttcttttaaaatacctgaaaactaacaatatcagttgttcataaggatgtgagacagctgaaacttgcatactctactcctgggaatgtaagttgatcctaggaaaatgttttgcagtatctaytaaaactatacagatcataacccatgacttagaaatttcacttctagatatgtgccccaaataatataaatacatgttcatcaacacacatgcaagcatgttcatagaaactattcatgacagtctatgactggaaaccactcaaatatccaacatacttagacaaatcagttcgatgtgtaaatagaatgtattgcacaataaaaaagaagaaagacctgcttcatgtaacaacatagaagactctcacagacataatggtgaataaaataagtcacaagatactaac

SEQ ID NO: 883499 - DNA, 614 bp, Homo sapiens
gcacaaccttggctcactgcaacctctgcctcccgggctcaagcgattctcctgcctcagactcccgagtaagtgggaccacaggtgccgccaggcccagctaattttcatattttttagtagagacggggtttcaccatgttatccaggctggtctcaaactcctggcctcaggtgatctgcccacctcgacctcccaaagtgccaggactacaggcgtgagccaccrcacccagctgagattgtgttttcttacgaaaacaaggatctttcccaagtctcccacctgctgtggaattccatccagtgcgtgtctagtcatctcttgcatttcatgtgcataacatttcactttagtcaacagtcatttgtctggaggctgctggagtcgttctcacaagacctccacctgtgggatgggtgcggcaagccagaatccacctaccatttgccacttcaccattcaacaactagtcaaagttgcattccaaacacaataaccaaggaaaccaggcaggaaaaggcacccgagggagagaaaggaaagggctgggaagaggacatcccaccgagggcctccgaaggtgagtgcaggctgctttttaacgcctgct

SEQ ID NO: 883500 - DNA, 614 bp, Homo sapiens
gcacaaccttggctcactgcaacctctgcctcccgggctcaagcgattctcctgcctcagactcccgagtaagtgggaccacaggtgccgccaggcccagctaattttcatattttttagtagagacggggtttcaccatgttatccaggctggtctcaaactcctggcctcaggtgatctgcccacctcgacctcccaaagtgccaggactacaggcgtgagccaccgcacccagctgagattgtgttttcttacgaaaacaaggatctttcccaagtctcccacctgctgtggaattccatccagtgmgtgtctagtcatctcttgcatttcatgtgcataacatttcactttagtcaacagtcatttgtctggaggctgctggagtcgttctcacaagacctccacctgtgggatgggtgcggcaagccagaatccacctaccatttgccacttcaccattcaacaactagtcaaagttgcattccaaacacaataaccaaggaaaccaggcaggaaaaggcacccgagggagagaaaggaaagggctgggaagaggacatcccaccgagggcctccgaaggtgagtgcaggctgctttttaacgcctgct

SEQ ID NO: 883501 - DNA, 663 bp, Homo sapiens
gtcccctgatcactggctttttttcaacattcagcttgcatattgcccttcagtggcctctgctattacgacccagccagtggggggccatatcagttccttcctcacatttaaaaactactgagtgaatacatgcacagttccaggcacagagttaaacattgaatrgaggttactatgaaaaccaatgtgtaaactcagtccaaaataagtatggttataaaacgtctttgctcattcaataaatcctttttgagtgcctactttgtgccttttgttgtttattccttatgtgggcaactgtcaaaaagctgtgagaaagggcttatgctatttaaataatttcttctctctctttgtattcttctccatttctccttttgttctcccccctttctcctcctcttcctcctccttcatttccttcggctttctttttcctatatgcatacagtttttgtgtccgggagaaaaaaggtctagagagctagatttttagagagcattaaaaaaaacttgcctgaattattgattcatagctttataatgcacccagtatagtaaggacatttatagatttcatgagctgtttaatatctatttgtggagtaccaccatgtgcaatcatcttggactcattatgtttctttggctgcccagtga

SEQ ID NO: 883502 - DNA, 663 bp, Homo sapiens
gtcccctgatcactggctttttttcaacattcagcttgcatattgcccttcagtggcctctgctattacgacccagccagtggggggccatatcagttccttcctcacatttaaaaactactgagtgaatacatgcacagttccaggcacagagttaaacattgaatagaggttactatgaaaaccaatgtgtaaactcagtccaaaataartatggttataaaacgtctttgctcattcaataaatcctttttgagtgcctactttgtgccttttgttgtttattccttatgtgggcaactgtcaaaaagctgtgagaaagggcttatgctatttaaataatttcttctctctctttgtattcttctccatttctccttttgttctcccccctttctcctcctcttcctcctccttcatttccttcggctttctttttcctatatgcatacagtttttgtgtccgggagaaaaaaggtctagagagctagatttttagagagcattaaaaaaaacttgcctgaattattgattcatagctttataatgcacccagtatagtaaggacatttatagatttcatgagctgtttaatatctatttgtggagtaccaccatgtgcaatcatcttggactcattatgtttctttggctgcccagtga

SEQ ID NO: 883503 - DNA, 585 bp, Homo sapiens
tacctcatccatgcagcagttttgtcgtatgggtccctttgatattaggagtgaccttcctccttggtgccagagagattttagctggagtgcagtggcgtgatctcggctcactgcaacctccgcctcccgggttcaggcgattctcccgcctcagcctcccgagtagcagggattacaggcatgtgccagcatgcccggctaatttttcatttttagtagatatgaggtttctccatgttggtcaggccggtctcaaactcccgacctcaggtgatacacccgccttggcctcccaaagtgctgggattasaggcatgagccaccaggcccagccagtttctttcttttgacagatgcaaaagtctctctttttctgtgagatcctggacctcctctgtctgccaaggctgcacatgtctctctccccactttacagattaggaagaagaaataaaaagctaaagtgcataacataaactctgaatcaacccttcttcctgtccttcccaacagaacctgaatttgcctgggtgtcatatactgccctctatgcaacagctatgactcagagagcagtaactc

SEQ ID NO: 883504 - DNA, 556 bp, Homo sapiens
aagagagtgattccatgtgctggggagagggagagtgcagcaattgtgtggcaatgagctcagtgctgttctgttattgcagaaagtaaaaccagcagaaactcagctgacacctgtccatggagggagcatttaaaccagtcctagccagaggaaaatcactgatgccagctgtcagaacttgaggtcctacaggtcttgccaccatgggctaaagtgctctggggacctaaacttgaaaagctgtctaggccacaaggactgcaaatcttagatgagtcctagtactgacctgggcccagagccagtggactgagggggcatgtgacctyctaagacacaaattggagcagctaaaggagtgctggactcaaccctcccctaaccccgggcttcaaagcttgtgactccaaaagagaccccttccttctgtgtgaggataggagagggaagagttgggaggcctttgtcttgtaccttgaataccagttcagccacaataggatagggcaccaattgagatccatgtcatctttctaggccctagttcctggat

SEQ ID NO: 883505 - DNA, 568 bp, Homo sapiens
agctcccagtggctcagaacagagagacagaatccatttgttttgtttgggaaaatgtaaaggaagagaacaagagtctttgcctggtaattcagagaattgttttgaaatattttcaagactatcaaggcagtacctstacaagtctgcaagaaccacaatgttattgggcttggggtgtgccctaaagcaggtaaggcttagatcacaacactgaagtcctttagaatatctagaaagctttcccaggaatactggggacaaagaagcccagagggcaaagactacaataaatgcctaactcttcaatgcaaagacacagataaacatctacaaatatcaagaccatccaggaaaacatgacctcaataaatgaactaaataaggtaccagggaccaatcctggagaaacagagatatgtggcatttgagacagagaatttaaaatagctattttgaggaaactaaaaaaaaaaaaaatcaagaaatcacacagaaggaattcagaattctgttagataaattcaacaaagagatcgaaacaaaaagtatcaagtagaaattatgg

SEQ ID NO: 883506 - DNA, 579 bp, Homo sapiens
ttcaaacaactaataatagatctactatttgattcagcaatcccactactgggtatatacccaaaagaaagtaaatcattatatcaaaaagatacctgcaaccgtatgtttattgcagcactattcacaatagcaaatatggaatcaacctgcgtccatcaacaggtgattggataaacaaaatgtgctatgtgcatattataccagggactactactcagccataaaaaaatgaagtcatactttttgcagcaacatagatggaactagaggtcattatcttaagcgaaataattcataagcggaaattaaaatactgtatgttctcacatgtaagtaaggagctaaataatgtgtacatatggacatagggcrtggactaatagacactggagactcagaagggtgagaagatgggagaggtgagggattagaaataaattaatgcatacaatgtagactatttgggtgatggctacactaagagctcagacttcaccactatgcaatatatccatgtaacaaatggcacttgtaacccctaaatctatacaaattttttaaaaagcaagatgaagt

SEQ ID NO: 883507 - DNA, 649 bp, Homo sapiens
tcaccaggcctggctaatttttttatttttttgtggagacggtttctctatgttgcccaagctggtcttcaacctctgcactcaagcagtctgcctgcctcagcctcccaaagtgttgggattacaggtgtgagccaatgcgccaggcctgcttaacttactttctggatgtgtaataaaatttttattaaagcagagtgaaacctgaaatccaatcaacccacattgtagttagttttcattcatgaatgttaaaaacaattataatagttacaagtcattatttactgtatttcatattattagaagagccaaggatgtgttcacacaaacataggaaattatctttccctttcccttcttccctttaaaattaaaaatttttggaaaagatatgtaaggcaaggatgttaaaacaatgcactgattgattaatttggctctaaaaataacagaacctaagtgatgamtaaaagaggccactgtgcaaatcatctcgttgaacttattcactggtttctaaatctggttgcttatcataatcacctgaaaagcttgttgaaaaatacaaatacacaggccccacctcaaacctactcaatcacaatctataggtcttataaaaacatattttccaaacatcttttgg

SEQ ID NO: 883508 - DNA, 584 bp, Homo sapiens
aacttgttcaaggccaggaaaacagcaagtggtagagctagcattcaaattaggtctatgtgctcccaagcccatgttatatcaataactacaaggatgatattatcacagtaatacaatgtggataggatgatataaacttggggatgagtttcaagctgatgaccaagagaaactcatattcagctcccattctattttgcttctgcattacctatccaagagagttgactggatactgcttgccatgaacaacaagccaatctcagaactgcttgwactctgaaatagacggttgatatgttctctcatacgtgcaacaccatgtgtagaaaaaagtggccaaagtgtttttaggctgcattattgttgattatcagagcagatgttggaacttagaagatctgaattaaaatagtgcctctgctgtggggttgggtgggttattttccttctctgagcctatgtctttattgagcaaatgagtataatagtatctacctcatggtattggtgaacagattcaaattggatgaatatacatatggcatagttgaatgtactatgtatccttgtaaatgttc

SEQ ID NO: 883509 - DNA, 584 bp, Homo sapiens
aacttgttcaaggccaggaaaacagcaagtggtagagctagcattcaaattaggtctatgtgctcccaagcccatgttatatcaataactacaaggatgatattatcacagtaatacaatgtggataggatgatataaacttggggatgagtttcaagctgatgaccaagagaaactcatattcagctcccattctattttgcttctgcattacctatccaagagagttgactggatactgcttgccatgaacaacaagccaatctcagaactgcttgtactctgaaatagacggttgatatgttctctcatacgtgcaacrccatgtgtagaaaaaagtggccaaagtgtttttaggctgcattattgttgattatcagagcagatgttggaacttagaagatctgaattaaaatagtgcctctgctgtggggttgggtgggttattttccttctctgagcctatgtctttattgagcaaatgagtataatagtatctacctcatggtattggtgaacagattcaaattggatgaatatacatatggcatagttgaatgtactatgtatccttgtaaatgttc

SEQ ID NO: 883510 - DNA, 661 bp, Homo sapiens
gtcactttacctctctgtttcctcccctgcaggatgggaatagggacatctgctgcatttggctgttggagaaacacaaggaaatcatggacaagtgccaggtgtggtgacactcgtctgtagtcctagcagctcaggaggctgagacgggaggatcccttgagtgcaggagtttgaggctgcagtgagctataatggtactactatactccagcctgcacaatgcaacaaaaccacatctgtaatcatcatcatcatgatcagagcaaaccctactcagtggctcaccccagcgtgtgatcctatgtgttaattccctcctatacatgagggctgcacaagctcagatgggcttattctactgaaaattcagataaacatggagaaaaggtgggarggcaggtgggctggagaggtgcagtagggcagtccggaagaagaggagcagcacgtggtggaaaaaactgagatgggccctaagtctcagcagggccaggtcactggcttgtgacccctgcagtctctcagaaccctgaaggcctggagctctgtttaatgctctgtcacctatggtcatgaaattcttattatgggataagatcccttgtccaaacaagggtctctgcattgtcattttgcactgggtcctgcaagttatttg

SEQ ID NO: 883511 - DNA, 611 bp, Homo sapiens
cctttgttttcctccttttttaaaatgtgtttttgccatgtgtctatttttaaaaagctggaagagcacggtacaagattgatagcttcagagattcagcccttttttgtccctctagcagccctcccttgccttgatcagccacctgttctgagacgcttgcatctgcccagccyctggctctccctgccatcagtgagctgcctggggcccctggccaggccaggctgtgttcctgcccccaggacagctttgaagccaggagctgtcgctgcttgtttgtttgtaccaaggcactatgaatggcaacagatcatgaataagaaacaggcacctgatgacagagcagtcatctccagccagcaccgaactctgccagcagccatctgtacactccaagcagcctgcctccaggagagacagcagggtgcagggcacagggtgctgaagttgtagggagaacccgcgttagctcagtaagcagggatcaagcccctctgtgtgccaggaactatgtctgtgttccggccctggctctgccactaagccaagagacaggtaagttccttaactttttggctcttcagttttatcgcctattaagtgggtat

SEQ ID NO: 883512 - DNA, 611 bp, Homo sapiens
cctttgttttcctccttttttaaaatgtgtttttgccatgtgtctatttttaaaaagctggaagagcacggtacaagattgatagcttcagagattcagcccttttttgtccctctagcagccctcccttgccttgatcagccacctgttctgagacgcttgcatctgcccagcccctggctctccctgccatcagtgagctgcctggggcccctggccaggccaggctgtgttcctgcccccaggacagctttgaagccaggagctgtcgctgcttgtttgtttgtaccaaggcactatgaatggcaacagatcatgaataagaaacaggcacctgatgacagagcagtcatctccagccagcaccgamctctgccagcagccatctgtacactccaagcagcctgcctccaggagagacagcagggtgcagggcacagggtgctgaagttgtagggagaacccgcgttagctcagtaagcagggatcaagcccctctgtgtgccaggaactatgtctgtgttccggccctggctctgccactaagccaagagacaggtaagttccttaactttttggctcttcagttttatcgcctattaagtgggtat

SEQ ID NO: 883513 - DNA, 430 bp, Homo sapiens
ttaaagatactgattcctttggttaaacctgccaccaaaaaaaaaaaaaaaaaaaaaaaaaaatactgatttgtgggcactccatcccaaatctatggaatcaaaatcttctgggggtttttaataaacatctcaaatgaatcctatgataagacaaatttggtaattgttacacaaacacctaatttaaaaatctgatcattctactatctaaacacactcagagttaatgagggagaagggaraaattgattcttctgtaagacgggtagctttgcaaaaaggaaaacagcttaaatcacattcatttcttattaaaagctgatgattaatatcattttagtttttcctgggatggtgatataatatggtggtcattcctgtcttaaccaaagatatttttgtccactctaggttcacatgtagattt

SEQ ID NO: 883514 - DNA, 593 bp, Homo sapiens
atctggtcctgctgtgttcatcaccatttatttgtctctgatagagacaaactgcagccgtaagctgcagcctctgaaataaaaaatcaacccctttggtcctgtttttttgtttgttttttgttttgttttggtgttgtgacagtctcactctgtcacccagactggagtgcagtgactcaatcaggggtcactgcattctttacttcccaagctcaagcaatcttcccacctcagtcacccgagtagctgggaccacaggcatgcacaaccatgcccagctaatttttgtattttttgtagatacagggtttcactatgctgctcaggctggtctcaaactcctgggctcaatcaacctgcctaggcctcccaaagsgctgggattacaggccccacctggtctggtacctaaactttcttatgtgctttactcctatagagaagaggcaaaacaaattattaactccagaaaggaaaagctggcaatgcagttttattgaaattagcttgacatagttgctctggagctcacagacttctctcttcttccccctgaaggtatggagaggttcaaaggccaatatttccat

SEQ ID NO: 883515 - DNA, 553 bp, Homo sapiens
tgcacagagtgcaaaagactttgtttccatctccctctatcagtgtaaatgccactagatgccccctttttaggaggtacttcactttgaggtcaatcatctttaaaacagagcctcagtaaattctggggctatgcatgtgatacatcacctacataatagattcctcctaaatataatgttataatcatacatttccaggattatactcattcatctgcactaatctcttcaatatttattagagtaacaacataaatctataactatgataaaacctcttacacagagtaatatastctcaagccttctgtgaaaagactaaccagagactttacaggagctatacatgctaggaacggaactaggcgcatctgcaaaacttgaaattacaacctgaactcaccaaaattctgagtgtgcactgctctgttaaaagaaattcaccttcataaggatacagcaccctctaccacaatccaaaagcaccactcaagatcatatgggatggtgctgcatcattgtattagtccattctcaacgctgctatgta

SEQ ID NO: 883516 - DNA, 645 bp, Homo sapiens
gcatccctgtcttgtgccagttttcagagggaatgcctccagtttttgcccattcagtatgatattggctgtgggtttgtcataaacagctcttattattttgagatatatcttctctagttcttttaattgtgatgttagggtgtcaattttagatctttcctgctttctcttgtgggcatttagtgctatcartttccctctacacactgctttaaatgtgtcccagagattctggtatgctgtgtctttgttctcgttggtttcaaagaacatctttatttccgccttcatttcattatgtacccagtagtcattcaggagaaggttgttcagtttccacgtagttgagcggttttgaatgagtttcttaatcctgagttctagtttgattgcactgtggtctgagagacagtttgttataatttctgttcttttacatttgctgaggagtgctttacttccaactatgtggtcaattttggattaggtgtggtgtgaaaccccccaacatcttatacaatgttgtggagcctactgtatgttattaaaatgtgttgacagggcttcagattaacacactggtgattcttagggctttttggttgttgttatttttgtttctttgtggccaaacttagggct

SEQ ID NO: 883517 - DNA, 645 bp, Homo sapiens
gcatccctgtcttgtgccagttttcagagggaatgcctccagtttttgcccattcagtatgatattggctgtgggtttgtcataaacagctcttattattttgagatatatcttctctagttcttttaattgtgatgttagggtgtcaattttagatctttcctgctttctcttgtgggcatttagtgctatcaatttcyctctacacactgctttaaatgtgtcccagagattctggtatgctgtgtctttgttctcgttggtttcaaagaacatctttatttccgccttcatttcattatgtacccagtagtcattcaggagaaggttgttcagtttccacgtagttgagcggttttgaatgagtttcttaatcctgagttctagtttgattgcactgtggtctgagagacagtttgttataatttctgttcttttacatttgctgaggagtgctttacttccaactatgtggtcaattttggattaggtgtggtgtgaaaccccccaacatcttatacaatgttgtggagcctactgtatgttattaaaatgtgttgacagggcttcagattaacacactggtgattcttagggctttttggttgttgttatttttgtttctttgtggccaaacttagggct

SEQ ID NO: 883518 - DNA, 645 bp, Homo sapiens
gcatccctgtcttgtgccagttttcagagggaatgcctccagtttttgcccattcagtatgatattggctgtgggtttgtcataaacagctcttattattttgagatatatcttctctagttcttttaattgtgatgttagggtgtcaattttagatctttcctgctttctcttgtgggcatttagtgctatcaatttccctctacacactgctttaaatgtgtcccagagattctggtatgctgtgtctttgttctsgttggtttcaaagaacatctttatttccgccttcatttcattatgtacccagtagtcattcaggagaaggttgttcagtttccacgtagttgagcggttttgaatgagtttcttaatcctgagttctagtttgattgcactgtggtctgagagacagtttgttataatttctgttcttttacatttgctgaggagtgctttacttccaactatgtggtcaattttggattaggtgtggtgtgaaaccccccaacatcttatacaatgttgtggagcctactgtatgttattaaaatgtgttgacagggcttcagattaacacactggtgattcttagggctttttggttgttgttatttttgtttctttgtggccaaacttagggct

SEQ ID NO: 883519 - DNA, 597 bp, Homo sapiens
ccatacagtccagatgactgggtttcccccagtgaggcacaccccctccaccaagggacaaagtgctccattaaaggggtcctgttccccatgccacccacgtgagtgagactctccaacagcagttgtcagacaccccatacaggagcaatcctactggcatcaggttggtgcccctagaggtcagargtcccagatgaaggagcaggcacccatctttgctattttccagcctccttgagtgatatctccaggcacaggagcgaatcagatgaataagacctgaagtgaacccccagcaaactgcagcaaccctacagaagaggaacctgaccattgaaagaaaaacaaacaagcagaaagcaacaacaaccgaatcacaacaacaacaaaaagcccccacaaaaaccccattcaagggtcagcggcctcaaagaccaaaactagacaaactcacaaagatgagaaataatcaacaaaaaaatgctgaaaacccaaaaggccagagtgcctcttctcctccaaataatcacaacatctctccatcaagggcacagaactggacagaagataagctgaatgaattgacagaattag

SEQ ID NO: 883520 - DNA, 597 bp, Homo sapiens
ccatacagtccagatgactgggtttcccccagtgaggcacaccccctccaccaagggacaaagtgctccattaaaggggtcctgttccccatgccacccacgtgagtgagactctccaacagcagttgtcagacaccccatacaggagcaatcctactggcatcaggttggtgcccctagaggtcagaggtcccagatgaaggagcaggcacccatctttgctrttttccagcctccttgagtgatatctccaggcacaggagcgaatcagatgaataagacctgaagtgaacccccagcaaactgcagcaaccctacagaagaggaacctgaccattgaaagaaaaacaaacaagcagaaagcaacaacaaccgaatcacaacaacaacaaaaagcccccacaaaaaccccattcaagggtcagcggcctcaaagaccaaaactagacaaactcacaaagatgagaaataatcaacaaaaaaatgctgaaaacccaaaaggccagagtgcctcttctcctccaaataatcacaacatctctccatcaagggcacagaactggacagaagataagctgaatgaattgacagaattag

SEQ ID NO: 883521 - DNA, 611 bp, Homo sapiens
aactattctaaatatatatgcacccaatacaggagcacccagattcataaaacaagttctcaaagacctacaaagagacttagactcccataccataatagtgggagattttaacatcccactgtcagtattagacatatcaacaagacagaaaattaacaaggatatccaggacttgaactcagctctggatcaagtggacctagtagatgtctaaagaattctctaccccaaatcaatggaatatacattcttctcagtgccacatagcacttattctaaaatcaaccacataattggaagtaaaacactcctcagcaaatgcaaaagaaytgaaatcataacagtctctcaaaccaaagtgcaatcaaattagatctcagaattaagaaactcactcaactacacagttacatggaaattcaacaacgtgctcctgaatgactcctgggtaaataatgaaattaaggcagaatcaagaagctctttgaaaccaatgagcacaaagagaaaatgtaccagaatctctgggacacagctaaagcagtgttaagaggaaaatttatagcactaaatgcccacatcagaaagttgaaagatctcaaaaaaac

SEQ ID NO: 883522 - DNA, 552 bp, Homo sapiens
gataacatcagaaaaactcttctagacattgacttaagcaaagacttcatgaccaagaagccaaaagcaaatgcaacaaaaacaaagataaatagattggacttaattaaattaaaaagcttctgcacaacaaatgaaataattagcagagttaacggacaacccacagagtgggagaaaatctttgcaatctatacataaaacaaaagactaatatccagaatctacaaggaactcaaacaaatcagcargaaaaaacgaacaatctcatcaaaaagtgggctaaagacatgaatagacaattctcaaaagaagatatacaaatggccaacaagcatatggaaaaatgttcaacatcactaatgatcagggaaatgcaaatcaaaaccacaatgcaataccaccttactcctgcaagaatgtccataattttaaaaatataaaattatagatgttggcatgaatgtggtgaaaagggaaaacttttacactgctggtgtgaatttaaagtagtacaaccactatggaaaacagtgtggagattccttaaag

SEQ ID NO: 883523 - DNA, 609 bp, Homo sapiens
tctctttccagacttgcagttgccaaagcctcaaactggcaccctccctctggccttatttaaattcctgggtgctccctccttcacctgattggtgcctctgtctgcatggggctcatacttcatccctcaagagcccagctgcagctctcacacctttgactttcctcctcctatttggtcttctccacagtatgatgaccatcttggagtatactgaattaagaataacagttaacattttcgagctccatgcatatgctaragactgtgcaaaactctttatatcatttagggaacttctgaggtagtacaaacattactgacattccagatgagaaatatgagacaccaagaatttaaaaaacataatctcatcaaggttcccactgaataagtagcaactttaaaaatgtaaacaccgaggtaccctcacttcagagtttttcctgaaacaggctttaacagggaactgggcataagcctttattccgggatttggaaagagctccatggaagagaaggatcacagaaaatagagatggggccagcaaataacaacttctcttacttcccaatgttgcctcccatcaattttgttcttcagcc

SEQ ID NO: 883524 - DNA, 687 bp, Homo sapiens
aggagagttgggtgaaaacattccagactgccaagcagtctaggaatggtttggcaaagctgcaggggaatgcctgaacaaagttgggcatcagaagagccctgtgtctataaggcagaggcctgcctaggtatctctgccatactcagtcattggctgggaatagcctgaacaagtacagcctcagttcaaagacagcattcaatgagcagcttgggtccattggtcaattatgctccctgtagtttgggtccattggtcaattatgctccctgtagttggagatctgcaacttctcatgaccaccagaaggagccagcccagtaggatttaccaaaggattggtgagggaacaggtgcagagtttataccagataccaatattaccaaaggaaaactaattccaggccctgcagctgacaattgttcacctttcgccttrgtttggattggcttagtgatcaggaacagcaaactcagcagactgaaatttctctgtgtttaggtgaaaatgtgcttctgtgtgaaggcacaactggcaattattaaatctcctctcccaagcttgagtaaattaaagaggggctctgagctatgaatttcagctcagagccttcaaagataaatgttaaacttttgaaaattttccagcaagataatggcaaatggttatctaaatttcactgt

SEQ ID NO: 883525 - DNA, 646 bp, Homo sapiens
tcataactgagtctctctcacatacttctttgtatcagggaaccatggtatttaagctcgaagtcaaagccacctgtttcagatctactccagagaactcatttttccctgaaaatgtatagataagatatacatgtrattaaacttctgtttttctcttattaatcttttattacaaaggtctgtcccaactaagaactcatgcagggtagagagaaaatcgtgtttcttcacctacagctcattaaatgactcaaaacaatgtttaaataggaaaccaatggggtgtttaagcagggaagtagcaaaaattgatttaacagtataggaaaatacttttaccttcaaggcagagaatttattataaatgggaaagactacaaacaagaacaccagttgaaaagccactgcaacaatctaggcctgatttcaataattcagaacttatgacaattttgacaagaacatggctgaagtgtccctttattttatctataaaagggatatttcatgaacacttagcactataaacaaaattgtaagagaaagcttaaactattatacaacacaaaatattttaaataccgtggaagcaatcacattcccacaattaatgtactagttataaactattacgtacttttga

SEQ ID NO: 883526 - DNA, 646 bp, Homo sapiens
tcataactgagtctctctcacatacttctttgtatcagggaaccatggtatttaagctcgaagtcaaagccacctgtttcagatctactccagagaactcatttttccctgaaaatgtatagataagatatacatgtaattaaacttctgtttttctcttattaatcttttattacaaaggtctgtcccaactaagaactcatgcagggtagagagaaaatcgtgtttcttcacctacagctcattaaatgactcaaaacaatgtttaaataggaaaccaatggggtgtttaagcagggaagtagcaaaaattgatttaacagtataggaaaatacttttaccttcaaggcagagaatttattataaatgggaaagactacaaacaagaacaccagttgaaaagccactgcaacaatctaggcctgatttcartaattcagaacttatgacaattttgacaagaacatggctgaagtgtccctttattttatctataaaagggatatttcatgaacacttagcactataaacaaaattgtaagagaaagcttaaactattatacaacacaaaatattttaaataccgtggaagcaatcacattcccacaattaatgtactagttataaactattacgtacttttga

SEQ ID NO: 883527 - DNA, 646 bp, Homo sapiens
tcataactgagtctctctcacatacttctttgtatcagggaaccatggtatttaagctcgaagtcaaagccacctgtttcagatctactccagagaactcatttttccctgaaaatgtatagataagatatacatgtaattaaacttctgtttttctcttattaatcttttattacaaaggtctgtcccaactaagaactcatgcagggtagagagaaaatcgtgtttcttcacctacagctcattaaatgactcaaaacaatgtttaaataggaaaccaatggggtgtttaagcagggaagtagcaaaaattgatttaacagtataggaaaatacttttaccttcaaggcagagaatttattataaatgggaaagactacaaacaagaacaccagttgaaaagccactgcaacaatctaggcctgatttcaataattcagaacttatgacaattttgacaagaacatggctgaagtgtccctttattttatstataaaagggatatttcatgaacacttagcactataaacaaaattgtaagagaaagcttaaactattatacaacacaaaatattttaaataccgtggaagcaatcacattcccacaattaatgtactagttataaactattacgtacttttga

SEQ ID NO: 883528 - DNA, 659 bp, Homo sapiens
cacataagagggtcaggggaagatttttttgtaaaaagtgggttttcaaaagaaaagaaaagaaaagctaaaggagagttcagaaacagagactataagaatgaaccagagatctgccatcctcatgatattggaaaaataaaaaagagtcaactagagaaacaaataaggctaaaatgaacacttgtgatacagagctcttagttaaatcatagttatttggcagtcatttaaatgggccaggtttatttgcttattagacatctgactatcagacaagatgaccttcactatcacacaggatgacctatgagcaaatgaaggaggaaagtgattttaaggggttgaagagagaagcatgtagtagctcccatagaactgctttaggagggagagaactttgacaaagagaaaaaatatatatatatataaaatatttatatacatttatatattatatctattatatttttrtatatataagcttttagttagatacagcagaagtggagttttgtgctgcactgatactggtttatggttcatgtggaattaactttttttaatttaaggccaagttatctgatggtggttagcatggatttctgaaatctctgagtatagttgaagaagggaaatctgatctagaggtaaaaatt

SEQ ID NO: 883529 - DNA, 577 bp, Homo sapiens
atgaagattctgctggtgttctaagagtagtatgtgatggaagagctgcctcatcacgtagcagatgaaagcacagtggcctccgcaaggtccagcccactgcatcagtgccagactcacacgtgagtggacactagactccagcccttcacaggccaatgggcaatcactcactggcaatgagggaggcaggcaatatgcagtgaaaacctttctctctttctgatgccttcagtaattgtaatagatgctcatttaatggtgatttcaaaaatctggcttatgcaaagcagactaccttcttgtgtactcatgygatgcctcgttaagttcagtagattaagtgaaatctgatttaactgaggtctgattatccagagctaacaggctaaagtttcccattccacataccgttttgaccaataccccatttcaaaaggcattctttgcttggaattatacaagttagaaaacaaaaatagagtgtggcagccactggtactctcctatcccaagtccattcttccctttctccatagcgacaggccccttattttatctgaggtgctaatacgct

SEQ ID NO: 883530 - DNA, 577 bp, Homo sapiens
atgaagattctgctggtgttctaagagtagtatgtgatggaagagctgcctcatcacgtagcagatgaaagcacagtggcctccgcaaggtccagcccactgcatcagtgccagactcacacgtgagtggacactagactccagcccttcacaggccaatgggcaatcactcactggcaatgagggaggcaggcaatatgcagtgaaaacctttctctctttctgatgccttcagtaattgtaatagatgctcatttaatggtgatttcaaaaatctggcttatgcaaagcagactaccttcttgtgtactcatgtgatgcctcgttaagttcagtagattaagtgaaatctgatttaactgaggtctgattatccagagctaacaggctaaagtttyccattccacataccgttttgaccaataccccatttcaaaaggcattctttgcttggaattatacaagttagaaaacaaaaatagagtgtggcagccactggtactctcctatcccaagtccattcttccctttctccatagcgacaggccccttattttatctgaggtgctaatacgct

SEQ ID NO: 883531 - DNA, 577 bp, Homo sapiens
atgaagattctgctggtgttctaagagtagtatgtgatggaagagctgcctcatcacgtagcagatgaaagcacagtggcctccgcaaggtccagcccactgcatcagtgccagactcacacgtgagtggacactagactccagcccttcacaggccaatgggcaatcactcactggcaatgagggaggcaggcaatatgcagtgaaaacctttctctctttctgatgccttcagtaattgtaatagatgctcatttaatggtgatttcaaaaatctggcttatgcaaagcagactaccttcttgtgtactcatgtgatgcctcgttaagttcagtagattaagtgaaatctgatttaactgaggtctgattatccagagctaacaggctaaagtttcccattscacataccgttttgaccaataccccatttcaaaaggcattctttgcttggaattatacaagttagaaaacaaaaatagagtgtggcagccactggtactctcctatcccaagtccattcttccctttctccatagcgacaggccccttattttatctgaggtgctaatacgct

SEQ ID NO: 883532 - DNA, 627 bp, Homo sapiens
aaatgttaacttttataaaaagtttaatatacatcgcattgttacagaaagtcaccttcctgtaaaaaaggtacaaaacctatatactctattatagagttcataaatcagggcaacagaacctttctccaaggagaccagaagaccagctctgccgccgccttggcatagtttggagagcagccactccttccacacctccacgctctgaaragaccttagaacttgggggtggggtgggagcagggtgacgtcgcccagctggtggccagagctagctctggctcttcaggccacaagttcacagtccttcgctcctgagcaccaggtttagtctccaggaagggatttggtgaagtcaagtgggcagggcgaagttggggcccatccctgccgtccggcttccggcaggagaggttcccggggtcccaggcagaacgggcgccagcacctgcgttctgggcgggggaggaaagaagaccaaggagcagtcagtttccgccgagcgtgccgaggcgggggccgtccgcagactggccggcgccagggaggaaacttggtctgtacctccagctgataactccgcgccccacgctgcccccacccagttggcgccaaagaccacag

SEQ ID NO: 883533 - DNA, 605 bp, Homo sapiens
cctatacaacatggaacagaaagacttgtatttagtcggacccatgtctactttgccagaccctcggccactgcgggagggcagggcccaggcgcatttaaggcttaaatgcacatcacatggaaactgactctgccattcatttgatgcaaccatgggcaagtcacttgtccctctctggcctcagtttccctaaaccgagtgagtggcaatttttcaaaacgtctgccaactccaggacttgccgtttaaacctccctctccaagagaggagatactcacctggaggtgtcaggacacggccgagtcagtggcaaaagctccttttgtcgttggagatgacaagttccggagtgagctcggctgtctgattagaggaaaagagggaagagttacgcgaggcaatcgggagctccgagggtcccgcagcatccttgcctgggtgttcagccctgycccgacttcgaggcttacctggatgggaaggtgggggccatcagggggtccaggggctggctcggccaggactacctgcaggtcgagaatgtagtcgatgacgcgctgtaggatttccacctggctaagctgagtgcctctcgggactc

SEQ ID NO: 883534 - DNA, 523 bp, Homo sapiens
gaataggcacacaaagcaaaatttgcctatggtgggcccccaagttggccctgacattatcaagtgagtgaaatgtctttaagtttattagcttggaaggcaattggtttagactgaacagtaatctttttttgaccccattgccctggctgagaaacagattttctataatttgtgttgttttcccccaccaaatcaaggagagagagagwgtgtgtgtgtgtgtgtgtgtgtgtgtgtgtgtgtgtgtgtgtgtgtataaatgtataattaattattataaaatgtgtaataaatcatatgatatatagttaaacacagacaagaagtataatatgtatcaaggttgaacttacatattctccaatatacttctcactttaaaactgattaactgccccagtctaccttataaagtttcattcttttcctgttcatctgcaatcaaaaggaggatactgaagcacaaatctaatccttttacctctattacactgtgaattttacaaagaggtattttata

SEQ ID NO: 883535 - DNA, 675 bp, Homo sapiens
tgcattatttttgtagctgctttagattgcattgtaatagaaaattaggagaccggctgtgaagaagtttaagagggtcccctgaagagcttctgctttaaaattgattctttaagaaagcattaaaaagctattggaattgattgcctgctaatataaaggaaaaactctttgccaccatttgagttaaaaaagagcatcttcattcatgcatgttattaaaactactggcctgaaagcccctgtagaaagataaaggatatagatgggatattaaaacggcaatctttaccttatctgggatttagacttaatatgttgcttttattaatttagcaagaaccattagttaggatgtcaaagagtgactatacaattaaaatgctatagaatggtgagatctttaataaacagtagaccaggaattcctcattaatcttccaagcataagccacatccttacaaaaaataaatcctgaatttacagcttttgctttattgytaagtttcctgtgcagcagcggtagaagtcatagctgataacacctctgattagcttttgaagcttcccctgaaataaggtaatgaccaatcggatcccagcagttggccagatagaaaatgacaattactatctttaaaatatgtctatggagctttgaaaggtttccatgt

SEQ ID NO: 883536 - DNA, 646 bp, Homo sapiens
actagtatgtagttttctatgacaactgtggtcactggagtcagaaattacttccctcagaaaacataagcagattagatggatgttggaaggaaaatgctttggtttattttccccctgctttctgtttttatgtatttcrtcatattttacttgtcaatccagcactgttttcccccatttcttcaataggtttttcttccagacagaaatatcatatttcttacagaatataaatgcaacatatatttcatgtatttgtggcaagtggggaccatgatgtcgttatctgcctacctcataaaatctgacaaagtgattactaataaatacacataaatcaaattaaaaataaatcaataatacaaatgtaaaataaatttttgaaaagacagaaagtgttttaaaaaaagaaagtgtttttttccctcataagtaagctttgggtaactgaaaaatctgtataaactgaaaacatgctaataattgatatgaattaccaacttaaataatgtgttcatttaataaaatttcagttttgttaaagattttacactttaattttttattggagtattttgacatgaatattcttgattatgtcaacaattcagtgatgcttgcagacactggatttgtaggaagt

SEQ ID NO: 883537 - DNA, 646 bp, Homo sapiens
actagtatgtagttttctatgacaactgtggtcactggagtcagaaattacttccctcagaaaacataagcagattagatggatgttggaaggaaaatgctttggtttattttccccctgctttctgtttttatgtatttcatcatattttasttgtcaatccagcactgttttcccccatttcttcaataggtttttcttccagacagaaatatcatatttcttacagaatataaatgcaacatatatttcatgtatttgtggcaagtggggaccatgatgtcgttatctgcctacctcataaaatctgacaaagtgattactaataaatacacataaatcaaattaaaaataaatcaataatacaaatgtaaaataaatttttgaaaagacagaaagtgttttaaaaaaagaaagtgtttttttccctcataagtaagctttgggtaactgaaaaatctgtataaactgaaaacatgctaataattgatatgaattaccaacttaaataatgtgttcatttaataaaatttcagttttgttaaagattttacactttaattttttattggagtattttgacatgaatattcttgattatgtcaacaattcagtgatgcttgcagacactggatttgtaggaagt

SEQ ID NO: 883538 - DNA, 646 bp, Homo sapiens
actagtatgtagttttctatgacaactgtggtcactggagtcagaaattacttccctcagaaaacataagcagattagatggatgttggaaggaaaatgctttggtttattttccccctgctttctgtttttatgtatttcatcatattttacttgtcaatccagcactgttttcccccatttcttcaataggtttttcttccagacagaaatatcatatttcttacagaatataaatgcaacatatatttcatgtatttgtggcaagtggggaccatgatgtcgttatctgcctacctcataaaatctgacaaagtgattactaataaatacacataaatcaaattaaaaataaatcaataatacaaatgtaaaataaatttttgaaaagacagaaagtgttttaaaaaaagaaagtgtttttttccctcataagtaagctttgggtaactgaaaaatctgtawaaactgaaaacatgctaataattgatatgaattaccaacttaaataatgtgttcatttaataaaatttcagttttgttaaagattttacactttaattttttattggagtattttgacatgaatattcttgattatgtcaacaattcagtgatgcttgcagacactggatttgtaggaagt

SEQ ID NO: 883539 - DNA, 562 bp, Homo sapiens
tcaactcggttggattgaaggatgcaaagtattgttcctgggtgtaaaggagattaacatttgagtcagtggactgagagagacagatccatcctcaatctgggtgggcaccatctaatcagctgtcagcatggctaggataaagcaggcagaagcaagcagaataagcagatttgcctccatcattctccagtgatggatgcttcctgccctcaaacatcagactccaagttcttcagcttgtggactcttggacttatatcagtgatttgtcargaactcttgggtcttcagccacaaactgaaagctgcactgtcttcttccctatttttgaggttttgggactcagactggcttcctagctacttagcttggagacagcttattatgggatttcaccttgtgatcatgtgagtcaattctcctaataaactccccttcatatatacatctatcctattagttctgtccctttagagaatcctgactaatacaatagttgttttccaagtatatatcaagctagctaccatgcagttaaggagggttatgattctgttc

SEQ ID NO: 883540 - DNA, 598 bp, Homo sapiens
aaaaatgggaaaacacagacacaattgctggcaatttctagcagtaacttaagatgttgtagaaaatattcctacagaaacacaagtaccatgacaggcttcaggtaggtggtatgtatttttacttcttgcagtagatacaaacaaacaggaagaaagtgccagcttccacttgtaaggctcactgaagctaaatcaagcattgcttagttcagaggaatgggttaattttctattcactgaattccgcatgcctgacaggttgttgatgacttatttttatttgcttagcttattccaggttgtatcacctggaattctctcagcytgatcaaaatgtagttctaatcaatgagcagcctctgattccagtcttttaaggaggaccatgcctgcacctgctcagcacacactcacccggtgatctttggcagagggtgctgcttctttcatgaacatgttctcatgcaacaccttcctcagtgctcattgcaacaacctgtcctcaaattgaagctgcagcagatcagtggtgtgctggtaaaggtttaataagaggctctggggttgatagttgactttgtgagaagggaaccct

SEQ ID NO: 883541 - DNA, 646 bp, Homo sapiens
tgtgaggtcatatcttattatggttttaatttgcatttttctgtggattagtaatgctgagcactttttcatgtacatgttggccatttgtatgccttcttttgagaaatgtctctccaggttctgcttatttttaaacagggttatttgttttcttgctatttagttctttgagttccttgtatattttgaattttaaagccttatcagatgtatggtttgcaaatattttcttccattctgtttgttgtctcttcacattgttgcttcctttgctcttcagaagctttttagtttgatgctgtcccagttgtgtgtgtgtgtgtgtgtgtgtgtgtgcrtgcacgtgtgtatgtgtgtgtgtgtgtcttttgcttttgttgcttgtgctttgggggtgctttccaaaaactcatttccaaagccattgtcttagaactttccccttatgttttcttctagtagttttatagtttcagatcttatatttaagactttaattcattttgagttgatttttatatggtgctagaaaatgatccaatttcattcttctgcatgtagatttgcaattttctcaacaccattgaggagactgtgctttctgcattgtgtgttcttgacaccgttgtcaaaaatccattga

SEQ ID NO: 883542 - DNA, 638 bp, Homo sapiens
gagaatatttgttagttggatttctgtgtgtgggtgtgtgtgtatagcacaggtgtgggctggagttgggggagtagtttagctgaagaattcctgttccaccattttgctaacatcatttctaccaataccccactttcaacagtggayagatcattcagaattaaattaataaaaaattggatgtgaccttcacattaaaccaaatggacctaaaaatttatagaacattttatccaactgcagcagatacacatttttctcaatcacacatggtacattctctaggatagattatgtgttaggccacaaacaagtttgaatacatttctaagaatattgaaatcacatcaagtatattttccaatcacaatgctataaaactataaatgaataatataaaatatttgaaaattcacaaacacatgggaattaaacaacacactcatgaacaaccaatgggtcaaagaaggcctcagaaggaaacttaaaaatatctacagacaatgaaaatggaaacataacataccaaaacttatggaatgaagcaaaagcagttctaagaggaaagtttatagcaacaaatgcctacattaataaaaaagaaagactttaaataaaaagcctaacattacact

SEQ ID NO: 883543 - DNA, 690 bp, Homo sapiens
aatacattgttataaatgaagttgtcatggtaatccccagggcaccactaagaaaataccatttaaaaatgacccaggaaataaaagttaaactttttctactttaatggatactatcaagcaagtgaaaatggtaaaactggaagaaagtatttgcaaatcatatatctgataaaggtcaaatatcctgaatatatacagaattcttacaactcaataataaaaataaatttaaacragtttttaacaatgagcaaaaggcgtgagtagacatttctataaaaatatacaaatggtggataagcttatgaaaaggtgttcaatatcattggacattaggaaaatgcaaattcaacccaaaatgcaatgccaatttatacttactgagaaggttatagtttaaacaaatgaacaaatgttggggaccctgaaaatatgttagaactctcatacattgcctgtggacatgtaaaatcatacagccactgtggaaaacattttttgcagtttctcagaaagttaaatgtagaatgatcataagattcaggaattatactcctcagtatgtaccatcaggattgaaaacacagctttgcacaaaaatatgtacacttggtacgtagctggattacttataacagccaaaatgtagaaacaacccaagtgtgtaacaactgatgactggagaaa

SEQ ID NO: 883544 - DNA, 508 bp, Homo sapiens
tttaaacaaatgaacaaatgttggggaccctgaaaatatgttagaactctcatacattgcctgtggacatgtaaaatcatacagccactgtggaaaacattttttgcagtttctcagaaagttaaatgtagaatgatcataagattcaggaattatactcctcagtatgtaccatcaggattgaaaacacagctttgcacaaaaatatgtacacttggtacrtagctggattacttataacagccaaaatgtagaaacaacccaagtgtgtaacaactgatgactggagaaacaaaacgcttagtcatacaatgaaatgttactcagcacgaaaaaggaaagaagtactgatatatggatgaaccttgacagcattatgctaagtgaaagaaaccagaaacgtaagactacatgttgtatattccatttatatgacatgtccagttcgtggctgttgtcccaaagtaatacttaacacatccttttcatgttcaaaattgcccccatt

SEQ ID NO: 883545 - DNA, 587 bp, Homo sapiens
tggactcaagtgatactcccacctcagcttcctgaagtgctgcgattacaggtggtagctaccgtgcccagccaacatcaaaatttttagaatattatttataatttctaatttacaaaagcaacaaatagttttaaagctaatcttgaaagaacaagtattattatcagttaatattaatttaaggagaaaattaccaaagaagacaaagatgagtgctatgtaacattcgaaagaaaacaattttttttattattatacttcaagttctggggtacatgtgcagaacgtgcaggtttgttacataggtatacatgtgtgatggtggttttattgcacccatcaacctgtcayctatgttaggtatttctcctaatgctatccctcccctagcccccaactggggcctccccaggccccagcgtgtgatgttcccctttctgtgtccatgtgttctcattattcaactcccacttatgagtgagaacacgcgtgtttggttttctgttcttgttagtttgctgagaatgatggtttccagcttcatccatgttcctgcaaaggacataaactcatcctttgctatg

SEQ ID NO: 883546 - DNA, 633 bp, Homo sapiens
cagtgtagttcagaccttgtgcatattagtagacagcacttttaggctgtggaggaagatgcggagtcagaagatgaagaggaggcggatgtgaaactataaagtatatctgaaaagtgatctgcccctgggagtggtagcaagtttccacagagaaaagtacaacatactgctgatgaagaagaagatgatgacaataattttgatgatraggaaactgaagaaaactccagtgaagaaatctatgtaaggtactccagccaaaaatgcacaaaaatcaaaccagaatgaaaaagacataaaatcattaaaaccaagatcaaaaggtaaagaatccttccaaaaaaaaagaggaaaatattcttacaataccaaaaagacctagtcctatagaagaccttaaagcaaaaatgttagcaataatagaaaaagtagttctcttcccaaaatgaaaaccatattcataaattgtataaagaattgcttctgtatgactgatcaggaggctattcaagatctctgaataaggaaatctctttaagaaaatagtttaggctgggcgcggtggctcacgcctgtaatcccagcactttgagaggctgaggcaggcggatcacgaagtcaggagatcga

SEQ ID NO: 883547 - DNA, 601 bp, Homo sapiens
tgcagaggcaaaggtcattaagagttttttgtttaatcttccaggaattatggcaacataaggctttatatataaaaatttctttgaataaaacaagtgtagatcataattctgatgcaaatatatatataatttatatatatacatatacatggctactgtatatacatctacatatatatgtacatatcaacactttaaaaaatgttttattgttttatttgaaaccacttgtaaaagttatcatctcctaaggaaattaaccccaactataatttttaattatattgatttattcaaaattttactaggatgatgtggcaaagatctattttttcctaatatctattttctctcctctaaactaattgcatcctgataacttaggtggattaaaagacaaccagagtaaagacttcatttcccagtttaygagatgtttatgtatggccttgtcactaagcccaacccttggcatattaaaagaattgatgcttaatgacgcctgggtcatttccttaatgattagcagcacagatagggtagggagcaatttttgaggccatgttgggggtgcagtgtggtaggcagaagtctgggg

SEQ ID NO: 883548 - DNA, 595 bp, Homo sapiens
tgatcccactggctcagcagaacggtacaagccctactgttggggttttgcaacctcctgggtctcagcagtaccagatgattcagtttccctctccctgccgtctaccacagatgctgcagtagcagtcaagagtgtcaccttctggaccaggtgtggtggtcatgagctgaatttcgytaatggagcctgaccccactcagaacccatcaagggtccagtggagtcactgtaaatactacaacatggaccatgaggggcagaagcctggagacctgtacagtcctgacatcagcccccaggccaacatacaaatgagcagcagccctgacacatctcctacccaggctttgccaccttctcttgtcaccagcctcagtggtggctgtctgcacaggactcagtcccttgcttgtcctcagatggttcccctggcctgggggtccagcacagggtgatgggtgctactccctcttaggccagcctttagagtataatctgtccatctgccctcccttgctgcatgaccagtcaacttacacagtacaccagggacagagtggactgaagcatgaaaaccagggcaagagacaag

SEQ ID NO: 883549 - DNA, 595 bp, Homo sapiens
tgatcccactggctcagcagaacggtacaagccctactgttggggttttgcaacctcctgggtctcagcagtaccagatgattcagtttccctctccctgccgtctaccacagatgctgcagtagcagtcaagagtgtcaccttctggaccaggtgtggtggtcatgagctgaatttcgctaatggagcctgaccccactcagaacccatcaagggtccagtggagtcactgtaaatactacaacatggaccaygaggggcagaagcctggagacctgtacagtcctgacatcagcccccaggccaacatacaaatgagcagcagccctgacacatctcctacccaggctttgccaccttctcttgtcaccagcctcagtggtggctgtctgcacaggactcagtcccttgcttgtcctcagatggttcccctggcctgggggtccagcacagggtgatgggtgctactccctcttaggccagcctttagagtataatctgtccatctgccctcccttgctgcatgaccagtcaacttacacagtacaccagggacagagtggactgaagcatgaaaaccagggcaagagacaag

SEQ ID NO: 883550 - DNA, 674 bp, Homo sapiens
ggggcaagacacctcagatcattctcatgtcatagattggcaatgtgcaagaaaattctgttcctcacttctttgattttatcccttattgtcagtagattcagaggcatgagtttgtatttccttagcttccttctgctgctttctacccctttattcttccagtcttatgtaagaatactttttcttctgtgattcttctcatgtagctgagttctgaccttctattaggccagaggaatcaatattgtgataagattcttgccaaacttttgcccatgagaaaaatcttggggagaatgaggaagttagctaagaattatgaytttcagattgtgaataatcacgcacaccaaaaaaaaaaaaaaaaaacccaaactaaaatatcccagatgactaacagctatattgggttgaatgatgatgtaacctacttaatttgcatgtaattttcatctaatcaaatgtagaaatgtgtctattttttcttcacttctttgattttatccctattgtcaatagattcagagggatgggtttgcattcgcttagtttccttctgctgctttctaaccctttattcagccagtcttatgtaagaatactttttcatccctgtggttcttctcatgtagctgcactaatgtgtgactttttaaatcaatcatcctgtc

SEQ ID NO: 883551 - DNA, 611 bp, Homo sapiens
ttcaaatctatcacccatatagattcctaagtgtttaaaagcagctatgttatttctccatttaaagttctcaattggcttcctgtgtcctgtaagataaagtccaaattccttagcattgacatacaagagtatttctgatttggtcctctttacttctccaatttcatctcttaggtccatctgatctaaatcctgtgcttctggaatacttggctgcataaataccytgaaagtaccatgacgctgaaaagacactttggattatttattcatgtatacttcctgtttttaaattttttatttttctcccttcctatttcctgatctggacaactcttttcctctttgactcattacatcttcaaagaaagctattgagttatttcccttcatggatgtcaccataattatcagtgaagaactctgttatttacacattgtatactttccattcacagtttttaagaaatctagaaatagagtgtttccatgggggaataggggtgtgtttcatagagcataatttaataatgggtggcgggtgggttgggggaattgctgctctcaagttctgcataagtaaatagggcagaaagaattctaaaaaa

SEQ ID NO: 883552 - DNA, 667 bp, Homo sapiens
tctcagcaggagccctgaccccactgatgagtgttccactacaatctcagcacctcttcttttcctacctcagcatctagaagttggcagaatgggatgcgatatccaactgttaatatacactacagtgaagcatttactgaaaatgatttggtatcctagggtctaggactccactttcacatcatatttgaagaaaagaaagaaaattattttgtattttaacaattgtgtgccacattttacaatatttaattttagttgagaaacaccagatgcctgaaaactacaaaggaaatgtgggaaattaagcaaacaggtcaacaaatcactcacctttaagaattgaccartttctacaaggtaagcaggtagagtcccaataggcgggtaaccattcagggtttctgagagtaacatagcacccaacctcagaatccttctcccctcttcccaaagaagaaaagaaacatagaaatataggccacctggtggtggcgtgataaagagagagagagagaaagactctagaatagtagctgccagaaggaaccaggtaatggcttaatttcagaaatcgaatgatgatttttcaaaagaagtaatgaatcattacattatttatgtcaatatcatgtctttgtaccacatatgcatattcatgaag

SEQ ID NO: 883553 - DNA, 622 bp, Homo sapiens
aaattctcttgtcttccatgaatttttctactctattgtcatccacatctaatgctttgtcacattatcttctacctcattcagtagtttaatggccatttcttcctccctttcgccacaaccctagcttgagccttcattgcttcctacctctgcaggtacaggcagatgggggatgaggggagagaaagagaaacattcaactgagataaattcatggcatgtgcttttttttgcaaattttaattttccattcaataagaaattatggtcatctctacaagtcataaaatatacatccaccttttttcttaaaatggcctttttcttcttgatcccccttcaggccttccatccatagttccctaaatccttttcaattcacctgccccatataatcagacacacacacacacacacacacacacacacacacamaaatgaacatatggacatgtacatttatagaggtactttttatcactgcacaaaaaggagattatatataatctcttttttacattacttatattatatataatataatatttttatgtataaaataaaatggattatatggggcaggtgaattgaagaggagttagggaactatggatggaag

SEQ ID NO: 883554 - DNA, 621 bp, Homo sapiens
cattcttaagacagaaatagtttcctacatgtatatcttacctaatataatatgattataatgtaagagcaggaatatacttcattattcttctcaagaataatctttaaatgtcatccatttctgccatacttaagattctatccctttawgaaagtcagcttctttttttctgattctcaaaaatattaaactctccatcttaagcacaataaaagaatgcagaaattttaatatgctgctcatgagctttctttggttatcatcaattaacactttcactgaacttagaacgtccaaagctatttggaaaaatacattattttatccactactaagttcctattgctaagagaaaattacacatagagatagagggagtcatttcaccacagtgaaacagagtgtagacacacgcaattgtgtgtctaccattatcagagtcaactcagtaaaacaatgatgattttgtgagcacctaccatgtgtacaaaactttacaaaaatgtaatacaaatattatatgatataacctctgaggctttgtttcttcaccgagaaaggggagatatcaggccctgaccttatataatattagtaaattactaatatttactaata

SEQ ID NO: 883555 - DNA, 590 bp, Homo sapiens
taaacaatatacttctaagaaatctgtaggtcaaaaaagaaagtctcaaagaaaacaaaaatagatttagaactaaataaaatgaacatgcaacatatcaacttttttttttttttttttttttttttgagacagagtctcactctgttgccaggctggagtgcagtggcacaatctcggctcactgsaacctccacctcccagattcaagcgattctcctgcaacatgtgaactttaatgggatatagctaaaccaatgttgagagaaaaattcatagcactaaatgcttacatcagaaaagaggaaaatcaataatctacagcctcacctcaagaacctaggaaaagagcaaaatgaatccaaagcaagtacaagaaagaaaataatagttataagaacaaaaaccaatgagattgcaaacaggaaaaaaaataaagtcaatgaaacttgaaggcgattcttcaaaaaaatcaataagactgataaatttccagcaagagtgacaaagataaaaagaaagaagatacaaatcaccaacatcaggaataaaatgggatatcattacagatactgcagccattatgaaat

SEQ ID NO: 883556 - DNA, 646 bp, Homo sapiens
cagaacatgctagataaagtggaaaggcgctgatgtcatcaagcattcagtgtgtctgaagaacagaaagaaaggcagacatagaaagtgataaatcatctcagagtgacctatgccctctattttaacccttggaaaatgtatttccttaaaatgggttattaataatgttaataataattgcctttattaaaaatctatgtgttttagttgctgtaagaatatcttctgtaccttatctctcaactttcacaatatccatcaaatcccaagacacagatattattattctagtttgacacaggagaaggcagccttagagagctcagacaaattgttcatgattacacagcagtggcagaactggaattcatactcatgttcatctatctacagagactacacctttttggttcctttaacttgtttcgttcagcaactatttgaaccctatgagaggaactgtgsccacagaaatgaatgaagcaaaatgttgtggactgtttctaaagatggccacacaatatcttccattccaacatgcccttttgcaatatcacctttccactcctgcatcaagagggaagtctattccttctcttgctagccttgagacttattttgaccaaaagaagagctttccatt

SEQ ID NO: 883557 - DNA, 618 bp, Homo sapiens
gacaggaagaataacgacattctttagttaaccaaaatttcattgaaggtgtatatttgagttttgtttatggttttttaaagctggtttaagttaaacattattttagtctttcagtatgtcaggcactgagctgaattataacatttactctgacctagtaccctactggtggtgacatcataagattaaggagatggagcttattgtgatgactattttgcagttgaaataggggaggcacaggcagattgagaaactgctgtaactcacattgctaagttcgttttagagccagaattctagtcaggttataaaacacacactgaatcaccattctgccttatctyggcctacggtgtttagtcctttcatttaaatatacaaaaataaactcctatgatagcattcccaaaagattttattagtaattaaattgattttattctctttgtccaaagaaaaagcctcatctgatcacaaataattaaacaacagaacttcttgaaagttagggactaataaacgtccatattctgtcataaggaagcctgggtggccacattctgttctctgagatctctgttccagtaacttctttgctatggcgtgtgcttt

SEQ ID NO: 883558 - DNA, 600 bp, Homo sapiens
aagcattcgatctgctgagccaatatcacctgcccatacacctcgaatgccatggcctggaggaaggaaagttcatcctcttttggcttgtatactaggagctggggttctggattccaacaagattctaggagtggagtatttcttaaaatacaaaaggagtttggaagattgacagccataaaaaaggcatatttctaccactccccacctctayctggcaatacacatgtgaaaagagtgataactctattcattagtggagtttgcagagggggtatacattctattgataatgaatttgtagaatcaacttcaaatatgaaccacacacaaagttatcattaattaatttggaataatggactgagggatcaggtaaaatttctgttttgtcattttgataactgtgaccaagacaggtcatgaaaacatatactaagagccttacacataagcaatgaattacagttgccaacatagtttgacttgatgggtaaaagatttgatgactacaaatttgacattatttctaatgaatagcaacagatttacaacatatcaatatttatgggatgtaagtaaagcaggagttagatg

SEQ ID NO: 883559 - DNA, 689 bp, Homo sapiens
tcaggaggctgaggcaggagaatggcttgaacctgggaggcttaaggcagaggtggaggtgaaggttacagtgagccgagatagtgccattgcatccagcctgggcaacaagagcaaaactccatctcaaaaaacaaacaaacaaaaacacacaaagagatatcatttcataccagtcagaaaatattttacatagtaaatattttacataataaaatattattttattatgtaaaaaataataataataataacaaatgctggtgaggctgtagagaaacgggagtatttatacaccgtaggaatgtaaatacttcacccactgtggaaagaagtatgaagatttctcaacgtgcctaaaatggagctactattcaacccagcaatgccattattgggtatatactcaaaggaaaataaatctcccccaaaagacacatgaacttgtatatttatcccattatttgcaataggaatcracctaggtgcccatcaatggtggtttggacaaagaaaatgtggtacatatacaacatagaatactacacagccataaaaagagtgacatgatgtcttttgcagcatcatggcatgcagctggaggccattatcctaagcaaatcaatgcaggagcagaaaaccaaataccacatgttctcactcataagtgggagctaaacattgactac

SEQ ID NO: 883560 - DNA, 570 bp, Homo sapiens
ttctttgaaaagatgaacaaatttgatagaccattagccaaggttaaccaagaaaagatagaagattcaagtaatctcaattggaaatgcaaatggagacactacaagcaacaacacacaaagacaaaacatcatttgagactactatcaacacctctatgcacacaaactagaacatttagaggaaatggataacttcctggaaatatacaacccacctagattaaatcaggaataaatagaaactctgaacagaacaataacaagcagtgagattgmatcagtaatttaaaaattaccaacaacaaaacaaagcccagggccagctagattcaaagctgaattcttccagacacccaaagaataattggtgccaattctactgaaactattccaaatgatggagaaagagggagtcctccataactcattctatgaagtcggtatcaacctgataccaaaaccagaaaagcacataacaacaaaagaaaatgacagaccaacatccctgatgaacatatatacaaaaatgctcaataaaatactagctaactgaattcaacagtgcct

SEQ ID NO: 883561 - DNA, 450 bp, Homo sapiens
ccagaacccacaacctgaatttgtaactttagcatttagggaatttgatgggcttctagtggacatgattgatttggttcactaggctgcattctacctttccatgtagacacaagagataaaaatcacatctcccaggtgcccttgtagctaggactctaaatatgaaataatttttactagttagatataatctcaggagatttggaaggtaaaaatgaggtagaaaacacttctgtcactgtattctcctgacaagaagtatcgtagaaacaagggtagaaagaaacagcggcagctaaactcayattccttctagtcatccatttcttaggtgttcaggcaaggttgggatagtatgagaacctctggctcttagctgactgtggtttgtttttaaactcagtaattccagtgacacgctactcagccctttcaaagattttccct

SEQ ID NO: 883562 - DNA, 643 bp, Homo sapiens
ctatgcagccactaagaagtatgagattatgtcttttacaagaatatggagggagctggaggcttttatctttagcaaaccaacacacaaacagaaaaccaaataatgcatgttctcacttataactgggagctaagtgatgagaactatttataaacacaaagaaggaaacagacgctgggtctgcttgagggtgggagaagggagaggagcakaaaagataattattgggcactgagcttaatatctgggtgatgaaataatctgtacaacaaattcctgtgacacaagtttacctgtgtaacacacattcacatgtacccccaaacctaaaacaaaagttaaaaaaatgaaagtatatggcccctaggaagtcacaaaaatctcaataaagattcagtacacttcaaagaaaaaggatgatgagtattagagaaagaggatgttgagtattatagagatactgacaacaagttaccccaaggaatttggggaaatcatttatatgtggatactttctgaggaggacttcaaataccaaatctgggtttattccttagtagtaactaaggaatcactttagcagctacaattatttatcctccactcaacaaaatgtcatgttaggtttcttaatcgtgtc

SEQ ID NO: 883563 - DNA, 579 bp, Homo sapiens
aggaggttgaggcagaagaactgcctgaactcaggaggcagaggttgcagtgagcagagatcgcaccactgcattccactctgagcgacagagcaagactctgtctcaaaaaaaaaaatgaattataaaacctcaggaattaaataatattttgtgatgtataaaaattacataacatttaaattttaggaaatttaaattttaaattatatgaaatttaaataaagttctttgcagcacagccaaggtctttcatttatattttgtcctcagctgtttctcactacaggttcaccactgttgagtagttgtgacagaaattatggtcagtaaagtctaaaatatttaccttctgkttctttaccaaaaaaatgtttgccaattcctggtttatagaattaaaattcaaagtatattgaattagaatctcttgttttgctatctgttccatttgctgtttttttcttctgctttctctcagtctgtctgagcatgtgattccattttctcttttgtattcatttattatttattcctcttgtaaaagtgttttagtggttgcattatggtttgcaatat

SEQ ID NO: 883564 - DNA, 579 bp, Homo sapiens
aggaggttgaggcagaagaactgcctgaactcaggaggcagaggttgcagtgagcagagatcgcaccactgcattccactctgagcgacagagcaagactctgtctcaaaaaaaaaaatgaattataaaacctcaggaattaaataatattttgtgatgtataaaaattacataacatttaaattttaggaaatttaaattttaaattatatgaaatttaaataaagttctttgcagcacagccaaggtctttcatttatattttgtcctcagctgtttctcactacaggttcaccactgttgagtagttgtgacagaaattatggtcagtaaagtctaaaatatttaccttctgtytctttaccaaaaaaatgtttgccaattcctggtttatagaattaaaattcaaagtatattgaattagaatctcttgttttgctatctgttccatttgctgtttttttcttctgctttctctcagtctgtctgagcatgtgattccattttctcttttgtattcatttattatttattcctcttgtaaaagtgttttagtggttgcattatggtttgcaatat

SEQ ID NO: 883565 - DNA, 634 bp, Homo sapiens
atatttctcaatattctcaataatcttccctatgggcattttctggctttcattgagaaaaggcctgtaagagaatacaaaaccccttggtctaggacctccctaaggcttcaaactctcctagcctgtattagtccattttcacactgctgataaagacatacctgagattgggaagaagaagaggtttaattaaatgtacaattttgcatggctgggaaagcctcagaatcatgacagggctgaaaggcacttattacatggtggtggcaagagaaaattaggaagatgaaaaagcagaaacccctgataaaactgtcagatctcatgagatttattcactaccatgagaacagtaagagaaaaactgcctccrtgattcaaattatctcccaccaggtccctcccacaacacatgggaattatgggagtacaattcaagatgagatttgagtggggacatggagccaaaccatatcattctgcccctggcccctccaaatcttatgtcctcacatttaaaaaacaaccatgccttcccaacagtccccaaaagtcttaactcatttcaacattaacccaaaagtccatagtccaaagtctcatctgagacaaggcaagtcccttccaccta

SEQ ID NO: 883566 - DNA, 659 bp, Homo sapiens
catgagctggcattgagtgtctgcggcttttccaggtgaatggtgaaagctgtcagtggatctagtattctgggttctagaggatgatggccctcttctcacagctccactaggcagtaccctggtagggactctgtgtgggggctctgaccccacatttcccttctgcactgccttagcagaggttctccatgagtgccccacccctgcagaaaacttccacctgggcatccaggcatttccacacatcttttgaaatctaggcagaggttcccaaaccccaattcttgacttctgtgcacctgcaggctcaacaccacgtgaaagctgccaaggcttcgggcttgcaccttctgaagccacaaccygagctctatgttggcccctttcagccactgctggagcagctaggatgtagggcaccaggtccctaggctgcacacagcacggggaccctggtcctggcccacaaaaccatttttctctcctgggcctccaagcctgtaatgagaagggctgccactaagacctctgacttgccctggagacattttcccattgtcttgggaattaacattcagcgcctcattatttatgcattttatttgcagcaagcttgaattgctcctcagaaaatgaatttttcttttctatcacat

SEQ ID NO: 883567 - DNA, 593 bp, Homo sapiens
acatacctatgttcgtgtgtgtgtgtggtaaaagttaaaagaagtttttgaatcagagcgaggaatagagagtgaatttgtcttgcaatttctttattgttgttgtaacattcatgtgagaaatacagggtcttttggggggaagagggtcatattggctatggctcacacataacttttgcttccttaagttatgtctttttttttgagacagagtttcactcttgttgcccaggttggagtgcaatggcgccatctcggctcattgcaacctccacttcccaggtgcaagtgattctcctgcctcagcctgccaagtagctgggattacaggcatgcaccaccacacctggctaattttgtatttttagtagagacggtgtttcattatgttggtcaggctgrtctcgaactcctgacctcaggtgatccacctacctcggcctcccaaagtgctgggattacaggcattagccacctagcctggcccagttatatcatttttatctgttgacataaaccatttcttaattaaattaaaagaaatattaaagctatattatctgctccaaattttcattgtctttataaag

SEQ ID NO: 883568 - DNA, 647 bp, Homo sapiens
gcaatcaaaacaaagagcagcctggtcagggtttatttagttcatggccccagaattctgatcagggaagactgggaccaggataataaaaatacatcaagttggataaaaggctggaatctgaaaatgaaaaaaagatcaaggtcactgattaccacagatatgggcatgattcccaaaggcaawcaaattcaggagacacagcttataggcaggatgtgagtatcattagccaaactgatagactatcaagattgcagattttagaatagagaggccatacattcatttataacacagctagtgttgaacaaaatttattaagtgaatatattggaccaaatgttggccctaacctaagataacttttctcattatgtagtaggaacaatgtaaagtggtgcttgcagaagcaatggaatagtaatgttttcttattgtcacacatttcagattgaatacagacagtccataaatctgagcactggtactggaagcaggagggacaaggggatgaggagtcacttcagggaggtgaaacttaaaaggtttgtattacaacttaattcatgaatttctatcaagtgataaatagtttgcatgttttttgacagccagtcatttttttaatcaaagaaaggtttggt

SEQ ID NO: 883569 - DNA, 691 bp, Homo sapiens
gcttggaaatttagtcctcaaatgacaaggctaggggtttctcttaccccaatcttggcatgggagggccaccaagagttttaagcaggaaagtattatgagagttaattttttagaaaactcacttaggctgtgtgtaaagagtggattgattgcaattagggagatcaagttggrgcttgcaaaaatctttgcaggtgatgggagtgttgcaatttaaaaagtggagatagaaggaaggagccagagatgccagagatagaattgacagttgatctaaaaaagaacaacagctgattgggtttgcctatctacaaaactttggaactggtgaaaaaaattaggaagcagatgtcttcagctggacatgttgagaatagaatctggtatgatcagttttacctaaagacacttagattcatattatatagatactgaattctcagtgcagtggtgatgaaggatgcctagctttttcctgtgtccatagatttttagttggtttacccacctccaagaacccaagaacaatataagggaataaccagtgtcatactgaaaccacataaaacaaattaatatttgataatattgataaggtagtcagaaatttattcatataaaaagaacctggtccaaaagtatttaaaataagtttttcctaaaataggaaaacaggtaatttatatta

SEQ ID NO: 883570 - DNA, 691 bp, Homo sapiens
gcttggaaatttagtcctcaaatgacaaggctaggggtttctcttaccccaatcttggcatgggagggccaccaagagttttaagcaggaaagtattatgagagttaattttttagaaaactcacttaggctgtgtgtaaagagtggattgattgcaattagggagatcaagttggggcttgcaaaaatctttgcaggtgatgggagtgttgcaatttaaaaagtggagatagaaggaaggagccagagatgccagagatagaattgacagttgatctaaaaaagaacaacagctgattgggtttgcctatstacaaaactttggaactggtgaaaaaaattaggaagcagatgtcttcagctggacatgttgagaatagaatctggtatgatcagttttacctaaagacacttagattcatattatatagatactgaattctcagtgcagtggtgatgaaggatgcctagctttttcctgtgtccatagatttttagttggtttacccacctccaagaacccaagaacaatataagggaataaccagtgtcatactgaaaccacataaaacaaattaatatttgataatattgataaggtagtcagaaatttattcatataaaaagaacctggtccaaaagtatttaaaataagtttttcctaaaataggaaaacaggtaatttatatta

SEQ ID NO: 883571 - DNA, 617 bp, Homo sapiens
ggttcacggtaatgctggccttgtaaaatgtgtttgggagtatttcctctacttcagttttttgaaagagatcgagaagaactggtattgcctctttaaatgtttcatcaaattcagcagtgaagttgtcaggtcctaggcttttctctgatggtagatttatcactgatttaatctccttacttgtttttgctctgttcagggtttctgattctgtcttgcaagttgcatgtctctaggaatttatccagtttttaggttatccaatttgttggcatataattgttcatagtagtttttaaataatcctttgtatttctgtggtaacagtygttacctcttcaattcatttctgattacatttctgattttatttgagtctttgcatttttttttcttaatcagtctagctaaaggtttgtaaattttatttacctttaaaaaaaattcttagtttggttgatctattttttctatcttctgtttacttcttctgatctttatcatttccatcttcctactaactttgtaactagcttagttgattgtttttccagtccttgaggtgtaatggatgctaggtagtctatttgtgatctttcatcttttttgatgaa

SEQ ID NO: 883572 - DNA, 419 bp, Homo sapiens
gaaactcttagcaatagctccacaacattaaaaacactcaactggcttttaaaaagtaaatttattaccacacataatcagtccagagagtagagagattccatcatgtcatcaagacccatgataaatctttaaacattttgatttttttgaactttacactgtcactctcaayatatgggtctcatactttggctggttcctctgcagtgcctcaaactctgtcccctgagcagaaagccggggctgtatttacccaagtggctctgccctgcacttttcataattgtctcacatttaggacaaagctgcaggtagaaacagggagaaaagagcagttgtatatgtcccttggtttcacagctcctcaaagaaacagagaattaattacatggtagatctacactatactgaatgcc

SEQ ID NO: 883573 - DNA, 452 bp, Homo sapiens
gtgtggcacttcccgttttgtgctctctcctgtcactatgtaccttgctttctctttgccttccgccatgattgtaaccttcctgagtcctctccagccatgaactatgagtcaattaaaacttctttttttttataagttacccagtctcaggtagttcttcatagcaatgtgaaaatggactaatacagaaaactggtaccaggaaagtgtggcactgctacaaagatacctgaaaatgtggaagtgactttggamctgggtaacgggtagaggttgggagagtttggagggctcagaagaagacgggaagatatgggaaagtttggaacttcctagagacttcttgaatagttttgatcaaaatgttgatagtgatatggacaataaagtcccggctgaggtagtctcagatagagatgaggaacttattgtgaactgtagtaaaggtc

SEQ ID NO: 883574 - DNA, 452 bp, Homo sapiens
gtgtggcacttcccgttttgtgctctctcctgtcactatgtaccttgctttctctttgccttccgccatgattgtaaccttcctgagtcctctccagccatgaactatgagtcaattaaaacttctttttttttataagttacccagtctcaggtagttcttcatagcaatgtgaaaatggactaatacagaaaactggtaccaggaaagtgtggcactgctacaaagatacctgaaaatgtggaagtgactttggacctgggtaacgggyagaggttgggagagtttggagggctcagaagaagacgggaagatatgggaaagtttggaacttcctagagacttcttgaatagttttgatcaaaatgttgatagtgatatggacaataaagtcccggctgaggtagtctcagatagagatgaggaacttattgtgaactgtagtaaaggtc

SEQ ID NO: 883575 - DNA, 605 bp, Homo sapiens
aggtgagattatagatgtgttaactgacttgatcgttgttatcatttcacataatatacacataccaaataattagatagtatgcattaatcacacaatttttgaattatactttattaaaccttcaaaataaaaaaaagaaaatgtcatttggtataaataatgcaaggtctatctatctaataccaatgagagttgtttcctgttaagtacagagtttttgtgaattattatggaatttttcctgcatttattgtgaagtagtagtaatcatcggaaattgaaatttgttaatatttttacttttgaatatattttggaaatggaaagtataatgagtttttttctttttataattcatcacaatgtaatgaatctgggatgtacaaaatcaaatgtgtatttayttattcaatcactcaaatatgtttgtaaagctttcaaaataggcattactccttttttaatgacgatcacaatctagtgggtaatacccatttatttcctgctgttaattagattgattaaatgttaccctgtgtccttgtctcaaaatgcaaactctgtctacgtctttagtggaaaatctgttaaaatgctgagaa

SEQ ID NO: 883576 - DNA, 643 bp, Homo sapiens
gcagggccctcctgtgggtctccctgatccccgcgcccctcaaacccctgggcctgcaggtgcaggacgcctggccctgctccctgccactgcttccaggccatcctccctccccagcctctgcaggagcctcctcactggactccctgtttcttttctgcacaggccccctcaccccgcccactttcctctccctgggggccaccctcttgcttctctgcgcagggcctactgctcacctatgggcttgtagccctccctgtgatcccggggagcccctgctgtccctcctgcccggcccacttgtccctccaacgtctgcatcactccatccctcagcctcctcaagtctttgctcaaggaccacctttgctctgggatccacccygacgacctgctttaaaatcactcctgtatccaccatggcaatcttcctctgctattttctatttctttctagcactgtgcatttttgtttgtttgttttgtttttgtttgtttttttgagatggagtttcactcttgttgcccaggctggagggcaatggtgcaatcctggctcactgcaacctcatccttgtgtttccttgatttaaaaatgccactgggtgtgagatgctccaccaacttaacacctgtttcc

SEQ ID NO: 883577 - DNA, 636 bp, Homo sapiens
gaagaacattttgggcaggaaatagcatagtgtgttcacagaattaaaagcagaccagtgtggccgaagcacagcgagtgagtaagggaagagctctgcttcatgggaggaaggggctgaggctgcatcacagaggccttgcagacaccgaggaagagtctgagttttgttttgagtgccatcattcttttaagaactatggagaatggattgtgagagaacagaagtggaagctgtgagacccaaactgttctctgatgataaaggggactatactggtggcatcaaagayggagagaaggcagtttcagggtgtatgttttagggaagtcaacaggacttgctgacgaatcggaagtggagtgagggagagaatgggagaagcaagaatgatgctgaggagggtccattagaggcagtatagggtgtggtcgagtgcccagctcccttatctgtaaaatggggtactaaggtacctctctgggttggtggcaagttgacatttgtgaagcacttagacagagtttggcacatggtaaaacactgtgtaaatattagaagtgatttggatgatgtttattcatccaaggtcgcacagctggtcagcagcaggtccaggacaagaagccaaggctt

SEQ ID NO: 883578 - DNA, 616 bp, Homo sapiens
tctcaaaaaaaaaaaagcctcataagacattgtgaatatatttgcaaattaataagactggtctctataccacatattcccttctatggatatacaatttatttaaccaaacctttattgttggatatttgctgtttccacctgttttttatattataaaaatgttttgttgaacatctttataggtaagatttccttagaataaattcctaaagaggaaattgccaagtggagggtttgcatatttctagggcctttggctctaattcccaaattgccgctctgaccatttgtgtcagtttgcatattcatcagcggcattgagagcccctgtgcttactcagccttggaatctccatgctcacattcaaggtgccagtgctatttggcatgatgtgtgcagtggccatttgtcctagttatrctatagtgaatttgcccaaacatatattacctttactcacttccccccaaactctgaagtatatgtcagaatagatatgtttgttcttgtaatattaccattttttcccttttgatgagagatggcactgagatacagaccaactattagaaataatacagaagctaaagcatttccttttctgtaaaactg

SEQ ID NO: 883579 - DNA, 509 bp, Homo sapiens
gcattctgaatggagggaacagcatatgcttggctgtagggtgctaggtagtgccatacatttgggagagcagaaagtggagaaagtatatggagtagttgggagaaagtagatggagaagactgaacagttggcaagggcagtgcacagagagcttcctggtctaayagaggagcacaacttcatcctggaaattgtaggttggtttgaggttcttctgattgtatagcatgctctttgatataatttggctgtgtccccacccaaatctcatcttgaattcccatgtgttgtgggagggatctggtgggaggtaattgaattatgggggtaggtctttcccgcactgttcctgtgatagtgaatgaatgagtcttatgagatttgatggtttgggaaggggaaacccatttcccttgattctcatcccctctttgcctgctgccatccacgtaagatgtgacttgctcctcctttccttccaccattattgtgagttttccccagtc

SEQ ID NO: 883580 - DNA, 650 bp, Homo sapiens
ttcaaatagaaaataaattcatgttagaagagagggggaaagaaagggaagcgggggaaagcatgattagcagcgaggaaatttttaacatttgtcagttgctgatttttttttttggaatcctagcagagtggagaaacctgattattaagaggttgcatttcattttaaaacattaacgggcctttaatgctcttctcacaggaaacaggaattatacagagagcgcacctgacacagggtgttgaccccaactgggccctgggtggcatcaatcttggttaatctggggactttttgggggccatatgatctcttctcatatttcagctgttcctgagggagtgaggttaaggcctgaaagactagaaaaacaaagcctcaaagaaataaaatcaactcaaactacaactgtatattctcccgctctgggaagaaactggcccagaacttattacaagggatttggcctctgggtaaaccgaaccrtatttatttttgtttactggcaaagctctattgaaatgtcttggagatgaagagttttgagatggacaggctcgaagttcacagctgattctcatattcctggcccatgattgggagacacaattacaggaattttaaaaagtccaggagctgtcaggagg

SEQ ID NO: 883581 - DNA, 676 bp, Homo sapiens
agacagattaacaggaaaagaaccaagtttattaacacatgcagtgtacatatacatgagagaacttagtgatgagtaactcaaagcaatggttagagcttgggtttatataccatcttaacaaagaacaataattttgtagagaagtgacaagaaaaaagaaaatgactttgaactgctaggggcagcaaattgtgggaaggtaaatatatgggaaaattagtggtagaaaagggctggttagtaaggtttctttgtgtagatggcttcatcatctcatttctggtgataaggttgttatctctttcctggtatgtgagtcggggaaacaccttcacaagaggaatttaagttctgctttcaggcagatagggaagggtagagagcttgtcckgtgtctccttattctcaattgccttcagctcaaaataatccttatgccagagtggcatattttgggatagtatactctgaaacccttcaaggtcacacagattgggaagtgaaacaaggaagacaagatgccagcaaagtgtgtcattgagccatcaatcatgatggtttaatcctgtgagggaacttgaggaaatggtgcaagacttaggcctcagactgatcccacacaagaggtgagggaactgggtatttatataccggctcccttagtcattggttg

SEQ ID NO: 883582 - DNA, 676 bp, Homo sapiens
agacagattaacaggaaaagaaccaagtttattaacacatgcagtgtacatatacatgagagaacttagtgatgagtaactcaaagcaatggttagagcttgggtttatataccatcttaacaaagaacaataattttgtagagaagtgacaagaaaaaagaaaatgactttgaactgctaggggcagcaaattgtgggaaggtaaatatatgggaaaattagtggtagaaaagggctggttagtaaggtttctttgtgtagatggcttcatcatctcatttctggtgataaggttgttatctctttcctggtatgtgagtcggggaaacaccttcacaagaggaatttaagttctgctttcaggcagatagggaagggtagagagcttgtccggtgtctccttattctcaattgccttcagctcaaaataatccttatgccagagtggcatattttgggatagtatactctgaaacccttcaaggtcacacagattgggaagtgaaacaaggaagacaagatsccagcaaagtgtgtcattgagccatcaatcatgatggtttaatcctgtgagggaacttgaggaaatggtgcaagacttaggcctcagactgatcccacacaagaggtgagggaactgggtatttatataccggctcccttagtcattggttg

SEQ ID NO: 883583 - DNA, 633 bp, Homo sapiens
tttcttagtctccaggtctctgtgtttctctatggagggctatttaagttagtacttatttttgatgatggatgatgctgcagtaaatatttttattcttttctccatgagcacatacatgggatatttgtatattttcaatctttaccagatactgacaaatcactgttcaaagaggctagcttgtgatgtggtaggaaagctctagaattgagaactaggagacttggctatagtccagttctggtaccaactcccaatgtgacctcaagctttcccttccttccccaactttaagatgaaggtctagaccagaaaatctctacatttccttcctcctgrgctagtgaaagaaatgttttgtagaaaggtcttccctcctgggagtaaaaaatcttgctaaggtgtggttgctgtaaaccctagagaagggtttattgcataaggcagttgaactttttgagttccttccaagtgctgggcatggttgtcttacacttacctgactcaggagattaacctgtcttcccagtaagggaggagaccacccctcatattgtcttatgcccaatttctgcccccaaagaaagaagtaaaaactaaaaggcagaaatgaaatccacaggcagacag

SEQ ID NO: 883584 - DNA, 630 bp, Homo sapiens
taaaatgaaattcatcttgtaagagaatacaattctgtggtttttagaatagtcagagttgcacaaccatcactgctgtttaatttgagaacattttcatcaccccccaggaaatcccatatccattagcagtcactcttcatacatccccagaaaccactaatttactttctasctctgtgaatctgcctattctgaacttttatagaaatgaaatcgtataatatgtggccttttgtgactggcttctttcaccaagcataatgttttcacgcttagtccattttgtaacatgcattagtatttcattcactttattcatttattcatgggtgaataatagtccattgtgtgggtatgccacgttttatttattagttgaattgatgttcacggacgtttgggttatgcccactttttggctagttggaatactgctgctgtgaatatttgtgtatatgtttttgtggagccatgtattttcagttcttttaggtacagacctaggaggagaattgctgggtcatatgttaaccccatatttaacacttggaggaactaccagactgttttccaaagtagcttcaccattttccaatccacctccaaaaactcttatggcttatgctg

SEQ ID NO: 883585 - DNA, 656 bp, Homo sapiens
atacccttcatactatatctttttattccttttgccgtgcatatacattgtatgtgactgtgtatggatgtgtgtgtatgcattcatatacttataaactatatgtaaaacatatggttaaacattttttccatatagtttggctatttgcatttcctccccattaatgtcctgtctataacattcaagtgaagagcttatcaaaatataaatatacagggatttttgatatatgaattatttcataggttttatcactgtacaggtcacttagaaagattttagacatctttccttgtcagagcatagagaactaccaatttctttaaaattgctgaataggttttccatagagtatatttaacagattttattcaaatattccctttttgtgcctctttgcacatgtttcaggtttttctagcwtaaccagaagtagaattgttcaaaggaactacatattttaattctaattttaaaggaattctgtgaaattctccttcaaaatagctgcactaaattattcccagcagtcatgcatgaaagttaatgtatctctcatccttgccaacacttgagactgacaaagttttaattttttgccaagttgatgcaaattattgcatcaaattttgttcaaattttcagttccctgg

SEQ ID NO: 883586 - DNA, 623 bp, Homo sapiens
cataccgtctataaaatagatttatttataaatgatatgtatgcacttctgtactaatgcaatccatacattttaaaacatggattacaaaataaacataaataaaagtgctcatattttccttacatattacagtagatcatcttgcacatcccttggtgtgcatttcttttgagatataatgcttctcctgttgaaagttgtatgatggtggggaatgaatgaggcagagcagttgatgctagaaactatcattgctttgttttaaattgttaaaacttctttataaggytatacattggccatatttttgctgtagcagattcttttactctcattttacaggcagccaaatcaggcttctttactttgccaacaagaactggagggaactgggctcttggctgaatgccagccaacacttttactagcttcatgtttttgttaccaaacattacatcgtgtcctttgagatttacaaagttggcttcaatccccagactgaattctgtgcaaattttcttgccctctctaagatttccacaagttccacagaaggtttatatccccatggttacctctcccttcactttctcattgtgaaattctctatcttgtttact

SEQ ID NO: 883587 - DNA, 528 bp, Homo sapiens
atttttgcgtctgtttaaaatttttcataataaagtcttgaataaatagagaaatataccaacttgtgggtaagcaggctgagcatttttaaaatgccaattccctccaatttatttttcatttgttccattcctgaattgtttttacaaaatgtggcacctattatttctgtattaagggaggaaaggggccaggggagagaaagagaagtagaaaagaatgcctgccaatagaatataacactcacacacacaaaatgccttaggaagggaaacaaagtaaggggaaaagtacaaaactgatcaaatcctgtaacaagatttargctcaaagttgcctgtcaggtcatcatttacaaatcccttcaaaattctgaactgtgcaaaagcatgctggtaagtatcattaaaaaaaaaaatcaatgcaatgacacatataaaccaactttgctgaataacaaaacaaaaaacaaaaactgaaattgggcaagattttgatctttcgcattataaaagatgagtcagggg

SEQ ID NO: 883588 - DNA, 656 bp, Homo sapiens
atcagaaactgcaaagctcaggcctgcattatagttatggccttgctccccacttactaaggatctggcattagccagcttctttttttcttttttttttttttatctccactagtcagtaagaatgggaataataccgcactagattgctggaatgatcaaataaaacagttakttggaacatgtgatgtaagccatgtaactatgaactgtgattgtgatgatgaggaagtggaggaggtggatggaagtggtaaggatgacaagttttaatgaggctttaaaccctttgtggaaaccatctaaaatcaaacattcgcatgtttttaaatacccataacagtatctagagcagtggttttcaattagaagcatttggaagtatgcacagggaatgggagttacaattttttgatgtcgcatgactgagactactactagaatataatgggcaagtatgccaaaggttctgcaacacgtgggccattcccacacaccaaagaactgtccacccaaaatgccaatagtgtcctgttgggaagcactgatgaatgtccaacacagaggaagcattcattaaacatttactaaataaatgaacataacttatactacatatttccttcagagcacaatctcttggaaggctcattctt

SEQ ID NO: 883589 - DNA, 656 bp, Homo sapiens
atcagaaactgcaaagctcaggcctgcattatagttatggccttgctccccacttactaaggatctggcattagccagcttctttttttcttttttttttttttatctccactagtcagtaagaatgggaataataccgcactagattgctggaatgatcaaataaaacagttagttggaacatgtgatgtaagccatgtaactatgaactgtgattgtgatgatgaggaagtggaggaggtggatggaagtggtaaggatgacaagttttaatgaggctttaaaccctttgtggaaacyatctaaaatcaaacattcgcatgtttttaaatacccataacagtatctagagcagtggttttcaattagaagcatttggaagtatgcacagggaatgggagttacaattttttgatgtcgcatgactgagactactactagaatataatgggcaagtatgccaaaggttctgcaacacgtgggccattcccacacaccaaagaactgtccacccaaaatgccaatagtgtcctgttgggaagcactgatgaatgtccaacacagaggaagcattcattaaacatttactaaataaatgaacataacttatactacatatttccttcagagcacaatctcttggaaggctcattctt

SEQ ID NO: 883590 - DNA, 646 bp, Homo sapiens
gatcgcaagcggcccggcaccggcgccgcaggttgttggcaagcctggtccggggttttaggttgagcccaagcggcaatgcgggatcgccaccgggccgcgcgggcttgggagggtgacgcccgcgaggacactgcggcgtccggggcgggcgggcacactcacaatttcagcatccactcgccctccatcaccagcgtccagttggaggcggtcatgggctggacccggctctgctccggcggcagcgcggcctcctcggggcctgccgtcgccgccacagccgcgatccaggcggccaggagcgccgttagctgcgggccgcagcgcccacccgccatgttgggcgccgagcgaggcttctcggcggggagtgtggggaagggcagcggccggcccgcagcctcgctcgcccgccgggtttttcaaggaagcgggagacgcaagggccaccccgcctacgcctrgcggcgcagactggcggtgctcgcaatgccgcggaggacgccacctcttatcgccgcttgcccgtcgaggccacgccccctcccgcctccacttgccgttgcccggggtgtcggttacctcagcaaccaccgccctttcttcctgaccgccaagctgacaataaacagatgacccaacg

SEQ ID NO: 883591 - DNA, 615 bp, Homo sapiens
agctggcactacaggcgtgtgccaccacgcccagctaatttttgtatttttagtagagacagggtttcaccatgttggcccacatggtctccatctcctgacctcgtgatcttcccgcctcggcctcccaaagtgctaggtgtgagccactgcacccggcctgctcttgttttcaatatttctcctgaattataaaatttgaaaatgatctgtttttgttttcaaaagaactttattttgtaattaaatctttgtatgtctctttatttattgacttaccaactttagattgttagttaaagttgtcatctgtttcctggagtggttatttttgctggaagctacctgtggagggtgatcggacccatrtcttccttcctgtgacttctgggttcacctcactttattattatttttctgcctcctgtggatgactcacccttaagtctagccttaagtaaatatttgatatctaccaggagcattcaggaaaaaaaaatcacacttattggtgatagatcagaggaattcccattaaagtcttaaggcaaggatagttgctatcatggtcactgcgttggtgatcataaccaaaataatatgacaagaaagaaa

SEQ ID NO: 883592 - DNA, 629 bp, Homo sapiens
tctgtgttccttcctgacctcttagaacctaaatcacagatggggttattgaagagatttgggatcagtcgatcgtcagttagcgacaagtcaccaaggagctttctcacctttatttttctcatgatctacaagatgatattaatttccttatcctgaggcagatggagagaaggaatggggattagtttatcacagaagatcataaccgatatttttttctcaaatcattgtttactttgtccttctrctttctacctcatctttctgtttccccttcgttttttcttccatatgcttagtgtttctccttgcttccttctttgcacccaacatttgttgtgttgaccaccacacatccaatgctaattaatgagaagtcactttgtcactgtatggaaaggggctattaggcaaagcaaggtgactgatctggagggttcagaaaagaaaataagaaaaaataaaaatagttaacatgtcagctttgctaagtgtcaggcactgtattattttatctcatctttatgacagtcctttgatataggtactcccgctgctatgatgatctgttcctactcacaacactcctgacaccaaatgtgtggggtttttcacgccaacaacca

SEQ ID NO: 883593 - DNA, 645 bp, Homo sapiens
gtttgtgaggacaggtcagtgagaggcagtgaccccacagggatgaaggcacaggagctgtgtgtcagccaaccctcaaggcaggtggacctggatccaggacagctggggctctggggtagggctttgggagattcctgggctgcattgcagtaatgtgcccatctcctatcatacatcttcctctcctttccctrccatcgtacctggtgtttctctttctatgccacatgttttttctctacagcagagcttttgcttactcacctttttcctatttccttgtctctccagcttgaagtggctcttatggcccagactccccatctgtgctttccctgtgcatctctctgagctctgcttccacttatttatgcctgatttgttccatattcccaatttcacattcctacgagtgagaatctgatgactcacctttttgtgtcaaaccatgttgtggatcactgcccatcccacagacggctgcccttgggtgaggtgcccacctctaggggggcatgtgaaatgaagggcctcaggaaaggctggctggcttttaaaggaggaggcagcttaccccagagagggcagttgacagtcaccaagattgacacatccgaggcactggcctactgtcttctcatg

SEQ ID NO: 883594 - DNA, 645 bp, Homo sapiens
gtttgtgaggacaggtcagtgagaggcagtgaccccacagggatgaaggcacaggagctgtgtgtcagccaaccctcaaggcaggtggacctggatccaggacagctggggctctggggtagggctttgggagattcctgggctgcattgcagtaatgtgcccatctcctatcatacatcttcctctcctttccctaccatcgtacctggtgtttctctttctatgccacatgtyttttctctacagcagagcttttgcttactcacctttttcctatttccttgtctctccagcttgaagtggctcttatggcccagactccccatctgtgctttccctgtgcatctctctgagctctgcttccacttatttatgcctgatttgttccatattcccaatttcacattcctacgagtgagaatctgatgactcacctttttgtgtcaaaccatgttgtggatcactgcccatcccacagacggctgcccttgggtgaggtgcccacctctaggggggcatgtgaaatgaagggcctcaggaaaggctggctggcttttaaaggaggaggcagcttaccccagagagggcagttgacagtcaccaagattgacacatccgaggcactggcctactgtcttctcatg

SEQ ID NO: 883595 - DNA, 645 bp, Homo sapiens
gtttgtgaggacaggtcagtgagaggcagtgaccccacagggatgaaggcacaggagctgtgtgtcagccaaccctcaaggcaggtggacctggatccaggacagctggggctctggggtagggctttgggagattcctgggctgcattgcagtaatgtgcccatctcctatcatacatcttcctctcctttccctaccatcgtacctggtgtttctctttctatgccacatgttttttctctacagcagagcttttgcttactcacctttttcctatttccttgtctctccagcttgaagtggctcttatggcccagactccccatctgtgctttccctgtgcatctctctgagctctgcttccrcttatttatgcctgatttgttccatattcccaatttcacattcctacgagtgagaatctgatgactcacctttttgtgtcaaaccatgttgtggatcactgcccatcccacagacggctgcccttgggtgaggtgcccacctctaggggggcatgtgaaatgaagggcctcaggaaaggctggctggcttttaaaggaggaggcagcttaccccagagagggcagttgacagtcaccaagattgacacatccgaggcactggcctactgtcttctcatg

SEQ ID NO: 883596 - DNA, 615 bp, Homo sapiens
atttagttcccacttataagcgagaacatgcagtatttggttttctgttcctgcattaatttgctcaagataatggcctccagctgcatctatgttgctgcaaaggacatgatttcgtttcttgttatggctgtgtagtatcccacggtgtacatataccacattttctttatcaaatccacccttgacaggcacctaaattaactccgggactttgctattcacacatatattgaaarcatttatactaaacaatatgtttgttatgaatagtgctatattgtacacatttcagagaaccttttccctgctaaatcttcacgtgactcttggacacattgtctttgtgaccactggagcacattttgaagtcatctagtagacttttccagaacacatatttttcacttatatttatattgtttgaggtgctgcaaacctctttaaattgtgtacaacatttgcaattgttaggttatacccacctgggaataattactaagtctgtgctcatttttgtttaactttctgatatatttgtttcatttaagtaaacctctagaagtatccaaactaggattagtagaggtaattttgggctaatgtatcttcccc

SEQ ID NO: 883597 - DNA, 525 bp, Homo sapiens
aaaagtgctgttataaatcttacacccttaaagaagcatggcatcactatgaagataagcttcacctaatgtccagtacagtgctggacccaggtgggtacttaccaaacactgtggaaagtctgaagggatgctggtgagtgcctcccagaggtggtattttcttttccattgccccattttgttcctctataatattattttgcttttttaatttttttaagacacgagatcttggtctgtcacccaggctggtgtgaagtggcatgatcacaggtcactgcagcctcaaactcttgggttcaaggaattctyccacctcagactcctgagtagctgaaactagagtcatgcaccacaacgcccaactaattttttaatatttagtagagacaaggtctcactctgttgtccaggctgatctcaaatttctgggctcaagtgatcatcccatctgggccacccaaagcactgggattacaggcatgagccacctgcctggctaagttcttgtttcaataactg

SEQ ID NO: 883598 - DNA, 594 bp, Homo sapiens
agatagtttggtttcctttttcagagcttagtgtcccatgagcacatgcagtggaattgatgaaatctggttagtcttgaatctcagtctcttcatctgtaaaatgggcagtagttgtcactgtgcacagaataagggagaagaaaaactcagaaagtgcttgtgaatataaactgtcaagtgctttgtagatatcagttaatyggtaatatctcctagaggggaacgtctaataccaggacttcgtttgtgtcccccacaagggaggagaagttggtaatattattgtgtgtatttgggcttcattgggctgtattttactaatgggtgagattagtgtgactcaaagacagatgcacaaacgctatcttcttactctgtgtttcttgtcttagacccaggcaagaactgactcctggggggcaacccagccctgtccattcattccatttatgttgtctgtcctccttgcaagtagcagtgagtaattttctctgcagaactggcttgttctgttgagctttctctctgtacttctcatctgagtatgctttgcccagaatttaaaatctagagggacttagaagagccgtt

SEQ ID NO: 883599 - DNA, 540 bp, Homo sapiens
ctagttgctacaagaatcagcatcatctttaacaagagggattcattattagaaaatttaataacataatccttcatattaagacaaagagaaaaaggtcatataatcatcttcacagaggtagataacgcacctgataaacttaacacttaaaaatatacattgatgactattttgttttttaaatacgtatgattatatataattacatatatcattatatatggttatatatggtacawcatttactgaaatatataaataatgtatactttatattcatatgtgatttttaatatgttatacatgtgattatatgtctgtgtgtgtgtatactttagctcaaaagctggcatcttatttaacgtgattacactggagactttccattaaagtgaggaacaagacaaaggatagccatgatctccactgctatttaatactgggctggaggtcctagtctatgcaattagataagaacaagcaattagaagaataaaaattggaaagaaagaggtataactgtctctgtcaaatcaa

SEQ ID NO: 883600 - DNA, 540 bp, Homo sapiens
ctagttgctacaagaatcagcatcatctttaacaagagggattcattattagaaaatttaataacataatccttcatattaagacaaagagaaaaaggtcatataatcatcttcacagaggtagataacgcacctgataaacttaacacttaaaaatatacattgatgactattttgttttttaaatacgtatgattatatataattacatatatcattatatatggttatatatggtacaacatttaytgaaatatataaataatgtatactttatattcatatgtgatttttaatatgttatacatgtgattatatgtctgtgtgtgtgtatactttagctcaaaagctggcatcttatttaacgtgattacactggagactttccattaaagtgaggaacaagacaaaggatagccatgatctccactgctatttaatactgggctggaggtcctagtctatgcaattagataagaacaagcaattagaagaataaaaattggaaagaaagaggtataactgtctctgtcaaatcaa

SEQ ID NO: 883601 - DNA, 624 bp, Homo sapiens
ctttgaaatgaaataaaactggcttaaatgacaatacacacatccatgtttgctttaaagtctttattatcccgaatataaaagacagagtcctctaggatataacagagttctttacgtggaaacattatttttttacaagtgaaaaaataaatacctcttggaataaaggcttatatgctaatatgtgccataaaaaagtagagttttaatatttgacaaaatgtctgtgcaaagaaacaaatgcataaacacattactgctacattaaggcaatatgaaaagtatactcagaaatctcagtaaagtgacagtgtaggtttctagctttaccttagctagtattgcaccygataaggtcatctaggtctcccgacatcccagaaaacctgctagctgaccagcttccaaaatgcccaagtgggagtggaaaacatgtttaagaaaacagaagcaaaaagaaccaaaaccccttcgaaacatacagaggggacaacccaaagttaatacttaagcacttactttaaaaaaacacaacaaaactccccccccaaaaacagaaaaggacaccatatctaaatacttatggtaaggctataaaaggcttgaacagttcaagcaaag

SEQ ID NO: 883602 - DNA, 624 bp, Homo sapiens
ctttgaaatgaaataaaactggcttaaatgacaatacacacatccatgtttgctttaaagtctttattatcccgaatataaaagacagagtcctctaggatataacagagttctttacgtggaaacattatttttttacaagtgaaaaaataaatacctcttggaataaaggcttatatgctaatatgtgccataaaaaagtagagttttaatatttgacaaaatgtctgtgcaaagaaacaaatgcataaacacattactgctacattaaggcaatatgaaaagtatactcagaaatctcagtaaagtgacagtgtaggtttctagctttaccttagctagtattgcacccgataaggtcatctaggtctcccgacatcccagaaaacctgctagctgaccagcttccaaaatgcccaagtgggagtggaaaacatgtttaagaaaacagaagcaaaaagaaccaaaamcccttcgaaacatacagaggggacaacccaaagttaatacttaagcacttactttaaaaaaacacaacaaaactccccccccaaaaacagaaaaggacaccatatctaaatacttatggtaaggctataaaaggcttgaacagttcaagcaaag

SEQ ID NO: 883603 - DNA, 632 bp, Homo sapiens
atcccgcacagaatgccattctatgccatagttttccattgccgacacaatctgcaaaacttggtattcagctgaagcctggctggtcccctccaactccttatgttttgcaacaatgctggaggacaccaagaggacagagaattaagtatacagatattagctttagagataaacctatgtagtcttcacgagtgaaatatactaacactgatgaatcacaacaacttaaaacttatgtattactgatgtttcatgtatttagcgaacttactataaaaaacgtctaagacactgggatctcaactattaaatacttggtaaaaacactttggggatgctggatgggtgatgaattggaagaattatggmaagtctctaaaaatatacataagtcaaatttacatattggaaagtctcatgcatttgtccacatatagtttataagtataaagttgacccctgaggcccctgtggccagggaaggaggtaggccaacaaaccacaggagtcaacctggcatggaggccaccctcagtcgagccttcagatgagacagagttctacctgcagcttgactacagtctcatgagccagaggacccagccaagacatggccagattcctgacct

SEQ ID NO: 883604 - DNA, 599 bp, Homo sapiens
aaagatatcagtcaaggactgacccctccagatacccatgtacccctcctccccactggatgcacctattgctcttctcctggctattttaaacagcagtacatgaagcagctggagagagacaggaaggtggcttgtgttgggattcctagtaactgagataattttttttcctttagagaggcaaattaacacaacggccaaaaccctagactaaacatcagaggccagctaataatccttaacccaccacctgcccacttgcaagtcacttaacctcctcgagtaaaatttagctataaaagggggctaattattttaatgaacaaataacttctgtgttaaaagctgttttaaaagtatgcaatgttatagcaatttaacaaattarcaataatgaaatgatgagtcaaatagcggtttccaaatgtggttaactttaatgccttagcaattgcatacggcctttgaggttagtggcatacacacacacacaaacctgaatgctgtcatatcacaattttagaaaaactacaataagtgttcttgaaaagtaatgttctcgtacattttgttggtataaggaagatacataagag

SEQ ID NO: 883605 - DNA, 620 bp, Homo sapiens
tctggagtgggagaaaaggggccaacgacaagagctgaaaccaggatctcagttcaacagtgaggagatgagaggagaaataatcaccccaactcactttccccccatccttctattgtccaagtctaacccaataccagagaacaagggagatgagtgatacagctgtagaagtcatccgcccatggcacaaagcacggcaaagaaggatttgcagcaagcagagaatgaccagcacagcactcaatgaatacttgtggtttttaaatctatgtrtacatgagagttaacactgaaggaatagacaagaactctagccaaagtgtgattagatatgaacaagaaatcaagaagcaactatttttaaatgcccttatctagggaatgagaaaaaatggaagtttaagagaaaaatatgacatttgttgagggtcactacacttttccatcactattttccatgggctaaaattttaatagtaaatatttttaataagcaattttcctttcccacattttgattgagacaaatttcccattccttttgaggcttatggtgttcatctgacctatttaaaatgtagagttctgcctttgatagtctactggtaggaaaaaaa

SEQ ID NO: 883606 - DNA, 559 bp, Homo sapiens
cgcatgctcctcccctggcctccctctcagagtctctgtcatgctccactgaagttttctacttgtctctccccagctaagctgtttctgaaccatcttgggcaggagctggcataggccaggctctcaggaaaatgttggtttgagatgagctgttttaaagctgttcaaacagatgagacacacaatgtcattattaagttcggactagcacaacgttcattttctttttcagccacccctaaattaagctcctaattcccacctgcatcttggacctcttatctacagagaagcaaaagttttcttttttatttttaggactacctacaaaactggggaaccaagaaggcgagcagatcacgaggtcaggagttcgagaccagcctggccaatatggtgaaaccycgtctctactaaaaatataaaaaattagctgggcatggtggctcgtgcctgtagtcccagctacttgggaggctgaggcaggagaatcgtttgagcccaggaggtggaggttgctgtgagctgagattgcaccagtgcactccagcctggg

SEQ ID NO: 883607 - DNA, 588 bp, Homo sapiens
tctattcagggattcaacttcttcctggtttagtcttgggagggtgtgtgtgtcgaggaatttatccatttcttctagattttccagtttatgtgcgtagaggtgtttgtagtattctgtgatggtagtttgtatttccgtgggattggtggtgatatcccctttatcawtttttattgcgtctatttgattcttctctcttttcttctttattagtcttgctagcggtctgtcaattttattgatcttttcaaaaaaccagctcctagattcattgatttttttttttgaagggtttctttgtgtctctatctccttcagttctgctctgatcttagttatttcttgccttctgctagcttttgaatgtgtttgctcttgcttctctagttgttttaattgtgatgttagggtatcaatttcagatctttcctgctttctcttttgggcacttagtgctataaatttccctctacacactgttttaagtgtgtcccagagattctggtatgttgtgtctttgttctctttggtttcaatgaacatctttatttctaccttcattctgttatttatccagtagtcatt

SEQ ID NO: 883608 - DNA, 633 bp, Homo sapiens
tttactctcatttaatttcgttattttctcccgttagaagccccaactagaagctaaaggaagtcttgtattgaatttgggattatcttggaatttatattaaaaataaaacttgaaaatttctgacacaggaatagcagctagatttaatctcacaagccagtctccttktaaattgtattggctgcttgaaacactgttgaaaagtttgcaaccgcttttcagtactgtgaaaaagagtacagtgattaattagtaatgttttccacaggccgtgggaggtggagtagcaatgtactatatttgtaatccccatttcactaattgtcttggaagatatactttttaagaccagacgtggtcaatagaaataaaatgtaagacacatatataattgtggcacttggctaccacattggaaagtacaggtttagattttgaaagcagttattttatccctaaacattccttgcttgttccttaacctaatcagcatagtgtttattagggaatctctgaactggtttctgcaaagacaggatagtttatagcagtatattcatgttttcttacctcgtgtttgaaacataaattataagtaggtattgtaaagactgctatgatcctagacta

SEQ ID NO: 883609 - DNA, 555 bp, Homo sapiens
accacaatgacattttggttcccctggaatcaacgtcaactcagaaccagtgtccagtagtccccaaaatgtctgataattttcctttccccattgcacagttacattggtaaaaggccagaggtctcctcgggggaaggataggmaaaagattcactgcataaagtgttggtaatgtagtggagtccttcctcaaggtgacctagcctccccttcattcaaagggttctgggtctgtaaactggctcaagtctggaaattgattgaggggcagttttgttcattcaacctggaaattttctatttttataatttaagtaggaatgcagtaggcttcctatcaatttcacttctaggaacagcatgataaattagccaatgccagagctctacacaagtcagactattatgattgtcactttgcctctgctgtccattacggtagctatacccaccttgcctttgactgtttagtgttgtcacatggcccctgccacctcgggatccgattattctcattgtatttaaattttgtagttgagtgactgtgatttc

SEQ ID NO: 883610 - DNA, 555 bp, Homo sapiens
accacaatgacattttggttcccctggaatcaacgtcaactcagaaccagtgtccagtagtccccaaaatgtctgataattttcctttccccattgcacagttacattggtaaaaggccagaggtctcctcgggggaaggataggaaaaagattcactgcataaagtgttggtaatgtagtggagtccttcctcaaggtgacctagcctccccttcattcaaagggttctgggtctgtaaactggctcaagtctggaaattgattgaggggcagttttgttcattcaacctggaaattttctatttttataatttaagtaggaatgcagtaggcttcctatcaatttcacttctaggaacagcatgataaattagccaatgccagagctctacacaagtcagrctattatgattgtcactttgcctctgctgtccattacggtagctatacccaccttgcctttgactgtttagtgttgtcacatggcccctgccacctcgggatccgattattctcattgtatttaaattttgtagttgagtgactgtgatttc

SEQ ID NO: 883611 - DNA, 651 bp, Homo sapiens
ttacctatttatcctgatgctctcccttctccccagcccccacaggccccagtgtgtgttgttccaagaaggggattttattacttgcaacaagaaatgtagacactggggatagtaccacaaaacagggccttcccccaaaaaggtgaaaacagggcttttattaggctatttagctgagtcattttatatagagatggagtcagtacaggtgcagttgtcaatcatgcttctacatatgtcacatgtatagaaaatggacaataagctcrtctctggcaggatttttagtatggtaatgagaagagttcaacaaagttcatctccaactcaggcatctctggattcaatcgatttttgttgtaccagggctaggctttttccagaaacttttctgtaacaagaactcaaggtgcaagttaccagtggataatttttcagtgtgtcccccaaaacctgagaatcttgggttactattacttgttaatcctaggaaagcctgcagaaggctttacaatttctaacataagtgcagtgtacctaacttcttttatggagattagcttcccacacttcaggcagcttagcagtcttatctacaagtgggtgagtggctagattgataagtaggggagaaatcatctttgcgtg

SEQ ID NO: 883612 - DNA, 651 bp, Homo sapiens
ttacctatttatcctgatgctctcccttctccccagcccccacaggccccagtgtgtgttgttccaagaaggggattttattacttgcaacaagaaatgtagacactggggatagtaccacaaaacagggccttcccccaaaaaggtgaaaacagggcttttattaggctatttagctgagtcattttatatagagatggagtcagtacaggtgcagttgtcaatcatgcttctacatatgtcacatgtatagaaaatggacaataagctcatctctggcaggatttttagtatggtaatgagaagagttcaacaaagttcatctccaactcaggcatctctggattcaatcgatttttgttgtaccagggctaggctttttccagaaacttttctgtaacaagaactcaaggtgcaagttaccagtggataatttttcagtgtgtcccccaaaacctgagaatcttgggttactattacttgttaatcctaggaaagyctgcagaaggctttacaatttctaacataagtgcagtgtacctaacttcttttatggagattagcttcccacacttcaggcagcttagcagtcttatctacaagtgggtgagtggctagattgataagtaggggagaaatcatctttgcgtg

SEQ ID NO: 883613 - DNA, 559 bp, Homo sapiens
tggattgttctctaactccttcctcacagtcttcaccattgtattccgtgcgacaagcgagacagccaggtgctcatccactggtatcataggtagggtggtgaggttgatgacctccatcttcctgaagtgattcattgtccaatttcttgtaaatggacaaacaaaaagcttccacttttaagagcctctcatttcccactccaatcttgtcgtttgtttaatcagcctcctggaaatcataaacagcatagagccagctcagaaaacacaagaagaaaagcccaaccaygttccccagctacacagggttgatggcaaagcacatgtcccatgcctgcatggggaatgaaagggttccgtctgagaagcctattcttaaatgaggatttcaaggtatatggacttgttcttccaatgtctgatgcctgactctccctctgcccctcccccatgatgaaaattgttctagttttaaaaataaggaaactagaatgcggaaaaggccagggctccagactactccagaccactcagcaagtcagttcccaaacgagaa

SEQ ID NO: 883614 - DNA, 654 bp, Homo sapiens
attttttttctagttgagcttatttggatcttctctcttttcttggttaatctaatggtctatcacttttgtttatcttttcaaaacaccagtttttcctttcttttttgcattattttttgtttcaatttcatttagttctgctctgatttatgttattccttttmttctgcttgatttgggtatggtttatttgtgtttctctagttccttgaggtgtgagcttagattgtctatttgtgctctttcagacttttttttttttttaactgattctcactctgttgcccaggctggagtgcagtggtgctatcttggctcactgcaagctctgcctcccagattcactccattctcctgcctcagcctcctgagtagctgggacaacaggtgcccgccaccatgccttgctaattttttttatatttttagtagagatggggtttcaccatgttagcaaggatggtcttgatctcctgaccttgtgatctgcccgccttggcctcccaaagtgctggaattacaggcgtgagacaccacgcccagctgctctttcagactttttaatgtaggcatttaatgctatgaattttcctcttagcacatcttttgctatatcccagagattttcatagattgtgtcactattatcat

SEQ ID NO: 883615 - DNA, 654 bp, Homo sapiens
attttttttctagttgagcttatttggatcttctctcttttcttggttaatctaatggtctatcacttttgtttatcttttcaaaacaccagtttttcctttcttttttgcattattttttgtttcaatttcatttagttctgctctgatttatgttattccttttattctgcttgatttgggtatggtttatttgtgtttctctagttccttgaggtgtgagcttagattgtctatttgtgctctttcagacttttttttttttttaactgattctcactctgttgcccaggctggagtgcagtggtgctatcttggctcactgcaagctctgcctcccagattcrctccattctcctgcctcagcctcctgagtagctgggacaacaggtgcccgccaccatgccttgctaattttttttatatttttagtagagatggggtttcaccatgttagcaaggatggtcttgatctcctgaccttgtgatctgcccgccttggcctcccaaagtgctggaattacaggcgtgagacaccacgcccagctgctctttcagactttttaatgtaggcatttaatgctatgaattttcctcttagcacatcttttgctatatcccagagattttcatagattgtgtcactattatcat

SEQ ID NO: 883616 - DNA, 627 bp, Homo sapiens
tggacaaaatccccaagagtagatgcattgaagaaggtaaaaagagaagtttcactttacttgcatcacccctatccaaaggcaacacaatttggtgctgagagatcccctgcgcctatgatttctcccacagaaggaaggaaaattaaagtgagcatccagctttcacagtcttgtaggaggcggcccaggaggcctactgttgtctcaccccatgcagcccagaacacttatgggattgacactgccaaatcatcaggggaagcttgaagcagagggaaagggagggagcacacagtaaccagtgcatatttctcaacagctagccagtgattctgctaaatggttcatagactctaccaagatacccactcaagaagcctacagaacaactcacttgaagacattccaactacctggcacatgccccagcaccccttcacccattsttggcacccttcacatccctgtaaacagcatgcacaagctctcagagaaggcacacaagtttgaaaaacagatgcagatcttagcagctggctcaactttgctggtttcagagaaggctccacagcctcaaacacttcagggcactgccataggaaaacgtataatagaggttctcag

SEQ ID NO: 883617 - DNA, 641 bp, Homo sapiens
caatcattgatgtgcctgtccccagtttctctgatagtgaccctgcagcaattattcatgactttgaaaaggtgggcttctcattcttataaatattccaggattttttttctctctctctctcttttttacttcattggcaggtattaaattcattcatgaatgcacatgtttttgaggcaaagccttttcattcttttgttgttgaatacacattagttgattttgaaaggatgtagccgcttaatctaatggtagttggaaaattcgcaatgttaatgccttctgtgtcttacctgacttttttcccctacctaacagggaatgactgcttacctggacttgttgctggggaactgctatctgatgcccctcaatacttctattgttatgcctccaaaaaatctggtagagctctttggcaaactggcggtatgtattttggaagtcaaatttttayataagcatttccaagtaattttacttccttgttttttaaaaaaataatgaatttgtccaaaacattttattttattgaaataattttgaaataaaaaacgttgtgaacctaaaactgctctagaaaataaagattattttttacagtcattatctggtgtaggaaaggatttaaatagtgt

SEQ ID NO: 883618 - DNA, 669 bp, Homo sapiens
ggtgatacatactacagtttctttctttctttttttttttttgtaggtgggctaaggtttatttacttacataacatttaaaaataattcattgggtggctggcaagatggccaaataggaacagctccagtctgcagctcccagcaagatcaatgcagaaggcggctgatttctgcattttcatctgaggtacctggctcatctaattgggactggttaggcagtaggtgcagcccatggagggcaagcagaagcagggtggagtgttgcctcacatgggaagcacaaggggttggggaactcccttccctagcsaagggaagccgtgaggaactgtgctatgaggaagagtgcattccagcgcacatactatgcttttcccacagtctttacaaccctcagaccaggagattctctccggtgcctacacctccagggccctgggttgcaagcacaaaactaagcagtcatttgggcaggcaccgagctagctgcaggaggttttttgttttgttttgttttgtttttcataccccagtgacacttggaataccagaaaggcagaaccattcactcccctggaaacaggctgaagccagggagccaagtggtctagctcagtagatcccaccccacagagcccagcaagctaagatccactggcttga

SEQ ID NO: 883619 - DNA, 669 bp, Homo sapiens
ggtgatacatactacagtttctttctttctttttttttttttgtaggtgggctaaggtttatttacttacataacatttaaaaataattcattgggtggctggcaagatggccaaataggaacagctccagtctgcagctcccagcaagatcaatgcagaaggcggctgatttctgcattttcatctgaggtacctggctcatctaattgggactggttaggcagtaggtgcagcccatggagggcaagcagaagcagggtggagtgttgcctcacatgggaagcacaaggggttggggaactcccttccctagcgaagggaagccgtgaggractgtgctatgaggaagagtgcattccagcgcacatactatgcttttcccacagtctttacaaccctcagaccaggagattctctccggtgcctacacctccagggccctgggttgcaagcacaaaactaagcagtcatttgggcaggcaccgagctagctgcaggaggttttttgttttgttttgttttgtttttcataccccagtgacacttggaataccagaaaggcagaaccattcactcccctggaaacaggctgaagccagggagccaagtggtctagctcagtagatcccaccccacagagcccagcaagctaagatccactggcttga

SEQ ID NO: 883620 - DNA, 682 bp, Homo sapiens
cctttttgttatttccttcatttaaatttttccctcttagtactactttcactgtatcccacagattctggtatgttatgtttcctttatcaatcatttcaataaattttttaatttccttcttaatttcttcattgacccactggtcatttacaagcatgttgtttaactttcatgtatatgtatagttttcaaaatttctctggttattgatttctaattttattcctttgtgattacagatgatacttgatatttttttgaatgttttaagtcttgttttgtggcatatcttatgatctatccttgagaatgatccatgtactgaggaaaagaatgtgyattctatagctattggatgaaataatttgtaaatatcttttaggtctatttgttctgtactgcatataaaattcttcgtttattttctgtttggaagatctgtccaatgctgaaaagtgaagtgttgaagtctccagctattattgtatgagattatatttttctcttcaattctaatatttgctttatatatctttgtgctcctatgttgagtgcatatatatttataattgttataccttcttgcttaattatccccattatatttatacagtgaccttctctgtttctcaaagtttttatcttgagacctactttgtctgatatatgtatagctact

SEQ ID NO: 883621 - DNA, 631 bp, Homo sapiens
ccagttttactgtgaaattcttgttgtaaaattttcagctcctgaagttcagttttgttctttcctagaatggctatcttgtctttcagctcttgaataattttactctattgcttggtgtccttgaattgaatttcaactttctcctctatcttgatgagcttcgttgccatccacatttttaatttcatgtcagttatttcagacatttcaggcgggttaagaagcattgctgcagaattagtgggctcgttttaagaggacatactggctttttaaattactcaagrtcttgtgctgactttttctcatctgggaatgttgtcattcctttaattttggtgtaaatgggagtatagtcagttggcttcatttttggtagttttcagagcattaaagttctgtatagggtctttgtagtcaaatttttgcttttggtttcacagagtggggagaattagtaaacatttttagtgttgtagtttgggcagcgatccagtaaatggcacttgtgaacagttggcagtagacaggctcttactcagccacatggctcatttgtgtatacttgaattttcagttgttttctgtggtgtgagatgaatagaagtgacctcctcaccagttctgc

SEQ ID NO: 883622 - DNA, 631 bp, Homo sapiens
ccagttttactgtgaaattcttgttgtaaaattttcagctcctgaagttcagttttgttctttcctagaatggctatcttgtctttcagctcttgaataattttactctattgcttggtgtccttgaattgaatttcaactttctcctctatcttgatgagcttcgttgccatccacatttttaatttcatgtcagttatttcagacatttcaggcgggttaagaagcattgctgcagaattagtgggctcgttttaagaggacatactggctttttaaattactcaagatcttgtgctgactttttctcatctgggaatgttgtcattcctttaattttggtgtaaatgggagtatagtcagttggcttcatttttggtagttttcagagcattaaagttctstatagggtctttgtagtcaaatttttgcttttggtttcacagagtggggagaattagtaaacatttttagtgttgtagtttgggcagcgatccagtaaatggcacttgtgaacagttggcagtagacaggctcttactcagccacatggctcatttgtgtatacttgaattttcagttgttttctgtggtgtgagatgaatagaagtgacctcctcaccagttctgc

SEQ ID NO: 883623 - DNA, 615 bp, Homo sapiens
acatttttgtggttgctttatagtgtcactgctttgtgtacttaaatgtgtttttgaaatggttcataaagttcttccctttcaatatttagtgcttccttcaggagctcttataaggcaggtctggtggtgatggatttcatcagcatttgcttgtctggaaaatatcttatttctccttcaattatgaagcttagtttggctggatatgaaattccttgttggaatttctttcagaatgttaagtattggcccctaatctcttctggcttttagagtttctgctgggagttctactttttgtcttatgccattctctttgtaggtgacctgacatttctctctagctgcctataaaattttttccttcatttgaccttagataatttgatgastatatatcttgggaataattttcttaagaaatatcttactggagttttcagcatttactgaattttaatgttggcctctctagcaagattggggaagttctcaggaatgttatcttgaaataagctttccaagtttgtcccattctcctcatctctttcaggacaccaaatagaggtagatttgatctatacataatcttatatttctccaacattttgt

SEQ ID NO: 883624 - DNA, 431 bp, Homo sapiens
gttagaaggaagaaagaaatgctgggaagtcttagaaatgaataaaccatgactatactgttattattacactataataatgataatgcaaataaattgtgcagcatctagtggttcaagtgtgccctataccttttaccttcactatggagggggttgtttaaaarcaccaagagggggtcaggtgtggtggctcacacttggaattccagcactttgggagtccaaggcgggtggatcacgaggtcaggagatcaagaccatcctggccatcatggtaaaaccctatctctactaaaaatagaaaagttagctgggagtggcggcatgcacctgtagtcccagctactcaggaggctgaggcaggagaattgcttgaacccaggaggcggaggttacagtgagccgagatcgtgccactgcactccagc

SEQ ID NO: 883625 - DNA, 608 bp, Homo sapiens
aatttttttaaatgttaggaaaaggaagaaacagaagaggagagaatgagccattggcaaaaggtttgctatagcattaaactaataaataattataaataacactaataggaaaaaaattgagtcaattatgatgcattcatccaggctttatattgtattattacaaatatcattcagggttctaaaaggaaacagatgataaagtcaacctggaataatttgatacaggttcaggaaataatcaatttacaaagagtgtacagagaataggaaaccatctgagatagtgctgtaccccagagctagtaacaggagagctgtcactagctctaagcctaatgaggtgagggaaaaaagcaattgccagaacttggaaaaagagtgtcttggagacacctagtcgrcgatgacagcggttgtgacttctttaaaccaagggacacaccatctcaaagccaccccatatggagggatccagcagaataaatattctaataccatttctcctctccaataaccagctcaggtcccccgcatggcaaagctggagggcaagcacacatttgaggtcatctgtacccatcagcctcccaaggcacaggaca

SEQ ID NO: 883626 - DNA, 627 bp, Homo sapiens
ggtatttccagctcactcacagtgggccatcttttaatccatattttggctaaccaagcaaataattagaaccttttttaaatccccgagctgcaacattaaatgcagactccctacttagtgggcctaaatcaataaattcagcctggtccaactctgtattccttccaccattatcccatacccttgatgtccattcccatacctgttctccagatttctgcttatgtaagttagaaaacaggttctttttgagtgtagcacacctcctcatgggtcacattctgaacctcacctctaggggcccgctgggactttagtctagttataggtctagaagcaaacaggggtgttgggggtggctcctgagaagaatcaacatcatcttgcctggyaactacctcgggggaggccattactgttgcctcaggcagcgcagagtttatctcctcagacaaaagtggaaatgctgttggcagcatgggtcagggaggggatgttgccactactggggatggggtagctgtttctttgagcagtgcacctggttgtgtgctgtgcatggaaggagacatggccagatatataattatatactgattcgtggaacttgtagccaatggtttg

SEQ ID NO: 883627 - DNA, 666 bp, Homo sapiens
aatgaccagtcaataagtagaaagatgctaaatctcccttgtaattgatatcatttgtcacctctcaaatgtacaaatactaagaggattgataatgttcaactttgtcaagggtacagagaaacaaactctcatatatagttggctgaagtgtaacactgacacatttttatggagtcacttgtcagtatcaataaacattttaattttaaattttataattttagatttacagaaaaatyaagaatatagtacagagaatttctatacacaccacacccagtttcccgtattaagatattacattactatagtatatttgtcacaactaatgaactaatattgataccttatgactaagtcatcacttcactcagatttccttagtttttacccaatgtgcctcttttgttccgggattcatctaggacaccatattacatttagtcctcatatctctctaggcccctctttgctatgacagcttctcaatcttttctcttctttctgatgatgttgacagtttcaaagagtgctggttaggtattttctagaatgttcctcacttgtgattgtttgattttttttttttccatgtctcaaccgggataatatgttcttgggagaaagatcaaagaggtaaaatgccattatcatatcatatct

SEQ ID NO: 883628 - DNA, 666 bp, Homo sapiens
aatgaccagtcaataagtagaaagatgctaaatctcccttgtaattgatatcatttgtcacctctcaaatgtacaaatactaagaggattgataatgttcaactttgtcaagggtacagagaaacaaactctcatatatagttggctgaagtgtaacactgacacatttttatggagtcacttgtcagtatcaataaacattttaattttaaattttataattttagatttacagaaaaatcaagaatatagtacagagaatttctatacacaccacacccagtttcccstattaagatattacattactatagtatatttgtcacaactaatgaactaatattgataccttatgactaagtcatcacttcactcagatttccttagtttttacccaatgtgcctcttttgttccgggattcatctaggacaccatattacatttagtcctcatatctctctaggcccctctttgctatgacagcttctcaatcttttctcttctttctgatgatgttgacagtttcaaagagtgctggttaggtattttctagaatgttcctcacttgtgattgtttgattttttttttttccatgtctcaaccgggataatatgttcttgggagaaagatcaaagaggtaaaatgccattatcatatcatatct

SEQ ID NO: 883629 - DNA, 666 bp, Homo sapiens
aatgaccagtcaataagtagaaagatgctaaatctcccttgtaattgatatcatttgtcacctctcaaatgtacaaatactaagaggattgataatgttcaactttgtcaagggtacagagaaacaaactctcatatatagttggctgaagtgtaacactgacacatttttatggagtcacttgtcagtatcaataaacattttaattttaaattttataattttagatttacagaaaaatcaagaatatagtacagagaatttctatacacaccacacccagtttcccgtattaagatattacattactatagtatatttgtcacaactaatgaactaatattgataccttatgactaagtcatcacttcactcagatttccttagtttttacccaatgtgcctcttttgttccgggattcatctaggacaccatattacatttagtcctcatatctctctaggcccctctttgctatgacagcttctcaatcttttctcttctttctgatgaygttgacagtttcaaagagtgctggttaggtattttctagaatgttcctcacttgtgattgtttgattttttttttttccatgtctcaaccgggataatatgttcttgggagaaagatcaaagaggtaaaatgccattatcatatcatatct

SEQ ID NO: 883630 - DNA, 689 bp, Homo sapiens
tattgatcttgtatttttcaaccttactacactcactcattagttacaggagactttcataaatactctgcgattttctacatagacaatcatgttgtctacaaatagttttaatttgtcttttctaatttgtatacttttttatctcttttttcttataaaagttacaatttctaatacaatttgcaataagtaagaatggtgagagataatatctttgccttattctcaatttcaggacratgtccagtctctcactgtgaagtttggtataagctgtaggttttcttgaagatattctttatcaacttgtagaatttcccaactattcatagtttgctagagtttttgtcatgaatgggtagtgaattttgacagttcttttctgcaagaattgacctgattgtatgatttttctttgctagcctgttgataagattacttatattgattgatttttgaatgtagaaccagtcttccatacttgaaataaatcccaaatggtcctgatatataattctttttatatacattgttggaatgaatctcttagtatttgattgaagacttcttaaaaaaatctacatttatgagagatattgctgtatagattttctttccttaatgtctttgtctggttttagtattaggataatgctggcttaagaacattaagttagtaagttaag

SEQ ID NO: 883631 - DNA, 641 bp, Homo sapiens
cccctaggctgtacatctgggacatctgatttatgtggaaatttaccgagaactagttttatttctgtggcaggtcattttcactttctaggattatgtttcttcattgataaagtgagctacttgagcaagaccagtggattgaatgccacgtcccaaggaggctggggttgtttccagggatcttacagaacttaggtgtgatactgagcatgagctacttgtgttgcattttggtgttcaaaagaaaagttctttaaatagttctgctggaaagacaaaaaaaaaaaaaagaaaaaactttcacaacaaaaatctccaaaaacaaaaacccagaaaactggcatagaagtggatgatctttgcaatttttttcagtatatarataaatgattttgatcccatttaaaattttatcaaatgcaaaaagaaacaattcaaagtatagagctaccttttcttactctactgaaatctacactttatgtcagccctggagggtttagacgcactttatgtcagcccacttctttcgactgcactatgtcagccttggagggtttagatgaggcagtgagcatttgaatgcttttaatttccatttttcaaagtacattcttggtctataggagaggaacaag

SEQ ID NO: 883632 - DNA, 607 bp, Homo sapiens
attctggatattagacctttgttggatgcatagtatgcaaatattttctccaattttgtaggttgcctgtttactcctttgattgtttctcttgctgtcctttgcctattttttaattgggttatttgttttctggctattgagttgtttgagttccttatttttttttttggatattagcactcattagatatacactttacaaatattttctcccaatacctgtgttgtctcttgattctgttaattgttttctttgctgtgcagaaacattttagtttcayacaattccttaaaaaactaaaaatagaattgccatatgatccagaaattctacttctggatatttattgagaggaattgaaatcagcatgttgaagagatatctgcacttctatgttcgttatagcattattcataatagtcatgatatgccatcaacctaagtatccattgacagatgaatggataaagaatgaggtgtatgtacacaaaggaatactattcagcctttaaaaagtgggaaattctgtaacaacatggatagacagatactatatgatcttacttatatgtggaatctaaaaaggtaggtctcacagaaaca

SEQ ID NO: 883633 - DNA, 618 bp, Homo sapiens
ttcatggatggcaagactgggactctaggacaggctttcaatccattctaccctgttgttgttctgaaatgaaagttttatctcccagtttatataggtagccttatctttgatgcttcaatacctgagacctggccagtgtcccttttagtgattgtatgtgtgtgtgtgtgtgtcatatgcaatttccttatagcaatggcacagtgtatcactgtttaattaaagaagagaaagaaatgccaaacatacgaataaagtctgaatatatctgtaacattaaaagtgtaggtgtctatctttgaagatatgtcttaaggacartgaaagagtcagtgagtaagagaagagagtcctgggatttcatacaagatcagtgttacttgatggtgtaggctcctaggtatttcatctttaggatataccgtctattacaaaagccaagatttttagatttggatcaacattagggaacttcattctaggcaagagccaggttttgcctttatgttaatatgacctcagctgtgagctccattttgccaggcatcttaaaactgcaacacatatcattggaatcttccgttacagtctaatacatagccacacattgggagc

SEQ ID NO: 883634 - DNA, 650 bp, Homo sapiens
atggaggacatttttatgatggactcctacagcatccatcagaatatgtaagatgatgaggaatgtcttcctgtgttcccagatctcatgccacagaggcccttgcttactctatgtttgaattgtatttggaaaaaaaaaaaaaaacaaaaaactagggctagcaaaattgaaaaaagataaaagacgaaagaagccacatgtaaacatactgtgtttactcttctaaaatattaaaaaatgaaaagatccaaaatcaaattaatattcccctggaatttcatatctatttcagtgactgtggagtgaatctcaccacgaaagttgctgcagtcttgtataagtttcacatagttttactgtgtttgtgcctatgtgaraataaactactgtgcataaaatcttgctgttgagccatgtgtgaattagctgtgtgatgttacctccctgttactaccaggctggtttaggatatcatttctgtatgtggcaccaggattagaccaatgacagaaaaagaaagtgctctccctgccaaactggccaataaaactgttccacatatcccagactcagggttacctaaacaacctgtgtttaaagagaacaaaaacaaaagcctctgacatagtcttactccttgccaaatt

SEQ ID NO: 883635 - DNA, 600 bp, Homo sapiens
actgcccttagagaacttcaacgcaagctcctaacatgtacttaagacagaatttggtctttgtcagaactcacactagcaaacaaatggcttttttcagcaaaggcatggtgccttttagagttcttttctttttcttttaatttatttaaattaggctgtctcacttctactgtggctttgtgtttctgagaaacttttctctagtcagctcttcatatacaggcatacctaagagacattgtggattcagttctggaccaccacaataaagcaagtcacataatttttttgtcttcccagtgcatatgaaagttatgyttttgctatactgtagtctattttgtgcaacagcattatgcctaaaaaacaatgtatataccttaattaaaaaatacgttactcctaaaaaatgctaatgatcacctgagtcttcagcgagttgtagtctttttgctggtggagggtctttcctaggtgttgatggttgctgactgatcagggtagtggttgctgaaggtttaaggtggctgtggtaacttcttaaaataagacaatgaagtttgatgcatcgattaacttttcctttcaggaaagatt

SEQ ID NO: 883636 - DNA, 567 bp, Homo sapiens
catggtgccttttagagttcttttctttttcttttaatttatttaaattaggctgtctcacttctactgtggctttgtgtttctgagaaacttttctctagtcagctcttcatatacaggcatacctaagagacattgtggattcagttctggaccaccacaataaagcaagtcacataatttttttgtcttcccagtgcatatgaaagttatgtttttgctatactgtrgtctattttgtgcaacagcattatgcctaaaaaacaatgtatataccttaattaaaaaatacgttactcctaaaaaatgctaatgatcacctgagtcttcagcgagttgtagtctttttgctggtggagggtctttcctaggtgttgatggttgctgactgatcagggtagtggttgctgaaggtttaaggtggctgtggtaacttcttaaaataagacaatgaagtttgatgcatcgattaacttttcctttcaggaaagatttctctgtaccatgagaagctatttgatagcattttacccacagtacaactttttcaacattggagtcagtcct

SEQ ID NO: 883637 - DNA, 511 bp, Homo sapiens
ataagaattcgttgaacagttgtaagtattaacagcagaaaagaacaagatgaggcaagaatctcagagttcaaagaccagttcttcaaatcaactcagtcagataaatataaagaagaaagaaataagaaagatgaacaaaacttccaagaaatatgggattaygtaaagagaacaaatctacatctcattggcattcctgagagagaaagagaggaaatgaacaacctggaaaatatatttaatgaagaggtaatttgtgaaaatgttcctaatctctctaaagaagttgacatgcaaatccaagaaatacagagaacctcagctagatactatacaagataaccatccccaaggcacacagtcatcagattcaccaatgacaatgcaaaagaaaaaaatcttaaaggcagctgggagaaggggcaggtgacttatggaaggaaccccatcaggctagaagcagacctctcagaagaaaccttacaagccagaagaggttaggggtcta

SEQ ID NO: 883638 - DNA, 701 bp, Homo sapiens
caacagacagtaaaaggaattcaccacagaggagttggaaatcctcaggcatgatggaaccctcaaatccaaacccaatgtgttaaagtggctgttctacaaaggtgcccttctctaacaggtgtaaacactgaccccatggaagtggtctgagacccttttgtaccwtgctaatcatcttgattctaagcatacttcagtatagagagccaatactgttccttgaatccactgagtagtctctccgcagcaatggaaatgaacaatctacttttattgagttagtgtcagctctacatataggcagaacacacagttgtctatgtgatatgctatgtgatatgcttttgaaaccattaaaatcattgaggagaagacagaaggaagataatatttcccagacaatctcaggaagatgcaggctaagtgaagcatattgatgataacttggtatagctgtgatcaacagccaaataaggtgttaataaatctcctcatagaaaagcaacatattatctagatagcaaaagtggcaactgaagataagagtagagagaatcagctagaagaatccatgtgtaggatggtcatatgttacagtgtgttcataacaatcttggttttatactcattctcccagtgtaattaataatgccctgtttactgtcaaaaatctctcaatttagtttataaattacata

SEQ ID NO: 883639 - DNA, 701 bp, Homo sapiens
caacagacagtaaaaggaattcaccacagaggagttggaaatcctcaggcatgatggaaccctcaaatccaaacccaatgtgttaaagtggctgttctacaaaggtgcccttctctaacaggtgtaaacactgaccccatggaagtggtctgagacccttttgtaccttgctaatcatcttgattctaagcatacttcagtatagagagccaatactgttccttgaatccactgagtagtctctccgcagcaatggaaatgaacaatctacttttattgagttagtgtcagctctacatataggcagaacacacagttgtctatgtgatatgctatgtgatatgcttttgaaaccaytaaaatcattgaggagaagacagaaggaagataatatttcccagacaatctcaggaagatgcaggctaagtgaagcatattgatgataacttggtatagctgtgatcaacagccaaataaggtgttaataaatctcctcatagaaaagcaacatattatctagatagcaaaagtggcaactgaagataagagtagagagaatcagctagaagaatccatgtgtaggatggtcatatgttacagtgtgttcataacaatcttggttttatactcattctcccagtgtaattaataatgccctgtttactgtcaaaaatctctcaatttagtttataaattacata

SEQ ID NO: 883640 - DNA, 701 bp, Homo sapiens
caacagacagtaaaaggaattcaccacagaggagttggaaatcctcaggcatgatggaaccctcaaatccaaacccaatgtgttaaagtggctgttctacaaaggtgcccttctctaacaggtgtaaacactgaccccatggaagtggtctgagacccttttgtaccttgctaatcatcttgattctaagcatacttcagtatagagagccaatactgttccttgaatccactgagtagtctctccgcagcaatggaaatgaacaatctacttttattgagttagtgtcagctctacatataggcagaacacacagttgtctatgtgatatgctatgtgatatgcttttgaaaccattaaaatcattgaggagaagacagaaggaagataatatttyccagacaatctcaggaagatgcaggctaagtgaagcatattgatgataacttggtatagctgtgatcaacagccaaataaggtgttaataaatctcctcatagaaaagcaacatattatctagatagcaaaagtggcaactgaagataagagtagagagaatcagctagaagaatccatgtgtaggatggtcatatgttacagtgtgttcataacaatcttggttttatactcattctcccagtgtaattaataatgccctgtttactgtcaaaaatctctcaatttagtttataaattacata

SEQ ID NO: 883641 - DNA, 589 bp, Homo sapiens
cagctctacatataggcagaacacacagttgtctatgtgatatgctatgtgatatgcttttgaaaccattaaaatcattgaggagaagacagaaggaagataatatttcccagacaatctcaggaagatgcaggctaagtgaagcatattgatgataacttggtatagctgtgatcaacagccaaataaggtgttaataaatctcctcatagaaaagcaacatattatctagatagcaaaagtggcaactgaagataagagtagagagaatcagctagaagaatccatgtgtaggatggtcatatgttacagtgtgttcataacaatcttggttttatactcattctcccagtgtaattaataatgccctgtttactgtcaaaaatctctcaatttagkttataaattacataggccacattgatgagctacacttgtgatatgcatcaagtgatctgattctgggtatccaatgttctcttgtcttgttgaaaattctagctgtgtatttgaacaggggaggtattcatgggggaaaatgcagcatttccagagaaggcagagggatgaaaaaaatatataactcaaa

SEQ ID NO: 883642 - DNA, 626 bp, Homo sapiens
cctctcttgtgctcctgaagcttcccatcatcattctgatactattgtgccataatttctgactttatgtatctatatatcctccctaggatggtgagctgttttaggatagttcctttgtctttcgattcaccacaataacctgagtttatttttagcacaataccttacataacagacatatagaaaataattgttaaataggcaaattttaatagtggactagagaccttgggaagcagcaaggaaaccactgattagataaatattaatgtggcaaactggctttcattgttgtgagggttcttaacagtttttctcccacttctcgctgatttactatcactcctggcatcataaattcaagtcaataaatgttctgcatatatggggcaacatttgaactctttggagcagagatgtcaygtaggttgtaggaacaaatgtatggctccatgaaggttgataggaatgtaaattttaagctggaaaagaaagagacagcactcagaactgtatattcacttatttgtattaggtgagctaccagaaaaaatttttagaggcatttcatatggataaaaattcatgttaaaagcatcttcaaagattgcaacaaatgtacg

SEQ ID NO: 883643 - DNA, 599 bp, Homo sapiens
cacgagatccaagaaccctctcttgggtctggattgggactcctttccggtaacatcatgtctccctaaaatgtataaaagcaagctgtacggccgggcacagtagctcacacctgtaatcccagcactttgggaggctgaggcgggcagatcacctgagattgggagttcgagaccagcctgacgaacatggagaaatccygtctctactaaaaatacaaaaaataaaaaattagccgggcatggtggtgcatgcctgtcatcccagctacttgggaggctgaggcaggagaatcacttgaactcaggaggcagaggttgtggtgagccgagatcgcgccattgcactccagcctgggcaacaaaagtgagactccttctcaaaagaaaaaaaaaagcaagctgtacttcgactactttgagcacatgtcgtcaggatctcctgaggctgggtcacgggtgtgtccttaatcttggcaaaataaactttataaattgatcgagacctgtctcagatacttttgggttaaacagaagcaataatgtctataaagaaaaaaacacaaagcagaaacacaagaattcaggaactacattgc

SEQ ID NO: 883644 - DNA, 638 bp, Homo sapiens
cccaaggggtgggatctccctcaggagcaggcaggtctgggaggatctggagccatggaggagacacaactgctgccagaaatgctgcaagaaacagggagggaaagcaagaaatatcctgacttcttcttccctctacctctcaatattccttcattgtcttctattggctgaactcaggcagaagtcagcagccatcagtggaaatgcagcggcagggaccagacactggcactacaragatgaccaagggagtggctaggaatgcatctgagcacaaacaggcttgagattgccaaatgcaaaatctcaaaaaatttctcttttctcagaaagctgttggaggatcttctccaccaaaaatagggagtaaaccaagagatttgtgacttaacaaaaaaacaattcagtacaggtgagcggtaaaggggttgcctcttcagccgatggagaagcatcagcatgatctctataaagcagacctagagattaaccagctcaggttggacaagttttaaaaaaaggaactgaaaaatgaccaaattcagaagtattttgcagcactggaagagagttgcaggacaaattagtattagaaacacagaaaggaggcaaacaaacaaaagaggcagtatttt

SEQ ID NO: 883645 - DNA, 638 bp, Homo sapiens
cccaaggggtgggatctccctcaggagcaggcaggtctgggaggatctggagccatggaggagacacaactgctgccagaaatgctgcaagaaacagggagggaaagcaagaaatatcctgacttcttcttccctctacctctcaatattccttcattgtcttctattggctgaactcaggcagaagtcagcagccatcagtggaaatgcagcggcagggaccagacactggcactacagagatgaccaagggagtggctaggaatgcatctgagcacaaacaggcttgagattgccaaatgcaaaatctcaaaaaattwctcttttctcagaaagctgttggaggatcttctccaccaaaaatagggagtaaaccaagagatttgtgacttaacaaaaaaacaattcagtacaggtgagcggtaaaggggttgcctcttcagccgatggagaagcatcagcatgatctctataaagcagacctagagattaaccagctcaggttggacaagttttaaaaaaaggaactgaaaaatgaccaaattcagaagtattttgcagcactggaagagagttgcaggacaaattagtattagaaacacagaaaggaggcaaacaaacaaaagaggcagtatttt

SEQ ID NO: 883646 - DNA, 638 bp, Homo sapiens
cccaaggggtgggatctccctcaggagcaggcaggtctgggaggatctggagccatggaggagacacaactgctgccagaaatgctgcaagaaacagggagggaaagcaagaaatatcctgacttcttcttccctctacctctcaatattccttcattgtcttctattggctgaactcaggcagaagtcagcagccatcagtggaaatgcagcggcagggaccagacactggcactacagagatgaccaagggagtggctaggaatgcatctgagcacaaacaggcttgagattgccaaatgcaaaatctcaaaaaatttytcttttctcagaaagctgttggaggatcttctccaccaaaaatagggagtaaaccaagagatttgtgacttaacaaaaaaacaattcagtacaggtgagcggtaaaggggttgcctcttcagccgatggagaagcatcagcatgatctctataaagcagacctagagattaaccagctcaggttggacaagttttaaaaaaaggaactgaaaaatgaccaaattcagaagtattttgcagcactggaagagagttgcaggacaaattagtattagaaacacagaaaggaggcaaacaaacaaaagaggcagtatttt

SEQ ID NO: 883647 - DNA, 593 bp, Homo sapiens
ctcaggtccagctgtggacaggcaggtgcccattcaaggactgcttttcaggtttcttttcatatactatcaccctcatatagtaaataattatttagctgtctgaagtatgatgatggatcactgcttttctctctttaaacatacaagcctaactgctgtttttttttttctttttccttgttgatagctagtttctacctgtttcatgtaattgtttaaagagcctygggcccatgaaacaagctttgtgggcattcctcggcaatcaatttgtcctgttaatagctccatcccttcccatagagaagatccttcactttacaagaggtgctcagatttgaaatgatctgtctccctccatccatcagtcctttgcacctcttgtctgcctctttgcactatgtgctctccctttgcatgggtccttctgcttatttcactctctgaggttctggagcctgttatctcgtgtatccagtcctcggcctcccatccaatcctggatcaattgctggagccctgcaagtcacttcatctctgttcacggtttctactgcaaggcacagtgcacagaagagcaatgtgctgag

SEQ ID NO: 883648 - DNA, 593 bp, Homo sapiens
ctcaggtccagctgtggacaggcaggtgcccattcaaggactgcttttcaggtttcttttcatatactatcaccctcatatagtaaataattatttagctgtctgaagtatgatgatggatcactgcttttctctctttaaacatacaagcctaactgctgtttttttttttctttttccttgttgatagctagtttctacctgtttcatgtaattgtttaaagagcctcgggcccatgaaacaagctttgtgggcattsctcggcaatcaatttgtcctgttaatagctccatcccttcccatagagaagatccttcactttacaagaggtgctcagatttgaaatgatctgtctccctccatccatcagtcctttgcacctcttgtctgcctctttgcactatgtgctctccctttgcatgggtccttctgcttatttcactctctgaggttctggagcctgttatctcgtgtatccagtcctcggcctcccatccaatcctggatcaattgctggagccctgcaagtcacttcatctctgttcacggtttctactgcaaggcacagtgcacagaagagcaatgtgctgag

SEQ ID NO: 883649 - DNA, 593 bp, Homo sapiens
ctcaggtccagctgtggacaggcaggtgcccattcaaggactgcttttcaggtttcttttcatatactatcaccctcatatagtaaataattatttagctgtctgaagtatgatgatggatcactgcttttctctctttaaacatacaagcctaactgctgtttttttttttctttttccttgttgatagctagtttctacctgtttcatgtaattgtttaaagagcctcgggcccatgaaacaagctttgtgggcattcctcggcaatcartttgtcctgttaatagctccatcccttcccatagagaagatccttcactttacaagaggtgctcagatttgaaatgatctgtctccctccatccatcagtcctttgcacctcttgtctgcctctttgcactatgtgctctccctttgcatgggtccttctgcttatttcactctctgaggttctggagcctgttatctcgtgtatccagtcctcggcctcccatccaatcctggatcaattgctggagccctgcaagtcacttcatctctgttcacggtttctactgcaaggcacagtgcacagaagagcaatgtgctgag

SEQ ID NO: 883650 - DNA, 593 bp, Homo sapiens
ctcaggtccagctgtggacaggcaggtgcccattcaaggactgcttttcaggtttcttttcatatactatcaccctcatatagtaaataattatttagctgtctgaagtatgatgatggatcactgcttttctctctttaaacatacaagcctaactgctgtttttttttttctttttccttgttgatagctagtttctacctgtttcatgtaattgtttaaagagcctcgggcccatgaaacaagctttgtgggcattcctcggcaatcaatttgtcctsttaatagctccatcccttcccatagagaagatccttcactttacaagaggtgctcagatttgaaatgatctgtctccctccatccatcagtcctttgcacctcttgtctgcctctttgcactatgtgctctccctttgcatgggtccttctgcttatttcactctctgaggttctggagcctgttatctcgtgtatccagtcctcggcctcccatccaatcctggatcaattgctggagccctgcaagtcacttcatctctgttcacggtttctactgcaaggcacagtgcacagaagagcaatgtgctgag

SEQ ID NO: 883651 - DNA, 667 bp, Homo sapiens
ggtccaaccatagcaactatgtcagtgtgcagataactgaaggtgcctttccctccctggcttggcttctccctcttacttctcttcccaagctctcaatttgctttatttttgtatattttaccacgatattgtctctctgtgtgtctttatataaaacttgagttattccagttctgccaatctgtgtaatcacttggcatttttatttgtgttcataattttcagccatggagacatttgaaagacaacaaaatcgatcctggagaaacagagatgtgggcactattgcaatttatagaatttattgtraaattggactttgatgaatctttgccatacatattctgttgcttaagattttttgtaacaatttatgtgtctattgctttatgtgaaagacgcttttcaaaattaaaatcagtaaacagtgttctgtgattaaccaggaacaaaagtagatggacaactgctcaatgaacatgaaacgatgaagatcaatttttcttctaggtcatggacaaattaaagtagttaagtgttaaaaacagagaccatgatgtcattcctcatgactacaatagaccaatatttaactctaagcgtatttcctttaaaaaaaaaaaaagttaactacaaaaatgtagttaaaggtgctaatctacta

SEQ ID NO: 883652 - DNA, 667 bp, Homo sapiens
ggtccaaccatagcaactatgtcagtgtgcagataactgaaggtgcctttccctccctggcttggcttctccctcttacttctcttcccaagctctcaatttgctttatttttgtatattttaccacgatattgtctctctgtgtgtctttatataaaacttgagttattccagttctgccaatctgtgtaatcacttggcatttttatttgtgttcataattttcagccatggagacatttgaaagacaacaaaatcgatcctggagaaacagagatgtgggcactattgcaatttatagaatttattgtaaaattggactttgatgaatctttgccatacatattctgttgcttaagattttttgtaacaatttatgtgtctattgctttatgtgaaagacgcttttcaaaattaaaatcagtaaacagtgttctgtgattaaccaggaacaaaagtagatggacaactgctcaatgaacatgaaackatgaagatcaatttttcttctaggtcatggacaaattaaagtagttaagtgttaaaaacagagaccatgatgtcattcctcatgactacaatagaccaatatttaactctaagcgtatttcctttaaaaaaaaaaaaagttaactacaaaaatgtagttaaaggtgctaatctacta

SEQ ID NO: 883653 - DNA, 635 bp, Homo sapiens
ctttgatgaatctttgccatacatattctgttgcttaagattttttgtaacaatttatgtgtctattgctttatgtgaaagacgcttttcaaaattaaaatcagtaaacagtgttctgtgattaaccaggaacaaaagtagatggacaactgctcaatgaacatgaaacgatgaagatcaatttttcttctaggtcatggacaaattaaagtagttaagtgttaaaaacagagaccatgatgtcattcctcatgactacaatagaccaatatttaactctaagcgtatttcctttaaaaaaaaaaaaagttaactacaaaaatgtagttaaaggtgctaatctactacttttttggkactgtaatatttactgtattatttatttttctattttatgggcataaccatccacagaagggtcagtaagagagaaatatcactgctttcctcttctatccattatttttgttgtttcgtttcatggctactactaaaaataatgttgtcacagagaagcaaggtgataaaaggattctctctgggggtcaatccatgaagaaagctggagaaatatctgctgaacagagttcatggcttcatgttctatctgagcaagtctcatcctgcagtcagct

SEQ ID NO: 883654 - DNA, 607 bp, Homo sapiens
gatactcttttctcttatcccccaggccgtgggtgtgtagaggccttggtggtgcagtggtagaattctcgcctcccacgtgggagacccgggttcaattcccggccaatgcagcaggtacttcttcatttcattatggccttttacccgtcttttacgctgcaaaattatactgyataacctaatagtgcatttaggggcttggccaccacaaggtaaagtgacaacattactcacgagagtagcggcaagagacattcaggacactaacccaggacccatgcaattgttggactcaaacagcttagcaaagtggcaagcacgaagtctttccggtgagtcactgcagttttgatattggtacctgttactttcatctattcacggggcggatccctgcaaacccgaagaatcatcaggttcctgattcgcgtgctggaccttgggcttactgctgagccactgtagagaggatcaagaaatgacgctcttggaaggagagaagctgcgggcaggacagtcacgtcagaggtccaagaggcttcagcggcccaaagaaagggaaggtgtgtggggaagaatctgcgtggagatgaggggagcggcg

SEQ ID NO: 883655 - DNA, 645 bp, Homo sapiens
gttgcggaggcagctgcaggaggagcaggcctcctagtggcgcaagctgcaggcctacctggagggccagcagcggcaggcccagcttgtgcagcggctgcagggcaaggtcagggccacccattcctgctctttccctcccacgtgttcactttgccctgcccccacccctggggctcaccatcagctcccaatccccagattctccagtacaagaagaggttctcggagctggagcagctgttggagagatccggagagctggagcagcagcagctgagggtgggtgccagggtggggcagaggcaggccctgccctccacctgcccagcctgatgctttaacctctctgccacccaggacgcagagcacagccaagacctggagaktgccctcatctggctggaggaggagcagcagggagggccagggctggcagcatggccccctgggcgagcgcctactgatcccctgtgccccattcaggagtgccagcctggcccaggtgaatgccatgctctgagaacagctggaccaggcaggtttggccaaccaggctctgagtgaggagatacgaaaggtgaccagtgactggactcgcagctgcaaggagctggagcagtgggaggcggcatggaggcgcga

SEQ ID NO: 883656 - DNA, 658 bp, Homo sapiens
gcttgtgcagcggctgcagggcaaggtcagggccacccattcctgctctttccctcccacgtgttcactttgccctgcccccacccctggggctcaccatcagctcccaatccccagattctccagtacaagaagaggttctcggagctggagcagctgttggagagatccggagagctggagcagcagcagctgagggtgggtgccagggtggggcagaggcaggccctgccctccacctgcccagcctgatgctttaacctctctgccacccaggacgcagagcacagccaagacctggagagtgccctcatctggctggaggaggagcagcagggagggccagggctsgcagcatggccccctgggcgagcgcctactgatcccctgtgccccattcaggagtgccagcctggcccaggtgaatgccatgctctgagaacagctggaccaggcaggtttggccaaccaggctctgagtgaggagatacgaaaggtgaccagtgactggactcgcagctgcaaggagctggagcagtgggaggcggcatggaggcgcgaggaggaggtgggcatgggggtgcagggaggccggcgatataagaggaagataatgcacaattatgctagtgagactctcttttccaataatgtttgc

SEQ ID NO: 883657 - DNA, 600 bp, Homo sapiens
gcttcaagcaaggagcaagtgcagaatgctgcagggaggggaatgtctgaggtccagttaaagggatggccccatgcacagcttcagacagacatggtgctggcaacccaatctccaccctgaacacaggcctcaccacaggaattggaagcttgtggtgcaatgaggataaacagaacaagaacaaatctcacatccagcccaactcctgactgcagtaactcaaacccgtcactaaagcatcaggaagggtgtccgattccaggcataaaaaccatgttcctcagtctctactgtctgagccaaaaggtccagctttcaacaaaaacatcacgaggcctgtaaggcacacaggaatcagcagaaccagatgcagacatcacagtgatgctggaactatatgacagggactttaaaataactatgattaacaccttaaaggataacatgcaygctcagatgaaaaatggcttccagagtacctcagcagaactgaaacagctaaggaaaggatcagggaacatgaagatatattgataggagttacccacactgaaccacaaacagaaaaaagagtgaagaaaaagaagaaaaaaatat

SEQ ID NO: 883658 - DNA, 668 bp, Homo sapiens
gcctttgggtcatctttggcctttgggtcatctttggcctttgggtcaggggtcactgaaccttggctcatccactagatgtgcctgggacattaggcatcttctcttgatctcatgtgattccatgaataacaatagagctaccatttggtgagtttctacctcactcttcgacaaatacctattttgtgcgcartatgtgctgagcactggggctgcaatagtgaaccccacagagcttttaaatgccagagagggaccggccagactcccagctatgtgaacacattgctgtggcctctgaggccacacaaaggccccttctgttctcgactctctggctgcttaattgtagacttttttccccaactcatcacatgctggcccttggcatttccctatcctccgatactggggtgtcggtggggaagggaaggaaaaacaaatgggcaaacggaagacaactcacagagccaaggaaggattttcttcctgtttcttcccctaagcagtttaacacaaattaatttaagtacagcctatatctgatgaagatgtcacttagattcattttcttaaccaactatttcaagcccagcattaatctattcatcagctgcactcatcaggagaaaacatgcttcttcaggacttttccagctgaaaat

SEQ ID NO: 883659 - DNA, 620 bp, Homo sapiens
tggctaacatggtgaaactgtctctactaaaaatacaaaaattaaccaggtgtggtggcgcacacctgtagtcccagctatgtgggaggctgaggcaggagaatcacttgaacccaggaggcagaggttgcagtgagccragattgtgccactgcactccagtctggcgacagagcgagactccatctcaaaaaaaaaaaaaaaaaaaaaagaaaaaagaaaaaaaagaaaaaaaaaagaaaaatattttcatagcaatggaatgcaatgggaaagaatgttaagaccaaaatgtctgtacctattagactgtgtgcaaattaaggcagacatgatatctctccctggcacatggtaagacccaaattaatatgtgctaactgatcaactgactgacttaaaagattccagtcaactaagaaaggttctacaaatggttagaaaaaaaggaaaaaccaaactatcatatataatatagagctctccatttctatagtgaaaaaaacataataaaccagagaagaaatattacttgtgaatggaataacaactaaaataataaatttttatttctttaccctttacaaaactcacagttctttgaagtggatgttcttatt

SEQ ID NO: 883660 - DNA, 626 bp, Homo sapiens
tatgtcaataaaaaatacaaaaaataataattctctatattaaccaagggaatggtcacatggaaagaaaatgaaaaggaagaaaaaaaaaaaaagctaaagagaaggattctgacccaaagcctaagagaagcattgacagtgttttaaagacccccgagacatctagaagaataagaattgagaaaagaattgggaaaagaattggttagacattgtttcacattgyaaataatgcataaataatgaattaattgattgactaattatttaattttctttcattataaaggtttgggcaggagggagacttagaaatcatcttcctctcaggacagtaagaatttgtgcaacaactttttaaatagccttccaacttcagcgttgggttcaataatgtgaggtcactcctgtgctaagtggactatccaaagacttgcaaacccccagaggtaggtatcagatatgattacacatatcacatatgattacacatatctcaacacccgtttttcctccaaaggttagatcaccacagccattccagattgtccattttgtcaatgtccttctacatacaggggccagcattactgagcacattgccttaaaagtgtcctaaaaat

SEQ ID NO: 883661 - DNA, 637 bp, Homo sapiens
gctggcctcaaactcctgtgctcaagttatcatctcacttgtgccttagtctcccagatagctgggactacaggtgtggaccaccatgcccatttccccccagataagtctttaatggagcctccaatacaccgagattaaagtttccaacatcggcactggcaaaactataaaggcttcttctccacaagacccataggagatgctccctgggtttacatgcccttccccacgacagaccttcacatcagcgctgcaactggattcaagtgtcagatgtgctagttaatgctgtgggtcccaaaggaatgagacgtgtaattctgactaatttcgactgaagataagtgcaatgtctatacaaacaaaaacaacaataaaaagatcttttactgtgtcaaacatgactactgcttagtgtacctcttacttgtttgttwtaagtatgctttaagtctctctcctttttccatttcccactttgagttcctctagaaggactcccttctgttactctttatacatgcactgcctcacagaggaggtagaaaggcctcaggatgggaaaactgaggggaaaaaagcaaaaccatcatgccacctaaaaactaaacttaagagtattcctacctcttgc

SEQ ID NO: 883662 - DNA, 580 bp, Homo sapiens
ctcatgcctttgtggttgtaaatgtgcctggaatcctagcctttcatggtaaaccatatgtatatgtatctttttcacaacatttgagcccagctttatacaattacactcaaaagaaaaaaagtaaccttcacttgagagaatctcaatactgcacaaatattgtgcagctaaagccctatgtaatcacatagaagtcattcacctaggcattagcaaaatctcagaaggtgccaaagcccccttttttagtttttgtgtagrtacagaactgccgtcttcaaggagtttcaacttgaaaacaaatagccaccctcaaaacattcaaaaacacttaaactgcgtgcataatgtgtgtgagacatggtgttaggctttgggagaacagagacacggaacgtgattcctcttcttccccacaagcttatagagagacttcattaagttgaaagtcaacattcccacctagctttgcacttcaaacgacatattcaaaaaagcccaaacttcctctagttttcttcatctgagtaaatggtttcacaaactgaaaccttgaatcctctctgtctcacacacc

SEQ ID NO: 883663 - DNA, 639 bp, Homo sapiens
aaccttgaatcctctctgtctcacacacccgatcagtaagttctattgtttctgattccaaactatgtcttgaatcaatccgtttatctccatcctcattgctaccactctgattccaaacccttatcacctctcacttggagtattaatagtttccttgtttctactcataattcattattccaaaaaagttaagaggggaaaaacatagatctcgtcatttccctttttaaaccactttaccttcaaggttccaggtgatctaagccttrcccttctctcatacctagttaattaactacactctgttcatgaatacattaggctcacctacctcaagatctttttgctcagcctgatttgttctctcagccttttgcatatttcatgtttatgtcttggcccaaatgtcacttccttagaggggctttttcagagccttcaatcttaggcagttcccccaaacgcagtcttacacttgtatcacattggcctgttcagttttctaaaaagcacattaccattaaaagaaatgctcttgtttgctttgtatattttccacttctacacattatgttgcaaagttcataaaggcaggatgttgattttcttcacagcgttaccctcagcacctagaac

SEQ ID NO: 883664 - DNA, 615 bp, Homo sapiens
ttaagtgtggagaactgcaagaaggaaaggaactactagaaggaaaaagcaagatactttctgggtaactcagcctcctaatgataaatggcatagtttcttccagaccttagagttctaattaatctaacaagctcattagatcgtgagcttcttgagagcgggaatctaccatgctaattccttatkgtaaccctgacagcttttatcccaacactgtgcttcttgtggtactcaaaaagacttgttgagaagtgagtcgaaacttcatgctgacttatgaaatctttacggaaaggtaacaatattgtgaaagcagagctttctgatcaaaacttcccatttctcagagtggctagtatcattttgttccaaccagcttcatgataagctataatgattcctgtgactttacctaagaagaagcaaagaaaggaaagagacttaccaaactgacactggggcccatagtaccccacatcacagttgcaggtgtaattattgatgatttctacacattctccatggccactgcatgaccagggctggcaagaagctttaaggaggtcagaaaaaaaatattttaatgtgattacattttagtactcaaagtca

SEQ ID NO: 883665 - DNA, 615 bp, Homo sapiens
ttaagtgtggagaactgcaagaaggaaaggaactactagaaggaaaaagcaagatactttctgggtaactcagcctcctaatgataaatggcatagtttcttccagaccttagagttctaattaatctaacaagctcattagatcgtgagcttcttgagagcgggaatctaccatgctaattccttatggtaaccctgacagcttttatcccaacactgtgcttcttgtggtactcaaaaagacttgttgagaagtgartcgaaacttcatgctgacttatgaaatctttacggaaaggtaacaatattgtgaaagcagagctttctgatcaaaacttcccatttctcagagtggctagtatcattttgttccaaccagcttcatgataagctataatgattcctgtgactttacctaagaagaagcaaagaaaggaaagagacttaccaaactgacactggggcccatagtaccccacatcacagttgcaggtgtaattattgatgatttctacacattctccatggccactgcatgaccagggctggcaagaagctttaaggaggtcagaaaaaaaatattttaatgtgattacattttagtactcaaagtca

SEQ ID NO: 883666 - DNA, 625 bp, Homo sapiens
tggaaattgcaaatactacaaatcaaaactgcatttcagacatatttatgatgtttgcaaaacttcagtagagctaagcagtggacttgactcgtttcggttccttcacctccgtctttccttgctcaccacctagyggacgtccttgttagtggcacttcctgaagttaacccctgaagagagcccatgctctctagcttttcaccgtgtaggtttgggagcctacaagtacctttaatattcttggactataaaatgagatggttttataagactgcatgtgaaattaggacccatatgatgaaggacaataaaaaggaagacccactgatgtgagtcaatgagtcaaatgcaaatcagatttgcatttttaggaaaataataataacaacaacaaaaactctgaagctcagcgccccatatttattatattgtttaatctttataacagctctctgctatagatatgattattatccccattctaaagagtctcaaagaggttaagaaacaaattcaaaaactagcgaaagacaagaaataactaagatcagagcagaaccataggaggtagagacacgaaaaagccttcaaaaaatcaataaatccaggagctgcattttg

SEQ ID NO: 883667 - DNA, 635 bp, Homo sapiens
cattaaagaggagacctagtgtaagtagccagttctcgtgaagggacatgtattagttggagttctccagagaaacagaaccaatggtgtgtgtgtgtgtgtgtgcgtgtgtgcgtgtgtgtgttggggtgtgggggtgtggtattttttatagaaattgtctcacacaattatggaagctgagaagtcccatggcctgctgtctacgagctgagaaccaggaaagccagtggaatacttcaaagtccaaaggccctrgaaccaagagtgccagtgttggaaggcaggagaagatgggtgtcccagcttaaaaagacagtgaattcactctttttgctctacatagggcctcaatgggttggatcatggccacccacattggtgaaggcaatcctcttagtctaccaattaaatactaatctctttggaaatactctcacagacacactgagaaataatgttttatcagggtgatagaaatcttctggagttaaacaatggtgatagctgtacaatcacatacatttttaaagggtgcgttttatggaaagtgagttttatctaaataaaatttctaagaaagagacttaacacagagataaacataagcacatttattgtcaacctttatagtg

SEQ ID NO: 883668 - DNA, 611 bp, Homo sapiens
ctgaaggataccgagaagctaggtgtgcaaagatgtggggacagaacttttggactgaatagcaaatacaaatgcccttgggtgcaagctttgcctgttcaaggaccaaaaagaaggccagtgtgcctgcagcatactaagcacagaggaaaacactgttatatgctgagattggaattataagtagagccagataatatagtctcttataggtcataataaggcaaccagattttattccaagaggatttaaaaatcactggaggttttgcactagggtgagaggtgtgatttgtatttttaaaagataattctggagaattaaytataatgaggtaggagtaaactaagttaggggctatttcagtggctcagacaagagataatggtagcttagactaggatagtagtcgtagaaataaataaaagtggcactctactttgggggtagagtctataataggtttggtttatggatcatatatgagagtaaaaaaaagaaaataaattaataatggttcctaggtttgtacctgagcaactgaataaatgggtgctgtgaattgagataaaggagattgagaatcacaggctttgttttgcaaattaat

SEQ ID NO: 883669 - DNA, 640 bp, Homo sapiens
taagtaaaattatctcaagtaaactaaataagaaggctttccatgaactgggcaattgttggaactaagcagacttggagtggctgattctaatatgtgcctagaattacaatattgatccagatttttacattacctatccctcttgtttcttctgagcttgcatccagaggtcactggttggttcacaggaataagctgggtcagtctaaattgcagggaaaaactcaaaaacaacagacaaggctaggttctagtaacaggtgtactatagttattgaaacatagtttttctctctccagtctcccrtttttactaaagacaaagcatgataggcttgatttgtttgcaaaataaactttagtcttattatacctggcctgattatttgtataaagtgcagcaagaataatttttgctgtataggctctttttaagttggctttgatggaactttcttccgtaaggaatcttagagtagacttcttattaaaggtttgagcccagccaggggtttgtgcttgcaaatacctgtgtgagttggataaattgtttccttctttcagggtcccaagataacctgggcctcctgagcctgtcagaaagtgacattctttacttaccacaggtcaagaaccc

SEQ ID NO: 883670 - DNA, 668 bp, Homo sapiens
atgaaggagagagcaatgtacaatctgattaatgttattggtctcttttaaataaattggttctattaatatctgctaagatggatcactgaattagaaatactaatacccagcctttattttgtagcatttaatttgatgagtgtttggggatccttcacatatattcacctttggtttaataaggttatttaagtaacagcagtgtatactgacaatatttgagttccgatatctaatagaaaactcacattctacttaytatatttgtactagcccccaagagcattgccagaacggagtttcaacaacaaaaatcattgttgaacatgactatgccccacaatgaaaatacgagttattataaatcagtgagggctgggcacagtggctcacgcctataatcccaacactttgggaggctgaggtgggcagatcacttgaggtcaggagttcgagacctgcctggccaacatgacaaaaccccgtctctactaaaaatacaaaaattagctgggcatggtggtgcacacccgtagtcccagctactcaagagacggaggcaggagaatcacctgaaccccagagacagaggttgcaatgagctgagatcacaccactgcactccagcctgggtaacagagcatgactctgtctcaaaaaaatat

SEQ ID NO: 883671 - DNA, 711 bp, Homo sapiens
gtgcactcgattaggctgatagtggtgttagcacatgagtggggtattcactatttcctaatttaccttgtgatttcttttttgacccattggtttttaaagaatgtgttttacaattttttcatatttgtagactttccagtattccttcaactggtaatttctagttgcattgcattgtagttggaaaagataccttgcatgatttcaattttattaatttgttaagatttgttttgtgacctaaaatgtagtctgtcctggagactgtcacacatgtgcttgagaagaatgtgtatcctcctgttgttggaagaaatgttctgtacatggctgttaggtacaattggtccacagtagtcygcccttatccttggtttctctttctgtggttctagttactcatggtcaaacgaggtctgaaaatattaagtggaaaattctgaaaatcaataatcaaaagttttaaattgtgcatcattctgagtagcatcttgctccaacctgtttggaacatgaatcatccctttctgcagcatatccatattttagatatatttttctatcttttcccttatagcttatgtgtgtctttaaagtctgttgtagacagcatatggatggctcttggttttttgttgtttttaattttttatctattcagccaatctatgtattttgattagtttaattcatttacatttaaaatac

SEQ ID NO: 883672 - DNA, 553 bp, Homo sapiens
ttataaatgggagttcccctgaacaagctctcttgcctgccaccatataagatgtggctttgctccttgacagcttccaccatgattatgaggtccccccagccatgtggtactgtgagtcaattaaacctctttcctttataaattacccagtctcaggtttgtctttattagcagcatgagaacagactaatacagtaaattggtactcgtagagtggggtgctgctataaacatacctgaaaatgtggaaataactttggaaccgggtaataggtagaggttggaacastttggagggctcagaagaagataggaaaatgtaggaaagtttggaacttcctagagacttggagggatcagaagacaggaagatgtgggaaagtttggaacttcctagagacttgttgaatggctttgacaaaaatgctgatagttacttggacaataaagtccaggctgcagtggtctcagatggagatgaggaacttgttgggaactgcagtaaaggtcactcttgctatgcaaagagactggtggcattttgcccctg

SEQ ID NO: 883673 - DNA, 579 bp, Homo sapiens
gtagaggttggaacactttggagggctcagaagaagataggaaaatgtaggaaagtttggaacttcctagagacttggagggatcagaagacaggaagatgtgggaaagtttggaacttcctagagacttgttgaatggctttgacaaaaatgctgatagttacttggacaataaagtccaggctgcagtggtctcagatggagatgaggaacttgttggsaactgcagtaaaggtcactcttgctatgcaaagagactggtggcattttgcccctgccctagagatctttggaaatttgaacttgagacagatgatttagggtatctggtagaagaaatttctaagcagcaaagtgctcaagatgtaacttgggtgccgttaaaagcattcagttttatgtattcacaaagatatggtttagaattggaactgatgtttaaaagggaagcagagcagaaaagtttgcaggctgacgatgcgatagaaaagaaaaacccattttctgaggagaaattctagctggatacagaaatttgcataaataacaaggagctaaatgttaatcaccaaggcaatg

SEQ ID NO: 883674 - DNA, 692 bp, Homo sapiens
tgcagggttggggccctcatggagaacctctgttaggacagtgcagaagggaaatgtggggttggaccccccacacagagtccccactggtgtactgcctaatgcagctgtcagaagacagtcaccatcctccagaccccagaaaggtagatccaccatgagtttacaccatgcacctggaaaagccacagacactgaactccagcctgtgaaagcagtcaggagggaggctgtaccctgaaaagccacaggggtggagctgcccaagaccataggagcccacctcttccattagcatgatctggatatgagacatggagtcaaaggagatcatttcagagctttaagatttggctgcccaactagattttggattgcttggagcctttagcccctttgttttsacccatttcgcccctttgcaatgggagcatttacccaatgcctgaatgtccattgtatcttggaagtaactaacttacttttgattttacaggcttataggcagaagtgacttgccttgtctccaatgagactttggactgtggactttttagttaattctgaaatgagttaagactttgggggactgttgggaaggcatgattgggttttgaaatgtgaggacatgagatttgggaggggccagcagtgaaatgatgaggtttggctgtgtccccatccaaatccca

SEQ ID NO: 883675 - DNA, 692 bp, Homo sapiens
tgcagggttggggccctcatggagaacctctgttaggacagtgcagaagggaaatgtggggttggaccccccacacagagtccccactggtgtactgcctaatgcagctgtcagaagacagtcaccatcctccagaccccagaaaggtagatccaccatgagtttacaccatgcacctggaaaagccacagacactgaactccagcctgtgaaagcagtcaggagggaggctgtaccctgaaaagccacaggggtggagctgcccaagaccataggagcccacctcttccattagcatgatctggatatgagacatggagtcaaaggagatcatttcagagctttaagatttggctgcccaactagattttggattgcttggagcctttagcccctttgttttcrcccatttcgcccctttgcaatgggagcatttacccaatgcctgaatgtccattgtatcttggaagtaactaacttacttttgattttacaggcttataggcagaagtgacttgccttgtctccaatgagactttggactgtggactttttagttaattctgaaatgagttaagactttgggggactgttgggaaggcatgattgggttttgaaatgtgaggacatgagatttgggaggggccagcagtgaaatgatgaggtttggctgtgtccccatccaaatccca

SEQ ID NO: 883676 - DNA, 692 bp, Homo sapiens
tgcagggttggggccctcatggagaacctctgttaggacagtgcagaagggaaatgtggggttggaccccccacacagagtccccactggtgtactgcctaatgcagctgtcagaagacagtcaccatcctccagaccccagaaaggtagatccaccatgagtttacaccatgcacctggaaaagccacagacactgaactccagcctgtgaaagcagtcaggagggaggctgtaccctgaaaagccacaggggtggagctgcccaagaccataggagcccacctcttccattagcatgatctggatatgagacatggagtcaaaggagatcatttcagagctttaagatttggctgcccaactagattttggattgcttggagcctttagcccctttgttttcacccatttcgcccctttgcaatgggagcatttacccaatgcctgaaygtccattgtatcttggaagtaactaacttacttttgattttacaggcttataggcagaagtgacttgccttgtctccaatgagactttggactgtggactttttagttaattctgaaatgagttaagactttgggggactgttgggaaggcatgattgggttttgaaatgtgaggacatgagatttgggaggggccagcagtgaaatgatgaggtttggctgtgtccccatccaaatccca

SEQ ID NO: 883677 - DNA, 527 bp, Homo sapiens
ttgggtagtttggacattttccaaacattaagcctttcaatccatgaacacagggtagctttccatttgtttgtgtcttctttaatttctttcagtaatattttgtaatttttatgtataaacctttcatctccttggttaagtttatatttaattattttattcttatgctattataaataaaattgctttcttaatctcctttttggatacattgttgttagtgtatagaaacaaatgatttttgcatgttggtttgtaccctgcaactttgctcgacatgtttattcattctgacaggtgtgtgtgtgtgtgtgtgtgtgtrtgtgtgtgtgtgtaatcttcagagctttctatatacaagatcatgtcacctgtgaacaaagataacttttacatcttcctcttccatttgaaccacttttatttcgttttctaccctaatttctctggctaggactttacatactatgagtatcattgacttgttcctgatcttaaagaaaaagctttcaattttgcaccat

SEQ ID NO: 883678 - DNA, 605 bp, Homo sapiens
actatacggttatacggtattacaaatcctagcaggaatgtcatctataaaattgtgtaggagcaccaagaagaaatcacatacagccccagtgacaagagataatcttaataactgcttcataagcaaaagctttcatatcattctkggaaggctgaattgagttttgtaaagcaacaagcttgagaactcttgactgatttatggatgaagaaggccaataggaatatagtttcaccaacattcagcagcaacctactgataaccagccaagacagaataagtgaaaatagcacagaggttaaaagacccaggagatgcaaaagtacatccccaggagaaaggaatagaggtgacctgacagatgatgcaagaaaggcacacggactcctcctgcttcacaatgttgcttcaaatcaattctggtgctaattaattagggtgactatacaatgtattgaccaaacctagtattgagagtaaagtggatgtctactaataattatccagggcaactgggataaatggtgatcttatatattcgactctggctttgggaatttggccaagttccctttgtgagcttccatttaaatgggaactat

SEQ ID NO: 883679 - DNA, 605 bp, Homo sapiens
actatacggttatacggtattacaaatcctagcaggaatgtcatctataaaattgtgtaggagcaccaagaagaaatcacatacagccccagtgacaagagataatcttaataactgcttcataagcaaaagctttcatatcattcttggaaggctgaattgagttttgtaaagcaacaagcttgagaactcttgactgatttatggatgragaaggccaataggaatatagtttcaccaacattcagcagcaacctactgataaccagccaagacagaataagtgaaaatagcacagaggttaaaagacccaggagatgcaaaagtacatccccaggagaaaggaatagaggtgacctgacagatgatgcaagaaaggcacacggactcctcctgcttcacaatgttgcttcaaatcaattctggtgctaattaattagggtgactatacaatgtattgaccaaacctagtattgagagtaaagtggatgtctactaataattatccagggcaactgggataaatggtgatcttatatattcgactctggctttgggaatttggccaagttccctttgtgagcttccatttaaatgggaactat

SEQ ID NO: 883680 - DNA, 645 bp, Homo sapiens
ttccaatagtagctgtaaaaaattagcacaaactgggcaacataaaacaatagaagtttcttctctcacagttctggaagtcagaagtcagaaatcagggtgttgatagggccatgctccttttggaggtttaaggggaaaattgttccttgcctcttgtcaacttccattggttgtcacaaggctgtatctttggggcyaccattcaatccacttcatacttcaacctatcctctagccacatccactccaaaacacacacacacacacacacacacacacacaatgccacttaaccaattttcactaatagcactgatgtcttcctaatttttcgttataaagctttggttttcatgaggttttctacagtattggacatcattaacaattgcagatgtccgcaaacatcaccttgctactttctctgctgtccattcttcatgccattcctattgggctcatttgttaataccatctactcccccatcctcttaaatggtgatgtacaccagagggctccctcttctctcctcattttttgctctctgaataaagctacactcacagtttcaactacatctctgtgttcattatgcccaatctatatccaaccctgacttcttgcctgatttttacactagc

SEQ ID NO: 883681 - DNA, 667 bp, Homo sapiens
ctacatttttatgtgagtctgacttgtcttctcagccagaccttagttgaattgaggagagagattttattatatctctttgtattcttgcatagtatctatcatcttggcaataattttacatcttttagcaataatataaaacattgacattattcctaatacaattatttaaattatcaagaacgtgtrtgtgtgtgtgtgtgtgtgtgtgtgtacataacagatctaactaggccagagagctagaatcacttctgaattaaccggactctgaaatcaaacatctcacccttattagcaggtgtttccaaatttagtgtctctctctgctactaatttggggaaaataccttccattacacaccttcattgcaccaaccaaaatgttatctaagatgtcatccttggacaaatatgtttttcatcaaaattttctacttgacatgtgtttcatttcatttcttttcattcctaaatatacaaaatatttaattttatagaaacatgagtacctcttatgcatatgaccttagactttttgtttgcttgtttaaaaataagtctatttgaaagggataattgacagaacattcgaataattttttggagctttatggcaatgagaagaaggaaaagttctctgggcttgaggaataagagtaac

SEQ ID NO: 883682 - DNA, 647 bp, Homo sapiens
cagaccacacatggcactattttcagtcaagaggaatgtaaacaaatggaaagatgcagtattaaatcataactgcatagaattgactataatactcactgtagtactacaataattttgtagccatttcctgttgctattgtggtgaactcaagtgttgggagtatcctcttaaaacgccacgtgacactaatcactaatcatctccatatgagcagtctgtctcttcagaaaattgcatattacagtaaaaagtgttctcttgcagttctcaagcatttttcatcatgtttagtgcaatgccataagcctcgaatagcaccatgggacccakacaaagtgccatgagtgatgctggaagggctcccaggaagcaaagccatgacattacaagaaaaagttgaattgcttgatatgtgtgcagctttgcttgattgaggtgtgcagctgtggttgcccaccatttcacagataaattaatccagcataaggagtgttataaaaaaagaaaaggaaattcttaaagccatcactgcagctaccacagcaggtgggaaaaccttgcatttcttttggaaaatagctttttatctcatattgaaaatgcagcttttatttgagtgcagaattgctataagaaaggcaca

SEQ ID NO: 883683 - DNA, 674 bp, Homo sapiens
cacgtgccatggtggtttgctgctctgttcattcttttacaaaacaaaaattttttaatatttactgtgtgccagatgatgtaagaagaaaactgcaaaagatagagtttccacttaaaaagtaggatctcacagcttataaaaagattcttgcatatacatttataatgactagaatatctacaacaaatatcatgtctctattttatgaataagttcacatgaggaatttattatgggcccgtccatrtttctatatttcataatttttttaaaaattacatcctccagcatttccacacacttctaaagcattccacattagaagttttatatttatttctttcatagcacacattttaaataagcttctaccagagacggaaacacatagttcagttagaacactaactctcgatcatactataaaatagattctttctatggaggtgttttatagactttccctgtccaatatttcagctaccacaagttgaacattcttaatgtgacaatccaaactctgaaatgctccaaaattcaaaaccttttgagcactgacatcacaatctcagtgggaaattacacacctgacctcatgtacacaaacttggtttcacgcacaaaattatttaaaatattatataaagttgccttcagcttacatgtataag

SEQ ID NO: 883684 - DNA, 644 bp, Homo sapiens
cgagataactttgccgcgaaatatctcacttttattattatttttgcaccgctctagtataccaactttggaaacaaaggacatcattctatcgatagcattctgtttttagtagtggcatttccatttacaaaatatagtcataatcgattgctgataatgtcaaatcctagaaaacgtagcattcctacatgggatgttaacttcgttctcaaacagttgttggccaaagattcatttgatgaatccaatttttccaaaatagacaattctgatgattcagatgattctgatattagttctgtttagaaataactccagtaacagtttttaaattttattttcacatggaaaatcagatttgtttcagccttaatgaacatgtttatgtaaaatcaaatgagcgctggcagcgagctgcacttttgctttttcgaaacgagaaaggcttaatgtgattggcttatggttttgtttctcgtatgctcagcccctcccagcaggcatgyggcggaggacggtcatcagcaataagatgtagcatgtgccttctgcccactaccgggtccccgagcccatctcacaggctcccacccaccagccaaaacttggctctcaactctcccactgcaaacctctccccg

SEQ ID NO: 883685 - DNA, 637 bp, Homo sapiens
aaagaaggtagaaggtcagagagagattctgttttctaaggcctgcatctgagacctaaagtgccccaatgttgtaacaaaagactgtaacaaaggtcgtgggagttatgagccaggaaccgtggatagaaacatagatatgtatatgtgtgtgtgtgtgtgtgtgtgtgtgtgtgtgtgtgtgtctatgtrtatctctctcacaaccccctctctagccattctgttgtttttgaagaaactgggttgttggccctgtgcagtttcccatgtttggaattttgccagttgtatccccatggtgtcatttaacatgttcttctatcctctgtattgcctgaaaactagtagctgaatctagaggcttgatcagatttaagttcatttggtttgggttttggcaagactacttcatgagtggtgtatctacttacttccatatatctctcctttcatgctattgagattgatcaatagattcaggtgttgttaactgaatatatttaattataaaattcccacatcagctttttacataatatattccacagccattgatgagcactgcctaagtccattatccatcagggagctggctttcctcataactctagtaaatgcctcctaagaatgcaac

SEQ ID NO: 883686 - DNA, 627 bp, Homo sapiens
cacatactaattactattttgtgcctgggttcatttgttcaacacacttttctaatttagccatcttgctgcatatatcagtagtttgcttctttatatttccgagtagtgttgtactttatggttaagctacagttctcagtttttggttattttgaataaagcagyagtgaactttcaggtacacatcctcacatgtatatattttatttctcttagataaaaacctagcagtgaaattcctgggtcatattgcaagtatgcattgaatttaacaagaaactatcaagcaattttcatgaattttcataaatggttgtaccattgttcacccccaccagtagtgtttactgtttttacttgttccttactaatagttggtatttttttactcatactaatgtgtgcatagtggaatctcaatgaagtttttatttataatttccagaagactactgatgttagacatcttttttatgcttattaatcacatatgtatcttcttttagaggtgtctattcaaatattttaattatcacactgcattccaaaaggtccattgttcattcctagtgttctatcaattttgtaagtttatgggaatataaaaagtgtaagactaaaggt

SEQ ID NO: 883687 - DNA, 613 bp, Homo sapiens
atacctttttttcttgctgagaactgcgaattcttctttgttgggtcctctttttgttgctgttgtagttgttgttcttttcttggaaaattattgcattttatctgagaagtagttaagtattggaatcaatttgattctttctagacttgcttttaaaattagctaggacaggtttagagcagcttttagtatatggctaatttaaccccactactaaggcaataccatttttcrgctctacccaatgctctatatgtgaggaagtctttctactcttgctgttgcaaacataactgttcccatccctttgagaacttaaggaactgtttgcttactgcttactatagtattcacatataaattgataatcaaaaaatactcaaggggaagcctctaaggacgtctggagatccttctctttgcggtttccttccctctgagattctgccccacaaattctaggcacactgacctccctgaaattcaatctctatctccttaatttagcaagagtgcctgactctgggtttcccttccctttttttagtctggacactgcctccaggcagtaagatagaggcaaacatgtgattgtccttatgtctttgtt

SEQ ID NO: 883688 - DNA, 613 bp, Homo sapiens
ctacctcttttttttctttttgtttattttctaccacattcttgtttttatcccccatttctacctgaagttcccactgctatcaactgttagaaaatatctgaagctaaaaaggacacaatcaggtatgcaatcaggtaaagattaaggttggctcagcccagaataaacaaaatttttcagaaatatggacactttatttatgtgaaagagtcaggagaaaaactggccacagtagtaaagcatgttatcaaaataattgggaaacatagggaaaagaatagcagaaagtagtatactgtgtgtttattaagttgggtygtaaacaagagtgatgggaaagccccttcccacactcttttcctgatgatctcatttccaataccttcataagccatttctttcatttgatatactgaaagcagtctttagatgcaagctttatgtgacatattaacatgttatagccattaacttattatggttgctattttggtttgtatttcttcatatctttatagacgaggacaaagaaatcatttgggagcctcacctgtatctcctgtggcagtcattaaacatttccacacatattctaggttcagatgaacat

SEQ ID NO: 883689 - DNA, 633 bp, Homo sapiens
actgcaaagactacaataaatacccaactcttcaatacccagtcacagatgaacatccagaagcataaagaccatccaggaaaacaggacctcgtcaaataaactacctaaaacaccagggaccaaccctggataaacagagatatgttacctttcagacagataattcaaaatacctgtgctgagaaaactcaaagaaatgcaagataacacagagaagaaattcaaaattctatcagataaacttaaccaaaaaaactgaaatgattaaaaagaatcaagcaaaattctgaagctgaaaaatacaattggcatactgaaaaatgtatcagagtcttttaatagaattgatcaaacagaagaaagaattacttagcttgatgacagmctatttgaaaatacacaaagaagataaaagtaaaaaagaattaaaaagaaaaaacaatgaatcgactcaaaagggtaaatctgagttattggccttaagcaggaggttgagaaagagataggggtagaaagttcattaaaagggactataacaaaaaattttccaaacctagatgttaatattcaagtataagaaggttataaaacaccaagcagatttaattcaaagaagcctaccatttaatg

SEQ ID NO: 883690 - DNA, 553 bp, Homo sapiens
tgtcaagttctctgagttcatttgaacattttaaatctggactgggtctggaagtcatgataaaaaccaaactggttccagaagagaggcctctagtaggtaagatatgaggagacagggaatcatgggttcatctggatccaaggagtctagaactccatcatctgaaactctagccaatctcatgtatgatgactagggacccaggccctgtgcttttctagggaaatgggtagaccttaccaaagacaacttaagagttacaatggccacagtgaagaatttttaacctagttaaaattgttcgcttgtgaggtgcattagaaaataaaggacccraaattcttcagaaacaatgggaggtatttttttattggcatatggaggctccaaaaagacaaaatgaatcaaaaattgcccctccaaaaaaatccttacaaaaggccaatgaaaagcttaagcaactaattgatgaaacagaaaaaataatatctcactactcttattttctttttatccttctctcctactctgaatctacaaattttttcac

SEQ ID NO: 883691 - DNA, 635 bp, Homo sapiens
gttacaagttggaatgcttttgtgagaaaagttaaaagaagggaatgagactcctcctatcagtttttttttttwaattttcttttgttttactgacctggcaaggctcaaatagagttgagtttttgttttgtttttgttttttccattggaaggtacaatacagaggttacaatcattgactttagctgacaacataacaagttaaacattttccttgcaagacaaccagtgaaacttcatgatcagaatcaaatcagtgtccttctcactgtaagtgggtgaagcttcatcaataattgcagagtttgaggcactcatgaactcaagatcagattctttactcagggacagaatgtaagccaatcataagaccttccacaggtggttaatttggactcctgaaaaatgtgacctgtaagttttcactggcaatatgcaggtgcacatatgacaaataataaccaggacctttatatcacccccaactggtggggaatgggatccttttgaccctttctctccataataccaggctactcatcttgtgtggcaataaaatatatggtctacttcacagagaaagagattcttttaaaaaaaaaaaggatttttattatgaaatgagcaaagca

SEQ ID NO: 883692 - DNA, 606 bp, Homo sapiens
tctggtgccctctattattaagtaacctgttttccagtttaagcctcaggaatcttcagttattgatggaaaaaacaaaaggcactgactgagttgtccaatcaataagatgcagcccaagaaaatcaaggcatttaaatgaaatttggttattgtaatcagtttcctcccattcttttattggagacagagtttcactcttgttgcccaggctggagtttagagtgcaatggtgccatctgagctgactgcaacctccacctggggtttaaatgattcttctgcctcagcctcccaagtagytgggattacaagcatgcaccaccatgcccagctaatttgtgtatgtttagtagagacagggtttcctcactatgttggtcaggctggtctcaaactcctgactttgggtgattcatgcaagtaggcctaccaaagtgctggggttacaggtgtgagccactgtgtcaggcttttttgtttgtttgttttttaaaggtctcctgtcactcaggctacagtgcagtggcacaatcatacctcactgcaacctcaatttccggggttcaagcgatccacccacctcagcctcctgagtagctatga

SEQ ID NO: 883693 - DNA, 606 bp, Homo sapiens
tctggtgccctctattattaagtaacctgttttccagtttaagcctcaggaatcttcagttattgatggaaaaaacaaaaggcactgactgagttgtccaatcaataagatgcagcccaagaaaatcaaggcatttaaatgaaatttggttattgtaatcagtttcctcccattcttttattggagacagagtttcactcttgttgcccaggctggagtttagagtgcaatggtgccatctgagctgactgcaacctccacctggggtttaaatgattcttctgcctcagcctcccaagtagctgkgattacaagcatgcaccaccatgcccagctaatttgtgtatgtttagtagagacagggtttcctcactatgttggtcaggctggtctcaaactcctgactttgggtgattcatgcaagtaggcctaccaaagtgctggggttacaggtgtgagccactgtgtcaggcttttttgtttgtttgttttttaaaggtctcctgtcactcaggctacagtgcagtggcacaatcatacctcactgcaacctcaatttccggggttcaagcgatccacccacctcagcctcctgagtagctatga

SEQ ID NO: 883694 - DNA, 530 bp, Homo sapiens
atacaccctccccagaataaaccaggaagaaggtgaatctctgaatagaccaataacaggctctgaaattgaggcaataattaatagcttaccaaccaaaaaaagtccaggaccagatggattcacagtcgaattctatcagaggtacaaggaggagctggtaccattccttctgaaactattccacttaatagaaaaagagggaatcctccctaactcattttatgaggccagcatcatcctgacaccaaagcctcgcagagacrcaacaaaaaaagagaatttgagaccaatatccctgattaacatcaatgcaaaaatcctcaataaaatactggcaaaccgaatccagcagcacatcaaaaagtttatcctccaatatcaagtcggcttcatccctgatccgcaaggctggttccacttacgcaaatcaataaacgtaatccatcacataaacagaaccaatgacaaaaaccacatgattatttcaatatgtgcagaaaaggcctttgataaaattcaacaccctt

SEQ ID NO: 883695 - DNA, 554 bp, Homo sapiens
ttgttcagtttccatgtagttgagcagttttgagtgagtttcttaatcctgagttctagtttgattgcactgtgttctgagagacagtttgttataatttctgttcctttacatttgctgaggagtgctttactcccaactatgtggtcaattttggaataggtgtggcgtggtgctgaaaagaatgtgcattctgttgatttggggtggagagttctgtagatgtctattaggtctgcttggtgctgaactgagttcaattcctggatatccttgttaactttctgtctcattgatctgtctaatgttgacagtggggtgttaaagtctcccattattattgtgtgggagtctaagtstctttgtaggtcactaagtacttgctttatgaatctgggtggggcaacccgctcgggtccccttccacagtgtggaggctttgttctttcgctctttgcaataaatcttgctactgctcaaaaaaaaaaaaaaagtatgaatctgggtgctcctgtattgggtacatatatatttaggatagttagctcttcttg

SEQ ID NO: 883696 - DNA, 598 bp, Homo sapiens
tttctgatggtggagaagaccatacatgtgtgtgtgtggcatcagaactattgactcctcctattgatgtttaagatattccattacacaaacctgggttcatactttttgttgatagatcttatgccaaaaatgtaggcaaaaaatgccaagcaggaaatgctatcacttctgaagatgaattcatacagatggaaattctttcagaatttatttttccagcttttttctttgtttgttcgtttgtgtttgtttgttttgagacagtctcgctctgtcaccaagttggagtgcagtggtgaaatcttggctgactgcaacctcctcctcctgagttcaagcgactctcctgcctcagtctctcgagtagctagtactatgggtgggcgccaccatgctcagctaatttttgtatttttagcaragacagggtttcaccatgttggctaggatggtctcaattttttggcatcgtgatctacctgccttggcctcctgaagtgctgggattagaggtgtgagccaccaccatgcccggccttttttttttttttccttttgagatggagtctcactctattgcccaggctgggaatgg

SEQ ID NO: 883697 - DNA, 646 bp, Homo sapiens
acatggctgcatccaactccaagacaagctggcaaatatagactaattatgtgccaaggagaaacagggaaaacgtttgttgaacatctagtcaatctgccccagtcattctttttttttttttgcttgctgatgagactaagatagactttttgtgctctgacttgaccctagaggtttgagagtcaggacactgcaagagtggggcaacattaattagaaggtgatgccctggagttgcaaggtgattattaatcagggcaacgtgatggtcaagcagttgtaatgacaaactaaatttttctctcctgttttatgaacctatcttatcagtttcctcagccaacagaagktgctgcaagctgagtgccaacagagcagacctctaggctgctcttcccctcactaagtgataccacattgtcacccacagcccccacttgccagccaagcttagtggatcatttgagcgatattatggtggaagagtgctttctttttgctttaaaaggcaactgtccagaataagcagcattatctgcaaaggtgtggggattccattgtggaaaataggcagtggtactggcggagttatgacagaaatggtcattttaacagatatcgtgatgtgccacagggctcccat

SEQ ID NO: 883698 - DNA, 616 bp, Homo sapiens
cagaagacttgaatagacatttttcaaaagaatacataaaaatggccagcaggtatatgataaaatgctcaacatcgctaatcatcagggaaatacaaatcaaatgcacagtgaaatgtcacctcaccctagttagaatggctgttatcaaaaagacagaaaataacaaatgctggtcaggatgcagagaaaggggaactctaatacactgttggtgggagtgtaaattagtgcagtcattatgaaaacagcatgaaaattcctcagaaaactaaaaatagaactaacatatgatctagcaatctcactactaggtacatattcaaaggaactgaaattagtatatcaaagagakatctgcaccctcatgtttattgcagcaccattcaaaacaaccaaaatatggaatccacctaaatgtccataaactgatgatatacacaatgaaatactactcagctgtgaaaagaatgaaatcctatcatctgcagcaacatggatgaacctggaggacgtaatgttaagtgaaataagccaggcatagaaagacaaataccacataacctcactcatatgtaggtctaaaaaagttgatctcatggaattagagactaga

SEQ ID NO: 883699 - DNA, 629 bp, Homo sapiens
acacaaggtcaacaagaaatctcccagcaagaatccccctgcagggtctcgtgcctgaagatgaaagactcagaaagagcacagctggggtcttccagcccaggtgctgtttccagcagctgcacacagaagcaccagtttccagactcataaactgagaacattgacctggcccctgtgaagagtcactacctatgaagcctccctccctatgcagccttaagggggagagtattaaaaaaaaatacacacacacacacacgcacgcacacacacacacacacgcacacacacaygcacgcacacacacacacacacacaaactgtacctcagtgaagctgaaatctagaagtacaggttgagtgtccctgatctgtaaatctgaaatctaaaatgttccaaaatccaaaactttttgagcatcaacatgattctcaaagggaacactcactggagcatttagaatttcatattttgagattagagatgctgatccagtataatgcaaatattctaaaatctgaaaaaaaattcaaaatatttctggtccccaacattttttggataagtgatactcaacctgtaatgaatactgtagcctacaatgtgggtggttgtgctataactt

SEQ ID NO: 883700 - DNA, 591 bp, Homo sapiens
catctctctggacatttggtggctgctctctaggtctgcttcccagctccctgcttcttggatcttcctgaactcttatcctcaggggtcccttacatttgcctctgtgttggattccctgattttctagatcccatttctctctctttatcgatttactctcagatcttccagtagctttccaagagggtgcatgagtcagagatacattttagataactcttatatccttaaaaaggawccttattttattcttataaatccttattttattctccctaatcaactgcccatagaaatagttttctctctgaaccttagggtcatctctccactgtcttctagtttccatgtattgttgagaaagtgtaattgtttgaatcccaatcttttatttttgattgttggttgtttttttttttttgtctttggaaaacatttagcatattctcagtttcccagcattctgaaatttcaaaatgttgtgcctatgaattctttttcattaataacaccggacacatagtgggtgctttcattctaaaaactcaggtctttcagttctgcgaaattgtctaattacttctgtag

SEQ ID NO: 883701 - DNA, 604 bp, Homo sapiens
aactgggccagatgaccaatttcagctccatcattaccacttcctaaaagccactgcatatgagcagtctgtggagtgaaaggacctaactgccatgaccatccagcttatgttctggtgtgggagcctgagcacacataaagaaatatgtgcagaaatatccctgagcataagtgccacactctgagaaacattcacaaacaagcacactgtaaaaggaacacagatatgaaaacagccagtgagtagctgtctctactgtataatagatcacatgaaagggagggagagacatgcctggaagtataaggatctcttcgcaggccatggtactattttatgcatatttcttttatcaccaaccacattgtaaggtcccagaaggcaggagctaaaacttacacaygacgcagcttcctagacaccgattactaagacctgtctataatagccactcaatacctgttccctgctgtagaagagaaccccatttctaaatagaccacaggctgaggggaccctggacacagttctaagtgggagaagaacctgatttttggagaagactggggagagtagttctatggggatcgtggcaagtaca

SEQ ID NO: 883702 - DNA, 563 bp, Homo sapiens
ttgaaatcccaagtagtttacgcagcctgtctgtctttcagggctcttgcaagctcttctctttattgagaaagggaaaaaagacatcagttgggatggcagctccttgattcctttatcaggtcagctttttcctgaagggtctccttgcccctcaaggcatctcctcatctgaaactcacttcacactgtgatggctggatgcagggatgctcttgttctgttgccttggtaacaacttctgtttgttgataacraagtttactgtgtatttgtcattgttttccctctgcctcatggtaaaagaggggtgaataaactctgtggattaggcaaaatgaagggagccatctggtgagtgaaggaagaggaaagaggaagaacagaaaacctctagaaaggcccctgttgggtctttgggggctacggagtagttatgcatttcacaaaagctattaaaaccaggaattactttatctggaagaacttaaaggcaggtaaataaagaccttgacatgacagaccaattcctacgagaatcataagaacaggggactccagag

SEQ ID NO: 883703 - DNA, 657 bp, Homo sapiens
gcctggtcagctgctcaaatgaccaaattttacctggtttcattaacatgtaatccttaaaatgcatgttcacccaactaatgtaatagcttggtctctgcagatggaattcttcccaaatgtgtaagtggctcttagtagtttaaaaagttttaaaggcacagtaagtactttatacatagtctgttgaccgttaatagttttacaaaatggaagtcagcagagaggaccattcaagtgcagatggcacaattactgactgccaacctgactctcccttctgcaggattgctgcccctttgccaaccccactgtggtttgaggaagctgacatatattattgattctttggtgcagtattaggaaagggagatattccaagccacatctttacatccagaacaatgcatgaggttgagatactgcctgattattaaaaaaaaattgaagctcgccttatatttgctcctcaaattgataattrggttctgattttatttttacctcttcacttagtttcttgtaatattcacccacctaccccaatggcttcttcttttcctaaatgcaatttcatgatgaaaatttgaaaataatgtgagagcagttgtttgtcagggaaggcagttgcctctgcctctttcttcttagagatat

SEQ ID NO: 883704 - DNA, 676 bp, Homo sapiens
ctgttatataagcttacttgagggagttccctatgggtaatgtagtgagaataaagaacttggggttcaaatcgtgactctactgcttaggagctatgtggcttctaggtgtctgtttccctgtttctgtaataggtgggcagaggggtaaggaaggagataacatctattttttaaaatggtatgaggactgtaggaaacatatggacctggtacagatgaaatgtccccaaaatggtagttattactgttattactctcacaggaaattcctatcccttagcagaagaaagcattctgtattagtttcctgtggcttctgtaacaaattataataaaccaggtggcttaaaacaacagttagctcttgcaaagttttgggggccagaagtctgaaatcaacctgttggcaggattgtgcctcctctggaggccctgaggggaaatctattattttcctcttccaccttctggtggctgctgacttgcttgacttatgcccacatcactgcaatctctgcatccaggggcacatyacctcctcctcttctgtctgtgctcttcctcttataaggacaccactcacttaggacctgctcatttaactcagaatgacgtcctcatctcgacatctttaacttaattacctcggcaaagactctttttccaaataaac

SEQ ID NO: 883705 - DNA, 591 bp, Homo sapiens
atattgcatactagagaagtatgtggggtcaagggagaacgtaccacttttttttgtctattaggagattatagaacttctttgatactaataagactgtttcagtagagagggagagattgtgtggaaaagaggggagaggttgcctttaaaagtcaacggagaatgagatccaaagtagaaccaaaaagacacaggagccaagatggccgaataggaacagctccagtctacagctcccagcgtgagcgacgcagaagacgggtgatttctgcatttccatctgaggtactgggttcatctcactagggagtgccagacagtgggcgcaggtcagtgggtgcgtgcaccgtgcgcgagccgaagcagggtgaggcattgcctcactcrggaaccgcaaagggtcagggagttccctttcctagtcaaagaaaggggtgacggacggcacctggaaaatcgggtcactcccacccgaatactgcgcttttccgacgggcttaaaaaacggtgcaccatgagattatatcctgcacctggctgggagggtcctacgcccatggaatctcgctgattgctagcacagcagtc

SEQ ID NO: 883706 - DNA, 649 bp, Homo sapiens
gtgcatttaccatcctttagctagacacagtgctgattggtgcatttttacagagtgctgattggtgcatttacaatcctttagctagacacagagcgcagattggtgcatttttacagagtgctgattggtgcatttacaatcctctagctagacaaaaaagttctccaagtccccacttgacccaggaagtccagctggctttacctctcaatttgtcctctaaacaggataccccaactgctgttgggaattgggcaatgacaactctagctacttcctcctggataggggtgaagaaggggccctgcagttgtagtgtcctccagaggggaactgtttaggccagtgaacaggccagtgggtcagttcaggagtcctyggtagaagttgtgagttgaggtcatttggggttccatttgtaagaccatctgtagctcgatggcctcgatcctagaggaaacaaatttgacaagagggttaaaaatatagggcccaaaggtgagtaatagcaagatggctgtcataggacctagaaaggggagaagccatgttgcccaactccagaggtttgtataagagtttgaaaggcattgtctgatttcagaagtcctttcctgtaaatgccaggcagcatctcatactatcc

SEQ ID NO: 883707 - DNA, 636 bp, Homo sapiens
ttcctttctgctggtctttccctgcctctgccagctgcttatgctgctgttctcccctctctttcccctttttgatggctttgacagtgtaacactgctacctccttaggtttttgcactgcatgcaataactccatgatttccttatggtatttaatggtggctcccccagaggttagaaactcccttttttaccatattgcagcatgggcctgtaggattagataagcayacttgctatctgtatacacatttattctttttccctttcccagttctaaggctcgggtaagtgacactagttctgctaactgagcgctagtgcctgggggaagaggcttactttcaagtacggttacatcactaactatggtataacctgcctttcatatcccattttccacagatgaacttccattggtatataggtcaggattagctaagggggcttctaagagatcatcttgggaggcataagtctggagtataatttgttggcagtcatgctcaataggttccccattctctgggagaaaagtggcaggattgagggctacacacatacatattcgaagcaccagtccctcaaggagtagtgcctggtatctaagcaggcggttgtctgatagccataaa

SEQ ID NO: 883708 - DNA, 748 bp, Homo sapiens
atttctcgataaatctgccagttaaaatatgtgctttgtaggtgaaatgtgagagccagtaccaggggaaaccagcataatagggtaaaaccacagctggcactcccctgacattcttctctgtccttggggtttttcttcagtcaggtttattccgcagaggcggcttataaagtcactctttatatgtgcctccattgcccatgcaggctgccctggtccctcctgtcagtttattataaacctagtcgattactgtggtaattggttctatatatattgatgtgtttggggggcattttcagctttttgtatttttatttggtctgttttacytcttcccttagagagcagggactctgtctctacttgtttacaactccctctgggtattgtgtgatagattctgctcacagtgggttcatattcaacactgaccatggtaaggtggatgaggagaatcaggaaattccagctcccaacctttactggtctttgaattcttttacacggtagagtagaaaaaagaagtgtgattccttcaaaattcccacaccactctttcttcgggggtaattaatatgttgggatctgtattgagcacgtgtcctgcattctttaggctggtagagatcattaatgatctacagttaaacataaaggcagaatgaaactgaagaaaatctcttttgtaattcaataagttattctttcttaaaatgcttatacttatttattagtcatttag

SEQ ID NO: 883709 - DNA, 583 bp, Homo sapiens
tccatccctcggcctagtggccatggccctcacatcactggtctcttccttttgtcccctttgtttcctcccatgtccagctgtctgtaccatttgcgaatggtactgcaacccagtcagagccacatgaatctccctcaccaaccagtttgggttgcagctctgggtgaaaccacatctcgtaatgaaagcttcattaaggctgggagaggcagctgcagagaccagagtattttaaaacagagggcacaggtcaccgagaggtgaaaagagcctgatccactcagcacattttaaaactcaagagatgaggactaagcggtgagagaaccgtgcagaatcccaaatcgccaccaagagccatgtctatttgggcctgtggctccagcaggcagggaagcagcataaatttcagtgaggcaaagctaaatggtaacrgactttaagttctgtcagatatagttaatttgcagaataaattggtcagggcagcaagaggatttaacatccaaatccattttaaaaacagaagccagatgagtgtccagaggaaaatggagactcttacaacattcccttgccg

SEQ ID NO: 883710 - DNA, 648 bp, Homo sapiens
taagaaatgtgtttgtcttcccatggtctttcataagcaatacctaagaataatagtagctaccacctttcaagtattaccaagtctgggggtggtttgggcagaacatccacagacctctgttttctgaacctaattggatctttaaattatctcatggagtggtgaatcacctccctaatttcaggaagtaagagtaggaataccagctgaatcgctgacaattctagacacatagaggtggaagcccacctcaasgtcataatatccaatctgccacccattgtagaaatccctcctacagccatttcatcagatggctgcccaaccactgtttgaacactcttggtaatgtgggctacattatttgaagaggcaactcattccatcattgtaatgcagattcttagacagttctttaggctgagcaaaaatatgttttcctgtaacttgcatttgtttggtcagctccgtcctttggagcaataaagaatatgctgatttcctacttctacgctcaggactgctgccatatatagtacctttgtgtgcattagaaaaatatactcatctactgtaaagtgtgggatagacgtctgtgagcaaataggaccactatatacaggctggctacatgttaatgtctca

SEQ ID NO: 883711 - DNA, 595 bp, Homo sapiens
caaagtagacatatggtactcaggggttattatcaactcaaatgcctttaggaggccaacagataacacagatatttgaagcagagaagaggtcagacaatacagaatggcgcagactgtgatgaaagagaaggggcatgttctgcctgaatgcacacaaattcaaattcttttaaaactctgtgctgaccaaaaataaagaaatctgcagtctgtatttagccaaagggttasaagtgctgaccttatcaatacagaatattataatacataatataataatagttgaattggattttcagttgtagttccctgacttcactgcttctcccataactttgcagtccctcagaaataaaaaaggagtatttcagtttcttgcagccagtctctcagtttgctggtgtcttatttcaattctgtgagaccttatcttcttggtttatgcagatttccttcttctccctttcttttggtcttttctcttaaagtttttgcctcgtcttttccttatacaggaagtgacaatgccaagctgtcactgatgaacaagtataaagataatattatagccactagccctgtggactccaac

SEQ ID NO: 883712 - DNA, 681 bp, Homo sapiens
gggagtatattactgaggacaaggtagtgctgaaaagctaaatattttgcattaaaagcatccagccaaatccaagtgcagcacctgtgggtgaccatatagtaggtacccttgtgtcttaggtgtcttccaaagagcatccctgacacagggaggtgatgacacagctactcccactatgagagcaacccccctctaagcttacagggaatgttcacttcctccttcaggctggaagccctggctcagtccattccccccaacactgctatttggtaccattgttgacaaagggctttagacacttaaaaaactcatagtaccaccaaggccaaagagcagcacttccttcctgtagcccagtggaatctttgcaaatgcattttcattctggcccatcacttccactctcctgccagccagaggcccatttgggaggccagtacacctcggctgtgtcttgctacagtgctctcttccagcctttttggaggaagtgtctttaatgcaaatgtgtgtgatcagtgtctagagagaagaagmaagacgtcaaaaaaggtcacttgtttttaaaagaagtctgctgtggtaggaaattcatggattacttgcgaatgttaatagtttcaaggctgagtgctacaaattggtgtcagtggttacactcagttcccagagaac

SEQ ID NO: 883713 - DNA, 647 bp, Homo sapiens
caaatgctttttctgcatatattgagatgattatatggcttttgtccttcattctgctaatgtgtgtatcacatttatagattttcttatgttgaaccatccttgcatcccaggggtaaattacacatgatcatggtgaataatccttttaatgtgatgttgttgctttgtagttactgtgagacttagataaaacatataatagttataacaggctattttaagctgataaaatttaacttcaaggataaaaaaactccacacttttactctccctccacattttataggtttttaatatttttcagactttatgyttttgatgttataatttacatcttttatattgtgtatctgttaacttattgtggttataattatttttaatagttttgtcttttaaccttcattctaaagatataagtgatttatacagcacaattataatattggaaaattctgaatttgactgtatttttatttttacctgtgacttttatactttcgtagattttcatgtaattaattaacatccctttctttcagcttgaagaattccctttaacatttcttgtaaggcaggtctcgtgttgatgaactacctcagcttttatttgtttgggaaagtctttatctcttctttattt

SEQ ID NO: 883714 - DNA, 567 bp, Homo sapiens
atttttatgatgtatatacaattttaacaataaagttgaatgggtaaaagactagacagttctacattatttgccatacctttcactttgtatagactttcaacatttgagtgaaagtgggcagatacatattttttactaaaaggaaaccactcactattcaggtcacacaaaagcataatcacatacacacacacacaccccccmcacacacaccccattgttaagctaggtcaacagtaaatgaatgaatgaatgaatgaatgaatgaatgaacaaatggacaagcaaacagcagaattgaatgtccttcatcgccaggcaccagagaggatggcaagcccctggacttagggttgggtgcaccttcagagctgggtctggagagaacagggcggggctgtgaccttgccccttaagtgctcatcctggctacgttgaagtctggacatatcacaaagtccacacaactttggggaagttgtgggaagaactgggaatccctgaggacagtgatcacagtgattgaaactcttacaggcaagcctgggtggtgcagggcacaga

SEQ ID NO: 883715 - DNA, 567 bp, Homo sapiens
atttttatgatgtatatacaattttaacaataaagttgaatgggtaaaagactagacagttctacattatttgccatacctttcactttgtatagactttcaacatttgagtgaaagtgggcagatacatattttttactaaaaggaaaccactcactattcaggtcacacaaaagcataatcacatacacacacacacaccccccacmcacacaccccattgttaagctaggtcaacagtaaatgaatgaatgaatgaatgaatgaatgaatgaacaaatggacaagcaaacagcagaattgaatgtccttcatcgccaggcaccagagaggatggcaagcccctggacttagggttgggtgcaccttcagagctgggtctggagagaacagggcggggctgtgaccttgccccttaagtgctcatcctggctacgttgaagtctggacatatcacaaagtccacacaactttggggaagttgtgggaagaactgggaatccctgaggacagtgatcacagtgattgaaactcttacaggcaagcctgggtggtgcagggcacaga

SEQ ID NO: 883716 - DNA, 618 bp, Homo sapiens
ctagaagcaacaaaaatgagttgcaccactatcctcccaaacagagcaccagcttcctttaaaaatcacctctaaagctgtttgtgattgagcacttcaggatgtcaatcaactgtaagctgctgctattttacacctctacaatctctaactggtgatraagcatcatgaaattcaaacaatcacttttagccaaataccatcgttgtatattaatcacacacacacacacacacacacacacacacacacacacacagagagagagagggagaaagagagagagagttacagagttcaggttgctgaattataaaatgatctcttcttttctcctctgccatgcccatgatagccattccctgcacacctttgctaagccctcagaatggaacaatgacctgtgttcaacctcttggaagttccagttataaatccacatgtcaattcatctgtgacgagggatattctttgtctggaccagaaagattggattgtactcgatcgggacgctggacagactccccaccaatgtgtgaaggtaggctgtgggtctgtcctttcttatggctttaaagatgacatcagagaatggagaatcatcagggatttatataa

SEQ ID NO: 883717 - DNA, 528 bp, Homo sapiens
tagtcagagaacagtaccatttcccaataaggcagggttgggcaggcagttggcccatgtatatttggctttctgctgaatttcttatatttctgtaccatttcttgcttctttttaaaatagcaacaacaatgactcctctgatttcttctcttggccaggagaatcatctcctcaaggatgmtttttaataattttcctcatctggttttctatctctgacactgatagtttttcttaacttccttaaatagctcttgcaggagcctcccttgttatgaagggagtgaaaagcagttattccagattagccttaactctgttaacgcttcttttaattgggaggtctctgaatggaaacattttctcacaacaggcatagcatcacttcctactccaggggtgcaatgtccagccctcaccactcctgggcagggaaccatgtactgtaggcatcatccgggaacctttggttttaataccacttgttactttggctgcaacgctggattcacactcataggagac

SEQ ID NO: 883718 - DNA, 675 bp, Homo sapiens
aagccactcggtctgtgatactttgttatggcaaccctcgtaaactaacacaaagtgccactttcatcatgccacctccctgctaagactcgaataactctattgcttattgtataatttctcagaaactctgcctgtgcttcagggtcttttgtagagtgaaaaaatgacatagaaaggggattctagggccagctcagcccatgttaacccagatgacctgggaacttttttattcttcttgagacagttattcttttgtagagattggttgtgggagtctaccttagtttgtgttgtcagttaaacaaattacttacctttccaaatctgttttttttaatctcaaaagtagtgataataatccctatcttgttataaagattaaatgagatggtatatataaatcacttaaagtatctygtacttgggaaatgtttaacaagtgtggattttcaaaattaagtgttcatattagcaactgctaagatatattccagtttcacattctagattctataaatgtaatctacttccttttgattgtttcttaagacaagagcacatttatgatctagacagttttctccagtacatcatgcaaatcccccagtttgcttattcatccttcagtcaatagtaattgaattatcactccgggcccaacaggaatac

SEQ ID NO: 883719 - DNA, 610 bp, Homo sapiens
cacttccataatccgaattttcagtttagtgtttggctccctatcaaggctgaactgcttgtgaatgagcaatgcctggcatatagtaggcactcatgtatttgttgaatgaatgaatgatgtttgccatttgcatgcctccccttcccacacactcttgtattccacgttggtttttgcttggctttgtttttttyctattacttcttggaaaatggttaaaaaaaagagcattggccttatgagaaaaatctggccctatgagatgatgtagggctatgttttgtaacacataatttgaagcattaattgaatactttccttaaaattacatatttttcttgataattttctaccaactgctattctaaatatggagttttacttctgatttgcaatcctgagcactggtgatatggtagaaacatggttaaggaaaagaagcagtcacctcctggttgaaaatgtgataatgttaccctatgacatgttctcttcttctttggcccatttcaccttatcatccttcccactcaatctttttgttctctaatttgtattccatggtcctgttgagagttataagcactgagttagaaatgagaatgac

SEQ ID NO: 883720 - DNA, 588 bp, Homo sapiens
gtgtttaaattccagttctgttccttgccatctgttttattctgggaaaataacacttaactcttcygttcctcagtttaatcatctgtaaaatggaaataatattttctaagggaatcattatgattaagcaagttaattttatttatgtatatataatacatgcatatgataatatataatataatgtatattacatatgaatacatttaattataatttgatatattttatggttcagtatatactgacatattatttagtttatatattaagcatataattcaataagtgattgaaagtgattaaaagtatgttaatactataaagtaattaaaataagtgattaaatatatcgatactatacacatatagatgtgcacatgtatacatacagggcttagaacagtttctggtacgtattaggcactatataaatgttacttgtcattgttgctgttattacaccttaagaaaagagcaggatttcatcagtaaagtagttatgagcattctgggcagaacagattgctgaaggccagagtcttgaaagaagaaagcaagctggggcatagcaagataaagggc

SEQ ID NO: 883721 - DNA, 624 bp, Homo sapiens
ttttaaaaatattttatttttatttttatttatttattttttgagacagggtctcgctctgttgcccaggctggagtgcagtggcacaatcttgcttcactgcaacttctgcctcccaagttcaagccattcccgtgtctcagcctcccaagtagctgagattacaggcacgtgccatcatgcctggcyaatttttgtatttttagtagagacggggtttcaccatgttggccaggctggtctcaaactcctaacctcaagttatcctcctgcctcagcctcccaaagtgctgggattgcaggcgtgagccaccacacccagcctgttttattttttatgttaggttcaggaggtacatgtacaggtttgttatatgggtatgttgcatgatactaaggtttgggcttctaatggtcctgtcatccaagtagtgaacatggtatccaataggtagtttttcaactcttgctcctctccttctctccttacttttggagtctccagtgtctatttttctcatcattatgttcctgtgtacccaatgtttagcttgcacttataagtacaataccttattttcatttggccttcttcacccaaaagcttccaattcctctcatttt

SEQ ID NO: 883722 - DNA, 543 bp, Homo sapiens
ctttttgacgtgggcatttagtgctataaatttctctcttaacactgctttagctgtgtcccagatattctggtatgttgtttctttgttctcattagtttcaaccaacttcttgatttctgccttaattgcattatttacccaaaaatcattcaggagcagtttgtttaatttccatgtaatygtagggttttgagtgaattcttagtcttgatttccaatatgattcgctgtggtctgaaagattgtttgttattatatcaatttctctgaatttgctgagaagtgctctacttctgaatatgtgatcaatctcagaatatgcgtcatgtgatgatgagaagaatgtatattctgctgtttttggatggtcagttctatagatatctgtcaattttatatgatccagtgctgagttcaggtcccgaatatctttgttaactttttttccaattatctgattaatattgtcagtggggtgttaaagcctcccactattagtgtgtgggagtctaagtctattggaaggtctctaagaacttg

SEQ ID NO: 883723 - DNA, 607 bp, Homo sapiens
ttcactgctgtattcttgttgaatgagtgaatcatggctataagttacatgaacaaaagagaaagattgtcaatgacagaaaaatagctagtgtataaatatgtataaacagttacatttagtttatttttatgtatttattaattacatatatatattaatagcttttgggatgcaagtggtttttggttatgtagataaattgtattgtaaaatctgagattttagtgcacccatcacccaagtagtgtacattgtatctaatatgtaagttttttccctcagacatttcctaccctcctcccttctgagtctccaaagtcccttataccattctgtatatctttkcatacccatagcttagctcccacttataagtgagagcatatggtatttggttttccattcctgagttacttcacttagaataatggcctccagttccatccaagttgctgcaaaagacattatctcattcttttttatggctgtgtagtattccatggtgtatgtatgtgacatttcatttatccactcattggttgatgggcacttaggttggttccatatctttgcaattgtgaattttactgcgataaacatatgc

SEQ ID NO: 883724 - DNA, 670 bp, Homo sapiens
accaagaaaattgcagattgttagggcttctttctggcaaaaaaactaataaaatttaaaatacgaagaccttcatagtagtattattctgtatcttattttatgaaagaaagcaggaaagcaagcaaacgatctcaggttagctcttaggaattgctsacagagacttttgctgcagcctgccaggaagatctcctcttggaattattgttactttttgatgaggatgtctaaaaattcaatctccaggttcagccagaatccaataaataaattaaatgaattaaatatttactgagcatgcaaaatcctgagggtaaaaataaaagcagacacacttcctgttctcagggaactcacagtttagtggtagaaatgctttcaaagcttgttttatctcaagaagatacttgcagaagggaattatgcaaacatataacagaattgtgtactgtgttcagagccctgcagtttcagagcacttactatatcaatgacatgaaaactctgattcttgaatgttaacttttgcgaatgtcattgatccatgaaaatacacacacatccctgagtttaggccacagccttgctagagggtttgcaagaaccgcagttccaaacagttaataaaagtctaaactcatgttatggaataaattatgtgctattg

SEQ ID NO: 883725 - DNA, 670 bp, Homo sapiens
accaagaaaattgcagattgttagggcttctttctggcaaaaaaactaataaaatttaaaatacgaagaccttcatagtagtattattctgtatcttattttatgaaagaaagcaggaaagcaagcaaacgatctcaggttagctcttaggaattgctgacagagacttttgctgcagcctgccaggaagatctcctcttggaattattgttactttttgatgaggatgtctaaaaattcaatctccaggttcagccagaatccaataaataaattaaatgaattaaatatttactgagcatgcaaaatcctgagggtaaaaataaaagcagacacacttcctgttctcagggaactcacagtttagtggtagaaatsctttcaaagcttgttttatctcaagaagatacttgcagaagggaattatgcaaacatataacagaattgtgtactgtgttcagagccctgcagtttcagagcacttactatatcaatgacatgaaaactctgattcttgaatgttaacttttgcgaatgtcattgatccatgaaaatacacacacatccctgagtttaggccacagccttgctagagggtttgcaagaaccgcagttccaaacagttaataaaagtctaaactcatgttatggaataaattatgtgctattg

SEQ ID NO: 883726 - DNA, 628 bp, Homo sapiens
attttgaactgtcaaaatgttgaaaccatgatctggaacacaatagatcagagtcaggctgatgagccttataagagtataagagaataaaaagtcaggaggggaaagagaaacatcatgaatacttcaggcttaggctgggagggtagaggagagacaaatcaattataaagtggagtgtttctggagtattaaaaacctcctcatcctgacttgccggtttatatctgctaagaaattctcttttagagctgtgatttaaataattaatgtgattctgatactttgattgggagttattgaaaatagaattctgaagcacagggacgaaaacaatcttagcctgaatgggaaacgtcaaggtagctctatagtagctgtagtctttttgcaggggaagatgggattgggtggggtggggacagagrgtgagagggagaactatagcaagtaatgttattataagttctgtatcttaaagaattgttgtagtcattagtcatctgaataggatttcagttttagaattaaacctttgtatgaatggcattgtatcctgcacatttcgattttcatcaggctctgatttcattactcattttctttgaagaagatagtacagtagcca

SEQ ID NO: 883727 - DNA, 662 bp, Homo sapiens
tcacgcaggaacagaagatagcaaaaaaaaaaaataaaaataaaaataaaaaaattaaataaaactaactttgacctctgctatgattccatctccaacctgaccagtcagcactctccgcttaccgagcccttagcctccaaattatccttaaaaactctggtcccagaatgcttggggagacttatttgcataataataaaattctggtctcccacacagctggctctgtgtgaattactctttcttcattgcaattcccctgtcttgataaatctgctatctaggcagtgggcaaggtgaaccctttgggcagttacaaatttggggactcattggggattgttattgtggctacctgtccatggtttcacagccccccttcggtggcagatccagatgccagcccaagtggccgcctagttctcttggattagggtctggctctggcactgtctctaccagtggggtgctgctgacccaatgtgtatgtatttaattgcaatrgagaaatagtcctggggagacatcccataaatctagccccatggcagggtatctatctgtaggtccatcacagggtgtctgtaactgtagcccaaaggcaacaggtccagatggttgttagaaacaattcctatgttatttcataaaggtaggag

SEQ ID NO: 883728 - DNA, 709 bp, Homo sapiens
cttaacatacctaactatataaaataaaaagattgaatcaacaaccaaaaacctttcatcagagagaaacctgggaccagatgacttcactggtgaatttaatttatttataccaaaaattaaattattactaataccaatcatttcaatcacttccaaaaaataaaagggtaagaaacattttctaacttattttttgaagccaaaattacccttataccaaggtcagacagacaccataagaaaaccataagcaaacgtgccttatgaatataggtgccaaattcttaacaaactactttcaaacagaatccmccagcatagtgaaaggcttatacaccatgaccaagtgagacttatctcagtaatgtaagggtagttcaacatgagaaaagcaatcaatgcaatataccacattaatagaaggaagaaaaaatgtcttaattaattgatgcaataaaagcatcttacaaaattcaataccctttcatggtagggacactcaacacactaagaatagaaggggacttcttcaacatgataaacagcaattatgaaaaacccatagctaaaataatatttaatggtgaaagcctgaaagttttcctttgaaaattaagaataagatgtggatacccacttttatcactgctattcaacactgtagtggaggttttagctagagcaattaggcaataaaagaaataaa

SEQ ID NO: 883729 - DNA, 709 bp, Homo sapiens
cttaacatacctaactatataaaataaaaagattgaatcaacaaccaaaaacctttcatcagagagaaacctgggaccagatgacttcactggtgaatttaatttatttataccaaaaattaaattattactaataccaatcatttcaatcacttccaaaaaataaaagggtaagaaacattttctaacttattttttgaagccaaaattacccttataccaaggtcagacagacaccataagaaaaccataagcaaacgtgccttatgaatataggtgccaaattcttaacaaactactttcaaacagaatcccccagcatagtgaaaggcttatacaccatgaccaagtgagacttatctcagtaatgtaagggtagttcaacatgagaaaagcaatcaatgcaatataccacattaatagaaggaagaaaaaatgtcttaattaattgatgcaataaaagcatcttacaaaattcaataccctttcatgrtagggacactcaacacactaagaatagaaggggacttcttcaacatgataaacagcaattatgaaaaacccatagctaaaataatatttaatggtgaaagcctgaaagttttcctttgaaaattaagaataagatgtggatacccacttttatcactgctattcaacactgtagtggaggttttagctagagcaattaggcaataaaagaaataaa

SEQ ID NO: 883730 - DNA, 643 bp, Homo sapiens
tacatgtgcaggatgagcaggtttgttacaataggtagggaatggtttcttaaatatgacatttaagcacagcaacagaacaaaaaatagataatttagacttcatcaaaattaaaaacttttgtgcaatggaaatgatcaaaaaatgaaaagaaaatccacagaatgggagaaagtatttacaagttatgcatcttaaaatcgtctagtatccagaatatataaggaaatcttacaatgaagtgataacaagacaaataacccaattgtaaaaatgggcaaagcatctgaatagacatttttttctaaagaagataaacagatggccaataaacacaagatgctgaacactataagccatcagggaaatgctatcaattgcaaatccagtttccaattgcaaatcccartgagatgccacttcacacccactaggatggctgtaatcagaaagaaagacaacagcaaatgttgctgaggatgtaaaagaattggaaccctcacacattgctgctgggaatgtaaaatggtgcagccactgtggaaatcagtttgctggttcctcaaaaagttaacataaaattatcatatgactcagcaattcgttttcaattaggttggtgcaaaagtaattgcagttttt

SEQ ID NO: 883731 - DNA, 629 bp, Homo sapiens
atcttatgcctgttcattctcattccagtactgccttatttcatatttattttttgcagtatgccatttttattctcattcctttgtgcataattttagatactttatttgtggttaccttggagattaatgttaacattctaagttgataaagacataactggcattgatattaacttagcttcartagctacaaaatatactttcatacacctcaatccttcctttcccttcatactgtggttgtcgcgaattacatcattacatattgtgtacccactgacatggatttataattatttgtatgcattgtattttaaatcacttggggaatacaaagagttatgaaccaaaaaatacgatagtattggcttttatatttacccattagttaccttttgctacagttttacattttttcctataacttcaaatttctctttagtgtaggctaaaaaacactccttttagcatttcttatagggcagctctactagcaattaccttcctcatcttttgcttatctgggaatgccttcgtttcttcatttttgaaggacagttttgtggaacaaagaatttctggttcagaggttcattttttttttctttttcagcactttaaaaatg

SEQ ID NO: 883732 - DNA, 600 bp, Homo sapiens
atttattcaataggaagtcttttccggattgtttgtttttgttaactatgtcgaatatcaaatgtttgtaggtgtgtggctttacttctgtgttcttcaacctattcccttggtctatgtgtctgcttttgtgccagtaccatgtagttttggttattgcagcgttgtactatagtttgaaatcaggtaatttgatgccttcagctttgttctttttgcttaagtttgctttgactattaagccacctttatggttccatatgaattttagcatagtttttaattcttttcattacyatactttaatttctgggatatatatgcagaacatgcagatttgttacatagatatacatgtgtcatggtggcttgctgcacccatcaacctgtcatgtaggttttaagccccgcatgcattaggtatttgtcctaatgctatccctccccttccccccgactccccgacaggccccggtgtatgatgttcccctccttgtgtccatgtgttctcattgttcaactcccacttaggagtgagaacatgaggtgtttgggatagtatttttctaactttgtgaaaagtgtcattagtagttttat

SEQ ID NO: 883733 - DNA, 600 bp, Homo sapiens
atttattcaataggaagtcttttccggattgtttgtttttgttaactatgtcgaatatcaaatgtttgtaggtgtgtggctttacttctgtgttcttcaacctattcccttggtctatgtgtctgcttttgtgccagtaccatgtagttttggttattgcagcgttgtactatagtttgaaatcaggtaatttgatgccttcagctttgttctttttgcttaagtttgctttgactattaagccacctttatggttccatatgaattttagcatagtttttaattcttttcattaccatactttaatttctgggatatatatgcagaacatgcagatttgttacatagatatacatgtgtcatggtggcttgctgcacccatcaacctgtcatgtaggttttaagccccgcatgcattaggtatttgtcctaatgctatccctccccttccccccgactccccracaggccccggtgtatgatgttcccctccttgtgtccatgtgttctcattgttcaactcccacttaggagtgagaacatgaggtgtttgggatagtatttttctaactttgtgaaaagtgtcattagtagttttat

SEQ ID NO: 883734 - DNA, 616 bp, Homo sapiens
ccagctgtcagccttgggaggcccaagactctgcttgcagtctttagcctgaggggctccctcacttcctcttgcaggtgctccaggaaccaggagttgaagacctgggtctgaggcacacttcctaaagtcagcacagcagaggaggcccaggcaatatcaggagtcaaggtgagtgcacgccctgactgtgtaccaagggccctacccccacaaacagagcagacctggcagcacctggccatagccacctactgccattcctggtgcctcaggctctgcctgccagctgtgccccgaggtgctttctcacatcctcctacaggttctgagggagcaaacctcttaggaagacaggygacctgtgaggccctagagcaccaccttaagagaagaagagctgtaagccagcctttgtcagaaccatcataggtgagtttctcagctgaagctactcacactgtcactgtcttcctcaggcctgtgggatcccatcatccccatccctgctcacacgtttacctgctgctcctgaacaacaggcctcatgcctctctttccaaaccttccacgcctcagctttgaggaagacttccagaacccgagtgtgacagag

SEQ ID NO: 883735 - DNA, 596 bp, Homo sapiens
ttgatatcttgctttttatcttttgtggatctacaaaaggtttttgctttgtggttaccatgaggcttacataaaacatcttatagttaaaacaggctattctattttaagctgataacatattatgtttaatctcatttttaaaaatttatttactttaccttaccccttacaaattttaygttttcaatataacaatgtgcatctttttattttgtgtgtgtgtcttaaaaattattacagctattattattttaatagttttgtcttttaaccttcaagcaaaagatgtaaatggtttgcacaacaccattacagccttaattttctgaatttgactgtgtacttttatgaatgagtttaatattttcatgtgtttttgtgatactaatctgcatagttttctttcagcttgaaaaactaccttttgcattttttataagacaggtctgttggtgataaactccctcagcttttgtttaagaaagtctttatctcttcatttctgaagaacagtttttttcaggtaaagtattcttagttggcagattattttccttcagcactttgaagtatgttgtttatatatcatcttt

SEQ ID NO: 883736 - DNA, 596 bp, Homo sapiens
ttgatatcttgctttttatcttttgtggatctacaaaaggtttttgctttgtggttaccatgaggcttacataaaacatcttatagttaaaacaggctattctattttaagctgataacatattatgtttaatctcatttttaaaaatttatttactttaccttaccccttacaaattttatgttttcaatatmacaatgtgcatctttttattttgtgtgtgtgtcttaaaaattattacagctattattattttaatagttttgtcttttaaccttcaagcaaaagatgtaaatggtttgcacaacaccattacagccttaattttctgaatttgactgtgtacttttatgaatgagtttaatattttcatgtgtttttgtgatactaatctgcatagttttctttcagcttgaaaaactaccttttgcattttttataagacaggtctgttggtgataaactccctcagcttttgtttaagaaagtctttatctcttcatttctgaagaacagtttttttcaggtaaagtattcttagttggcagattattttccttcagcactttgaagtatgttgtttatatatcatcttt

SEQ ID NO: 883737 - DNA, 619 bp, Homo sapiens
gctctatagtctgactaccttgtggaatgaagcattgtgccaggtgtttttaggacctggttgatttagacccttctttagatgtttcttgtctccaattttcaggagcttgcaggactatcagagtttatattctaaaaataacatctttggctttggtagatttttctaatggagttctggaactgtcattcagtataaaatgtgtatagcaaaacatgtttactcacaataagtaaatattttggaggacagggctatttagataatctggttagaccagatcattcacctaaactactgtttttcttattttgtgtggtataagatgacacataaagcagttgatagagaaaagatayaaggatatttttagggacactttttttagatctttcccaagctggttagtttttcctttcaacacagacctcactgttattttggcatacccttggctaagtatctgaaaaatgatagcttttaaatatattgcttttcatttcctgttctatgtttcagaggcacaaaataacttacatgcttgagatacaaactatttttggtagactttatttacttggtttgggcgttgctaagtaagggctgaatttttata

SEQ ID NO: 883738 - DNA, 580 bp, Homo sapiens
ttgctcactttttgatgagattgtttttttcttgctgatttgtttgggttccttgtagattctgaatattagtactttgtcagacgcatagtttgcaaagattttctcccactctgtgggttgtctgttaactctgctgattatatcttttactgtgcagaagctttttagtttaattaagtctcatctatttatctttgtttttgttgcatttgcttttgggtccttggtcatgaagtctttggctaagccaatgtctagtagggtttttccaatgttatcttctagaattttttggtttcaggtgttagatttaagtctttgatccatcttgagttggttttttgataagrtgagagatgaggatccagtttcattcttctgaatatggcttgccaattatcccggcaccatttgttgaatagggtgtcctttcctccactttatgtttttgtttgctttgtggaagatgagttggctgtaagtatttggctttatttcttagttctctatgctgttccattggtctatgtgcctgtttttatatcagtaccatgctattttggtgactatagactta

SEQ ID NO: 883739 - DNA, 580 bp, Homo sapiens
gcttctgcacagccaaagaaactgtcagcagagtaaagagacaacatacagaatgggagaaaatagttacaaactatcatctaacaaaagtctagtatccagaatctacagagaatttaaacaattcaacaatctaaaaacaaataaacccattaaaaagggggcaaaggacatgaacagacacttctcaaaaaaaagatattcatgcagccaacaagcataggaaaaaatactcaattactaaacattggagaaatgtgtataaaaaccacatagaaactatttcacaccagtcagaatggctackgttaaaaagtcaaaaaataagagactgtggtgatgttgcagagaaaaaggaactcttatatactgttggtgggaatgtaaattagttcagccacagtggaaaccagtttgaagatttctcaaagaacttagaactaccatttgacctagcaattcaattactggttatatagacccaaaggaaaataaattgctctaccaaaaaggcacatgcacttataccttcattgcagcactattaacagtagcaaagacatggaatgaacctcgttgt

SEQ ID NO: 883740 - DNA, 635 bp, Homo sapiens
aacatacaaattcaagaaattcagagaacccttgtgagataacacaaaagatgaccatacccaagacacatagtcatcagattctccaaagtcaatgtgaaagaaaaaatcctaaaggcagctagagagaagtagcaggtcacttacaaaggaaaccccatcaggctaacggtggacctttcaacaaaaacactagaagccagaagagattgggggcctacatgcagcataattaaaaaaaaattctaaccaagaatttcttatccagtcaaacaaagcttcgtaagtgaaggagaaataaaatcctttttagacaagcaaatactaagggagtcctttaccaccaggcctgccttacaagaagttcttaagggagtgctacacatagaaaaaaaagacgaacacctgccgccacaaaaacacacttatgtagatagcccactgaygttataaagcaactgtacaatcaagtccacataacaaccagctaacaacatgatgacaggttcaaatcttgatatattaatatcaaccctgaatgtagacgggatgaatgccccacttaaaagacatggagtggcaagttggataaagaaacaagacacaactgtatgctgtcttcaagagacccatct

SEQ ID NO: 883741 - DNA, 580 bp, Homo sapiens
cctttgataacattatttatatctccagagttggttctatctctgcctattctagccaatccctcagtcactgtgcccagcacaggraactgtctttctctttaatgtcacagaagaagataggatatttttgtgatattagttgaacagattttccattgcttcttcatctcaaaatggacctgtctgtttgaactcatgttttcatggtgcacacaaatgaccaattcctgtgatcaattacctttaagtttccagagatattttaagcaaacaggcagttgtgtatctagaatctctctgaccacaaacacaaagaattataaatgactgtttatagacataggccaacatgtgaaaaattgctgggcaaattatacaattttagctaaaagaaaaatgaaaataagacacaaaatccctatggaagaaacacaaaataacttcctgcaaccaaaagaaataatcgattatttgcccactatatcttttctaggggcttttgtcatcccttagtaatataattgctgaccaaaagcctatggtaccacacccgaatctcctttcctccagtcttatg

SEQ ID NO: 883742 - DNA, 641 bp, Homo sapiens
aaatagcgagtaaatggagttcttttatcctttgcagtataccagggtgaactttttacatgatttcttgctccaaagggagaagtgttatgacaaagtacatttaaggaccctaactgatcacagaaaaaatattaatggcattgggaaaaaaatgcagactaatgaatccactactaaattttatctatcttgtagctctaaaattgcactgtttagaatacactatggtagccactagacatatggctacttgaacttgaattggttaaaatcaaaaktaagaatttaatttctcactcacattagccacatttcaagtgctcaacagacacatgtggctagtgtctaccatattggacagcatagatttaaagcacatttccatcattgcaacactgcaatatggaggatgtatcctcaatacattgatattgccccctcaaaattcataacccctagatatcttatctctgtatgtgaggatagtgtattaacttgcacctggactgagatagataaatgcttatctccagagatgtctgaaagtctggtactgacccttgtctaagataaggatggaatgtgctggttaatgatttatactgtgctatacaaagtccaaaattcctttggaggta

SEQ ID NO: 883743 - DNA, 590 bp, Homo sapiens
ccctgttggtgtgtggatttgtttctgggttctttatgctatttcattggtctatgtgtctgtatttgaagttaggtaatgtgattcctccagttttgtttcctccccgcccctcccccgccaggatagctttggctattctgggtcttttgtggttttrtataaattttaggatttttttttccttttttaacttttattttaagtttgggggtacaagtgcaggtttgttacacaagtaaacttctgccatggggatttgttgtacagattatttatcatccagctattaagactagtatccattagttatttgatctgatcctctccctcctcccaccctccaccctcccaaagttcccagtgtgtgttattttcctctatgtgtacatgttttctcatcatttagctcccacttataagtgagaacaggaagtacttggtttatgttcctgtgttagttggctaaggataatggcctccagctccatccatgtccctgcagataacatgatctcattctttttgtggctgcatagtattctatggtggatatgtaccacattttctttatccagtatatcactgat

SEQ ID NO: 883744 - DNA, 618 bp, Homo sapiens
ttcgttgtgtatccactcttagccatgagatgcagatttccaacagtaagtacactttctttcatttacttttaaagttgcaattctccgttagctccagcagaccaggcactctgggaagcagttagccataacaggactatttccattatstccagactatttagttctcttctatcttacacataaggcctttcttcagtagtgtgccttatatttctcttcttaattcctacctccttaccctggttccaagcctgaattacttctcttccaaactattataatagtttttgtacttctttaatttactgtacacacatagacatctaagatttgtactgtataaaaatacatttctgatcataccatacgtctgtttgaatgccctcaatggctacctattttctacagaattagatataaatgcactttgccattcatgatctccacacagggaccttaactcccctttctagttctagttgaactgaccattccccaaatacatcctgtctttttattccaccgtgctcatgccattcttttttttcccctaaaaggctgatgttttttatttctgttagagttctacacatcttttaagattaagctatc

SEQ ID NO: 883745 - DNA, 646 bp, Homo sapiens
tggcttgggaggcatcacggatcctaccaacgtgtgatgtctcccccggatgcccagctttaagatttctctcttttgtactctgtccctttatttctcaagtcagctgacacttaggaaaaatagaaaagaacctaygtgattattggggcaggtgccccaatgaggtagagctaagaaagagcaggtcctcagagggcttgctggatattaggctcatgacgtctttaaaaataatagttatataaactttaaatatacacaaaagtaaaaagagaaaaaaaagccccatacatccataactcagattgaaaattttcaacattttgccacttttgctctatctaaaccccttattttgttgactatttcaaagcgaaacctggatatcacattttttcatctgtacatattttagtatgtatctctataaaaatgaacattttcttacacaatcataatgctaatattatacttaccaaaatgaaaatgatttcttggtaccatctactacatagtccataatcaaattttcctgataagaccttttttttttagaaaagaatgtaaataccacagaaagcagtatagcaaagtgcttaagaataacgggctttgaagttaagtacaaataagtttgaatcct

SEQ ID NO: 883746 - DNA, 576 bp, Homo sapiens
tctttcttgcctaactcacagagtttttataaaaatcaaatgtgttaaaataagtgaaaggacgaataatatagtttaaaactatgaaaatggtaaatgctaattgaaatacaaacttatagaaatgacacactctaatttttgtaaagttttgaaaataagtaatgagttctcttaataagcatttttaatgccttactgtttgctagatactatgcaggagtcacacacagacatccacagaaggatctcataggcttatgaaagaggcattcagttaaacagagaataatgaaacattgtgaaatcccttgagttagaggcccatcatctagagtaacataatatggcatatatatatatatatatatatatatatatatatrtatatatatgtatatctgtgaactaacctttaaggactagaagaagaggagcttatttttaaaaatagaagaagaaaactagtggtcaaagaagtatgagaaaaatcagatgagttggtggggggggtcagagaaatcaaggaagaacaataattaataaagatatcaacagtgtcaactgcaggagaga

SEQ ID NO: 883747 - DNA, 617 bp, Homo sapiens
aggatcagtgaataaaacacttgataagcctttgtttcacaccccatagataaaaaaaggcaaacagttacccagaatgtatgtcatttccagtcaaggtgaatcagtattcaatgtattcatgttaccactaagtggctaatctcaagggatagggccatatcagtgactcagcaatagtttcaatcaaatatcagatatttgggaacaggagttttaatattttatttggtgtatgccagcccgtgctgtctgcccccatgagcactctgtttatctgcttgtggaagcattaccatgtggattattacagatagttgttgctgtcaactggctgagatgttctgtctacttggctttttagtgtcacttttgtgatggatgcattccaaaggacaacaccatgagatataaacatgtwtatagttcgttaccattcccatgagaccaactatatgattctctctcaagtcaccttatccttgatcttccaatctttcttctttcaggctcctgaccaactagccacactataagccactgtctatgaatctgtataaattctaatctcaggctacatctatttccacacaagtggataactcattgtattattg

SEQ ID NO: 883748 - DNA, 628 bp, Homo sapiens
ggagagaaagcaaacaacttggaaaacatatttcagtatatcatccatgaaaacctccccaaccttggtagagaggccagcaatcatactcaggaaatatcaagaacctctgtaagattctatacaagattattgtcaaaatacataatcatcagaattcccaaggtgaaaatgagaaaaagaatattaaagacagctagacagaaggcrcaggtcacctacaaagggaaccccatcaggctaacaatggacttctcagcagaaaccctataagccagagaagattggtggtctgtatttaacatttgtaaagaaaaaaaatattcaaaccaaaattctgtatgcagtaaaattaagcttcctaactaaaggagaaataagatccctttcagataaacaaatactaagggggtgttttaccaccagacccaccttacaagagatcttgaaaggagcattaaatatagaaagaaataaccactagcagccaatacaaaaacacacttcaatactcagaccatagacactataaagcaaccacaaaatcaagacagcataataatcagctaacagtacaatgacagaatcaaatccacgcttatcaatactaaccttgaatgtaaagggg

SEQ ID NO: 883749 - DNA, 662 bp, Homo sapiens
tcagaactgtgaaaaataagtttgtgtttaagccaccgagtttacggtattttgttagagcagcctgagctgactaagagagtggtctacaatgtgctccaccttggtggacattctgtgtgacttcagaagaacgtgtattcaactgatgctgaatggagtatttcatattccatataaatgtcaatcagatcaagttgagtgctagtgctgtataggtcatctaactatatacttagatttttgcctgattgatctataaattattgacagtggattctaaagtttccaaatataatagtagttagaatgcaaatgtgtttatctcttagaaaattaatgcctatattaccaagtaatgcctgtctttaccttgacaatttttttaaatattatttgtgtgaaatgtatatagctactcacgttttattttgattagggttcaaatggtgtagcttaattcattcctttatttttcamctatccttccatgtctttgtatttaacattggtttattgtaggaagcatataatttaatcattttttatccattctgacaatctctgcctttttttaagttcagaaataaatgcagtttttttatataagtaaattgcatgtcacgggggtttggagtaaagattatttcattacccaggta

SEQ ID NO: 883750 - DNA, 637 bp, Homo sapiens
tcttgaagacagcaaacaaataggtcttgcttctttatcaaatttgccacactcccttttaattgggacatttatcctgtttaaattcatagctaatattgatatatgtggatttgaccctgtcattgtgttgttagctggttattattcagtctcatttgtgtagctgcttcaaagtgtcaccggtctacatatttaagtgtatttttgtagtggctggtaacratctttcctttctacatttagcactcctttcaagacctctcgtaaggcaggtctggtggtaatgaattccctcagcttgtctgaaaaaaaaggccttatttcctcttcacttatgaagcttagcttgactggatataaaattcttggttggaaattattttctttaataataatcaataccttctggcttgcaggttttctgctgaaaagtctgctgttagcctaatggggttccctttgtaggtgacctgccctttctctctagctgccttcaataatttttctttaatttttactttgaacaatctaatgactacgtgtcttgggaatggtcatattgcatagtatctcacaggggtcctctgcatttccagaatttgaatgttgacctctctagggaggttggggaatt

SEQ ID NO: 883751 - DNA, 615 bp, Homo sapiens
gtttccccaaactttatgtgagttggaagggtgccgccttctgcactgtgcagtcagtccagaggaggaggaaaagtagtgctgggtgggcggaagtgagttaagtttccattcattattttatagtgtaattcagcattcccctgagatgaagctctgaggacaaacgttgaagatattaatgaagagggattttgttgttgttacagaaccagggtttcagagtgatttcagaagctggctaactaatttttctcccagtaatcaaatggttttyttagtcagtttctgaaattgctaggaagtctgtgttctttcctgatttccagagtgatggaaggtaaggcacagggtgacttgtcacatcttaacaaaaacatcctttcatctgctgatcctgtatttacagatataacagtaattgtccctaacccttcttcacaggcctgagggaactcctcccctgggcggaatgctgtgcattttatggctttaagacatgacaatctcccagaaacttttgcttttttttttttttttttttcatttttactaacatctatttgagtactggctggggtgaagcattaaagagaatagagaggagggtagagg

SEQ ID NO: 883752 - DNA, 617 bp, Homo sapiens
aatatgtctcaatgtgggtctttttgggtttttcctttttggagtttgttgagcttcttggatttgattattcatgttcttcctcaaatataggaaattctctgccattatttttttatatagcctttatctctttttctctccttttgaactaccacaatgtatatactggtccacttgatcatgtctcataacttccttaggctctattcactttctcctgtcttttttctttctgctccttaracttgataatttccaatgtcttctcttcaagttcaccaattctttcttctgcatactcaaatttgctgttgaaccccttagcaaatatttcaatcaatatggtcattatattttccaattccagaatttttattttttcttttttaaaaaataatttatttctctttgttgatattcttgttttttatatgttgctttcctgaaagcttttgttttttatctgttttccttcagttctttgagcatatttatgacagttttaaagtcttttgactagctttatgcctgtgcttcctcagggattgcttttgtcatttcatttttatcctttgaattggttatgtcctttcctgtttcattgtatacatcat

SEQ ID NO: 883753 - DNA, 587 bp, Homo sapiens
ttacagacaagcaaatgctgagagattttgtcaccaccagacctgccttacaagacctcctgaaggaagcactaaacatgaaaaggaacaaccagaaccagccaccgcaaaaacatgccaaattgtaaaggccatcgaggctaggaagaaactgcatcaattaatgggaaarataaccagctaacatcataatgacaggatcaaatccacacataacaatatgaaccttaaatgtaaatgggctaaatgctccaattaaaagacacagcctggcaaattggataaggagtcaagacccatcagtgtgctgtattcaggaaacccatctcacgggcagagacacacataggctcaaaataaaaggatggaggaagatccaccaagcaaatggaaaacaaaaaacggcaggggttgcaatcctagtgtctgataaaacagactttaaaccaacaaagatcaaaagagacaaagaaggccattccatagtggtaaagggatcaattcaacaagaagagctaactatcctaaatatatatgcacccaatacaggagaacccagattcataaagcaagtccttagagaccta

SEQ ID NO: 883754 - DNA, 621 bp, Homo sapiens
cctcagcaaatgtaaaagaatagaaattataacaaactctctctcagaccacagtgcaatcaaactagaactcaggattaagaaacccactcaaaaccgctcaaatacatggaaactgaacaacctgctcctgaatgactactgggtacataattaaatgaaggcagaaataaagatgttctttgaaaccaatgaaaacaaagacacaacataccagaatctcttccttctttgacattactctatcagtggatgatggggtaacaccttgttactaccaggtgagggtagaagtccaagtttcctacttagcattcattgacacttggwgaggggctcctcattactggtggataaggttgtatgttccagcttctccctcagactccaccgctactcactccctgacctcaactagaccaccaaaggggtgggtagcctcactactgccctgtggatgtgatagtcccaattttccattaaatatcttgcagcacaataaaagtagggagggagagggatactttaatattgctaagtggaagtagaaattcagattccttatgtggtctttaaggacaccaaaatggtggaggagctggttatcaccctacggggatg

SEQ ID NO: 883755 - DNA, 641 bp, Homo sapiens
agcttcttgcaagttttacactagcatgctgcttttgaaattccaggtgttcaggctacaaggaacaaggctgagtgtccaccagtgctgagatttccccttcgatggtagacaagactggggccattgttactatgacaagatgcgctgtggattaaaggggaggaaaacaatgtgmcttattgtctcattccctttcctggagaagcccaaagaaccacacaagacatctgaagactgaagggacagccatcattcaatcacagcattagactttgcatgtctatgacccaatctgtttcaatgattcccccagccatagttccactgcatctggctttgaagcatattccctctccctttccctgactcctgagaatacctcaaatacaaatcaagctttttgccagttacggtttctcattttgttagcttgttcaatatttgttgagcacctattatgtaccaggaaatggtctgagtgttggtctcctaagaccaaatccccatcctttggctcatggagctttgactcatggagatgagagaacataaacaaattagtgaatgacataatttcacaaatgctctgcacagcaagggacgaaggcaatggctgggacaacaatttggatatgaaa

SEQ ID NO: 883756 - DNA, 648 bp, Homo sapiens
acgaaagaaggacagaaagacaaaaaaaagacagaaggatgaaagaaagacagaaagacgaaagaaaaggaaagaaaaagaaagaaggaaagaaaggacaaagaaagaaagaaagagagaaggaaagaaaccacaccaaacctgttcatcactgtaatgattgagatttacaaaaaataaagtttcacactttttaatttagcatctacacagaaaaattgaaatttttaaaaggagtcttgacattaagaactcaatgatctctaacgatgtggtggatgaagtatgctgctcacccactgtattagtctaggttctctaaagggacagaaccaataagatacacacacacacacacacacacacacacacacacacacayatatatatataaaggggagtttattaagtagtattaactcacgagatcatgatgtcccacaataggctgtctgcaagctgaggagcaatgaagccagtctgagtcccaaagctgaagaacttggagtccagtgttcgagggcagtaaccatccagcacaggagaaagatgtaaactgggaggctaagccaatctagccttttcacatttttctacctgtttttatattctggccacactggcagctgattagacggtgctcaccca

SEQ ID NO: 883757 - DNA, 626 bp, Homo sapiens
acttcatcatcattccagccagggtaaatgagcacccttgcagcttcagggcacggagccccgtgggcaggtgtgtgtgtgtgcaggggattgaaggggagctgggttgtgggctgagggctggcaggggcacttgctcatggagctcaggctgtgaccaacctgccaccactgcctggagcagttgtcaggactaggcttatatctcttggtttatagtcaagggtagggaaaatagatagaaatgaactatataagcatgaatccagtgaagtgaaaactggcagtcttagagttgactcaactatcatgaagtttrtatttctttaggggaaattcaggccactgaattggagggaaatccacgtagagtcttttcttgctttcccagggaaaaagaggcaattagaaaaggtaaatatcacatctctggcatagtctatggcaccagatgttttacttcataaccaaacatgaagcaaaccaaattcatgatgagatatccagactttatagagctaagagcctggttttatggaaagagctctggtgacagatatacttagattaaaatcttgcttcttaaacaacctacttcaatctttctaaatatcagtttccttatt

SEQ ID NO: 883758 - DNA, 618 bp, Homo sapiens
agagtcacggagagatttgaaaatgctagttgctggctttaaagtggaagaagaggctaaagaatgtaggcagcctctagaacctgaaaaaggcaagggaaaggattctccccgagaacctccagaaggaatgaggccgtgtcgacagcttgaattttgcccagtgagatcgatttcagacttcagcttctagtgctgtaaatgattatggttatttgaagccactatgtttgtggcagtgtgtcscagcagcactaggaaactaatacaacaacaaagaggccttaaaacatttccagataggatttttctctctctactttcagctgtgaaatgcagttcaattcctctacataaaagcacctcccaagtaatatgtgctgtgactggcaacatgatttaggctgcctggtgcctgcaaatactaagaacaatattcctggcagacctccaggatattctgtcttctaattggctcaaattaattccctctactctgagcatttggaggagcaaagattttccacatagttgtattacattttttctactttttctatatatcctcatgactatgaatacaacataaatctaatgttgaatttactgaaactgact

SEQ ID NO: 883759 - DNA, 769 bp, Homo sapiens
gagtggtgtccctgaagcattgagggcagaggtatggcagttattggcaggctgccatgacaaccaggcaatgctggatagataccgaattcttatcacaaaggtaggaagaagttcttttcatattattttcattggatgacctattaaataaatcctagttttcatagctcccataagtcataaatgctttgaacttcttcatgaatatattgaggtcgtgaagtcagtacttctaccttttgttctgaacacttgtagtggtaaacaatgcacttagtcatctatgaacattgtatgccttggtttttatcttttcattcaagtgattttataatagctatttaccaaattggaatatatttatatttcaagtgttttctaacttttcaattaaycttttttaattgtatgagatttatatagttataatcatacatagttactcttgtataattttacaataacattaaaatgaaattaaaaattcttctgtgcttatgtcaccttacatttaaataatgtagatacttgccctttttctgtcaggggcccttggttccactgtaaattcctttgcttatgtctaaatacctggttttagagcataagtaaaggtaggtgttggccttgaccctggactcaccaccctaggtcttaccacctaattacttaatctactctaagtactgtattttaaaataatagtaaaattttattttttaatttaaaggaacctctcctcataaatgagatttttataatcaag

SEQ ID NO: 883760 - DNA, 644 bp, Homo sapiens
atattagctgtatgttaaggtatcctcttttattcctaacaatttttgtttgtgccaactttttttctggagagaaaaaaggagtttggtgtgtttttttatgccttttcaaagagttttggctttgttgatacactctgttttagcttttcttatttcattgatgtattctctaatattagttatatcctctttccattacccttaggtttaatctattgttcttttttaccrtaatatgattgcttaaatcattaaatatttggatattcttcattactgtaagcatgttaaagctaggaatttccctgaaattgtgagtttagccaaatcccaagagttttatttgtattatttttatgatcattcaattctaaatagcttatctgttgcctttaagacattttcatgacataactattttgtaggagtgctttcaaacttccaaatgtataaactttaataaaagtaaaatttttgcttttctttctaacttgatctcattgtgattagagaatatagtttgtgtgatgctgactcaaaatttttgagacttgctttattgattgatttttgatttttgtaattgttttatgtattcctaagctaaatgtatattctctaatctcggagtgcagcatttt

SEQ ID NO: 883761 - DNA, 628 bp, Homo sapiens
ttcctttctctctagacctgagaatagagggaattggtaggaaaatgccagcgggccggtttctaattccaccaagaagacaaggaaaatgggttgcaacagcagccagaggacagaaggccagggtagccggtcaggtcccagggatcaggtagaatttcattactcacaggactttttttttttttttcagcacaaaataaccttctagaaaacccagctgaggagaaagttcacaaaggrgtcacataggtagcccaagctcttcgaggtcaatgcatggtgtgcctcttgatgcagcctggcactttcattaacgtatttaatcatgcttttatctttaatcatcaaatggcttaatagcatgcattgtattcccaggcctgaaataacaatggttatgtggctctgtgataaatgtttttaataaaatcagtaattaccctttttgtgtgtgtgtgtgtgtgtgtgtattatattaacatctttccatttccttaattttggcttttagatatgcaaaaaaaaaaagactaaggtagaatactcaaaatactgttttatgtttggttttgtttctaggagcgcctgctgaatagcaggaaaggtgaattctaagctgtggatt

SEQ ID NO: 883762 - DNA, 628 bp, Homo sapiens
ttcctttctctctagacctgagaatagagggaattggtaggaaaatgccagcgggccggtttctaattccaccaagaagacaaggaaaatgggttgcaacagcagccagaggacagaaggccagggtagccggtcaggtcccagggatcaggtagaatttcattactcacaggactttttttttttttttcagcacaaaataaccttctagaaaacccagctgaggagaaagttcacaaaggggtcacataggtagcccaagctcttcgaggtcaatgcatggtgtgcctcttgatgcagcctggcactttcattaacgtatttaatcatgcttttatctttaatcatcaaatggcttaatagcatgcattgtattcccaggcctgaaataacaatggttatgtggctctgtgataaatgtttttaataaaatcagtaattaccctttttktgtgtgtgtgtgtgtgtgtgtattatattaacatctttccatttccttaattttggcttttagatatgcaaaaaaaaaaagactaaggtagaatactcaaaatactgttttatgtttggttttgtttctaggagcgcctgctgaatagcaggaaaggtgaattctaagctgtggatt

SEQ ID NO: 883763 - DNA, 628 bp, Homo sapiens
ttcctttctctctagacctgagaatagagggaattggtaggaaaatgccagcgggccggtttctaattccaccaagaagacaaggaaaatgggttgcaacagcagccagaggacagaaggccagggtagccggtcaggtcccagggatcaggtagaatttcattactcacaggactttttttttttttttcagcacaaaataaccttctagaaaacccagctgaggagaaagttcacaaaggggtcacataggtagcccaagctcttcgaggtcaatgcatggtgtgcctcttgatgcagcctggcactttcattaacgtatttaatcatgcttttatctttaatcatcaaatggcttaatagcatgcattgtattcccaggcctgaaataacaatggttatgtggctctgtgataaatgtttttaataaaatcagtaattaccctttttgtktgtgtgtgtgtgtgtgtgtattatattaacatctttccatttccttaattttggcttttagatatgcaaaaaaaaaaagactaaggtagaatactcaaaatactgttttatgtttggttttgtttctaggagcgcctgctgaatagcaggaaaggtgaattctaagctgtggatt

SEQ ID NO: 883764 - DNA, 618 bp, Homo sapiens
tccactttgctgcactcttctaattcatacatttctttaccccaagaaacacccatttttctgaatttggggttagtcattcaactgcttatatacataagcagtgataaacctccaatgaaaaatgaacgtttaagccttgatgtcaatggaatcatagtgaatgcattccgctctaatattcatttttctctgaacagtatgtgtggaattcatccattttgatactggtggctatagttwgctcactttcactgctgtgtagtagccccattgagcgtaaatatgacaatttacttctcattttttctatgatggtccatttagattgttatcaatttttagcttgtacaaacaaatttgctaggaatgttcttgggcataatccatgataaacatgggtttatttaggttagctcctccaggatggaatggctaaaatatacgatatattcatcttttgctttataataaaatgccaatgtttgcctgaagtggcttgaccaattgatcctgcatgtatcggcaccctcctgctccccatccttgctcatgtttgataatgtcacacttttaaacatttcttacatatgggatatgaagtcatatcacctagta

SEQ ID NO: 883765 - DNA, 618 bp, Homo sapiens
tccactttgctgcactcttctaattcatacatttctttaccccaagaaacacccatttttctgaatttggggttagtcattcaactgcttatatacataagcagtgataaacctccaatgaaaaatgaacgtttaagccttgatgtcaatggaatcatagtgaatgcattccgctctaatattcatttttctctgaacagtatgtgtggaattcatccattttgatactggtggctatagtttgctcactttcactgctgtgtagtagccccattgagcgtaaatatgacaatttacttctcattttttctatgatggtccatttagattgttatcaatttttagcttgtacaaacaaatttgctaggaatgttcttgggcataatccatgataaacatgggtttatttargttagctcctccaggatggaatggctaaaatatacgatatattcatcttttgctttataataaaatgccaatgtttgcctgaagtggcttgaccaattgatcctgcatgtatcggcaccctcctgctccccatccttgctcatgtttgataatgtcacacttttaaacatttcttacatatgggatatgaagtcatatcacctagta

SEQ ID NO: 883766 - DNA, 634 bp, Homo sapiens
gcacatgtaccctaaaacttaaagtataataaaaaaataaattaaaaaaaaaaagaatgaacacatcaccatgatatgagaaccatcttaaccagtgacttcccctcataaagataaccactatgttcatcccttttaccacatattagctgtccatcttttggacacttatggaatgacagagaatgtattcatttatgactagcttttcccccttgtttttgtgagatacatcatgttgaatatggctacagcttgttcattctctttgctgtataggtttatattacatgactagactataacttatgcacattaatgttggtagatttttaaacagtttacatttgggggatatggctagtatgaacattcatgggctcatctttttacatacttaggtgttcatgtctgctcatttgtacttagaagtagaattaatggttaagcatatacttagtttttgtagatcctgccataygcttctggttttccaaagtggttgtaccaagattcacttgtagtagataagaattccaatacgaaatacagcctgtaatttgacattttaatatttcttattatagaaacattggcaaattctcatatgaattctaagattttatctacataa

SEQ ID NO: 883767 - DNA, 682 bp, Homo sapiens
atacacaaaaagggaaggtctttcatccttttaagtgtttctcaaacttaaaaacttgttagcctgcaaacctgtaaaacttataaaatctgtcttagtttgggctgctataacaaattaccacagactgggtaacttataaacaacagcaatttattgctcacaattgaggttgggaaatccacgatcaaggtgcctgcagattcagtgtctagtgaggttttgttcttcatcgatggcgccttctagctgtgtcttaacgtggcagaaggggtgaacaagctccctccagcatctttcataagagcactaatcccattaataagggcagactcctcccaaacatccaagcattttatcatctcccaaaggtcycacctcttaataccactgtcaggcctctgagcccaggccaggccatcgcatcccctgtgacttgcacgtatacatccagatggcctgaagtaactgaagatccacaaaagaagtaaaaacagccttaactgatgacattccaccattgtgatttgttcctgccccaccctaactgatcaatgtactttataatctcccccacccttaagaaggttctttgtaattctccccagccttgagaatgtactttgtgagatccactcctgcccacgagagaacaaccccctttgactgtaattttccatta

SEQ ID NO: 883768 - DNA, 549 bp, Homo sapiens
caccagggttctcactgcaggagaaggaagatatatgtataaaatgtgttgaatttgaatcagtatgagctcatgacttaaaacaaaaataaattatactccctagctctacctactgaaagaacctacaggcaataacgcatcaccgagcacacctaagatgtatatcttagtgccaaaataccactccccattgaaagcaaccacaaatccctaataagtggttggcytcaggtctggggcagggacattaaaagaatagtctagaatatttttgttgtgccagaagcaaggaagactaatgagaacatgtcaaaaggacctgggaatcagcttgaagagactgccactggccatatttgaggcaatttgagcatcacagagaatggcagtagaggatttcaatacacggagtcaaaaatgatctatgaatcaacagggagaccaaaaacagggaggaagatgaagagagaaacaactcttctctaaagaagaaggctaactagtaagcgtagggagaattatagatgtttaaatcacccttttgta

SEQ ID NO: 883769 - DNA, 589 bp, Homo sapiens
ttcatcattggaatttattaatgttcaaggaaacctggaaagttttctaacacattaaaggagctttaattataagttccaaattcttcttagaagaagagaaccagcaggcccagacatttttactggtgagttctatcaaatgttttcaagaaatggattatttccattttataaaaacaactccagaataaaaaaaggtccatttgttcgttcattttatgaggccagtacaacyttgataccaatgttatatgagaaatgtgtaagacaggaaaattacatgccaactttcctcatgaacctaacggcaaacattttaaattaaaagttagcaaattaagtttagaaatctgtaaaaaagataatatagtatgaaaattgtgtttgttccatgaatgcaaggatttctaacaatagaaaaaaaactatgtataattcatcacattaacaagttaaaggaggaaaagcaaatcatcattgtagaagaggcaaaaagtgaattcaataaaataaaatatttaactttgacaaatcttgtttagcaaacaagaaatagaagagctttcagtgtttgcttataaatcag

SEQ ID NO: 883770 - DNA, 589 bp, Homo sapiens
ttcatcattggaatttattaatgttcaaggaaacctggaaagttttctaacacattaaaggagctttaattataagttccaaattcttcttagaagaagagaaccagcaggcccagacatttttactggtgagttctatcaaatgttttcaagaaatggattatttccattttataaaaacaactccagaataaaaaaaggtccatttgttcgttcattttatgaggccagtacaaccttgataccaatgttatatgagaaatgtgtaagacaggaaaattacatgccaactttcytcatgaacctaacggcaaacattttaaattaaaagttagcaaattaagtttagaaatctgtaaaaaagataatatagtatgaaaattgtgtttgttccatgaatgcaaggatttctaacaatagaaaaaaaactatgtataattcatcacattaacaagttaaaggaggaaaagcaaatcatcattgtagaagaggcaaaaagtgaattcaataaaataaaatatttaactttgacaaatcttgtttagcaaacaagaaatagaagagctttcagtgtttgcttataaatcag

SEQ ID NO: 883771 - DNA, 612 bp, Homo sapiens
gaatttattaatgttcaaggaaacctggaaagttttctaacacattaaaggagctttaattataagttccaaattcttcttagaagaagagaaccagcaggcccagacatttttactggtgagttctatcaaatgttttcaagaaatggattatttccattttataaaaacaactccagaataaaaaaaggtccatttgttcgttcattttatgaggccagtacaaccttgataccaatgttatatgagaaatgtgtaagacaggaaaattacatgccaactttcctcatgaacctaacggcaaacattttaaattaaaagttagcaaattaagtttagaaatctgtaaaaaagataatatagtatgaaaattgtgtttgttccatgaatgcaaggatttctaacaatagaaaaaaaactatgtataattcatcacattaacaagttaaaggaggaaaagcaaatcatcattgtagragaggcaaaaagtgaattcaataaaataaaatatttaactttgacaaatcttgtttagcaaacaagaaatagaagagctttcagtgtttgcttataaatcagaaactattcttcgtctttcaagcagaggtgatt

SEQ ID NO: 883772 - DNA, 665 bp, Homo sapiens
atctcatacaacttttgtacacttatcccaataatatatccataaatataacttaaagatggcttagcatcactttttatttgaatgctacacatataatttagcatattaaataaatctaattggtttaatctctctttcatacaaaaagaaatattctttgtggctttctgagggtccaatatggagaatcctaagttaatttgaggtcaaaaagacttaacttagaatgtgattttgggaagattgtcaaaaatgtcaaaaagtttaaaacatttaaaacaaatattaccatagttatctatttaataaaagctccattaaaagattttaaaggcaaattcagattacatagttgtgaacaagaacttagctcctttaatattgagaagactcacttttcttaagtaaccaaaacctaataaaacaacatgaaactcaagaaattatcttgaygaaacagtctctgtttctgaggccaattacttaaaaggaaaaaaataccctttacattctcagaccaacattccaagaaaactttaccattttaacggagaagatcaaattctacttttgaatcaatgtattactaaaactaagttttaataaaaccttataaataaatctatccaatctcagtcagcttagaccatacaagataagat

SEQ ID NO: 883773 - DNA, 559 bp, Homo sapiens
tctgagtcccttgagagccccctcaaaggagggtaggataggggtcctgaagttcagcagaaaagaaacgggtctggcaagagtggacagagaaatagtcagcagagacttgagaagaggggtttcaggtgacagagctcccatgggagaagcaggatccaatagagagaagagaaagagcagagtggttttatagagagccaggaagaacaatttgtagctcagggaatcagggaataacccctcactcagaaaaagagagccagaaagaagagamttctagtctagggactcagagaatagatcactcagaacaagaagcccacaggaagaccttcctgcccagaggattcctttcaaaagaagcctgggactctaccccagcttcagagagaatattcatcccttaagattcaaaatctgtccatagccatcaacgggcttttgtgtggagcaatggctcagaaatctgattcaccaatggatccctaatcagtcagaaatgacaacaaagacttcaaaggcatgcatttagggtcctgagtgagaggcccaggat

SEQ ID NO: 883774 - DNA, 679 bp, Homo sapiens
ctctgcttagatacttagacatcatgagatagcttttagaacaatgaaagacgcaccagtctgcaccagtataagaactctctaggttagcaattgttaacaatatgctcacagtagaataaaatgtcataatgctttttggccatttatagatttgttgaataattgtagagtactcactctgcttagattgtgtaagatttcacattaggatctgtaggacacataaagtagttgaagatttactgtagtwcttgcccttgtagaaagaaggtacagaaaatacttacatgtcaatgttgtctatggcaggtatcatattggaagaaaagtaactgaatactatattgcaacataaaaatgggaaacaccactgaggattaggagaaagaaaagttgtcttgaagacagaccaaataagataaaggtcaaaacttgataattggctgcaatcctgatattcacatcatatttctttttccaggtctttcctgagctaacttcatgattccttctggagtccataagatgacatcctgttagctataactagtgtcatttacaatcaaaagattctaacagtagtaggaagaaacaggggataggaagacaagtcaggaggctattgagtgtttcaagatgatgacagcctagacaaatatggatacattgggaagga

SEQ ID NO: 883775 - DNA, 560 bp, Homo sapiens
tttgtgcacacaagcttcttggtttaatattttctttaacgtcaggttgctatggaataatataaatcagtgaatttccttaatatccaagctagtctaaattggttttaaatatgattaaatgtaaatgaacaacactatcagcaattttttcccctgtaagctgttttacaaaagaatacatagttgtgactgcacaagcacccttcagagacaagaatgaattaaaaatggtagagagttaaaagtggtcaccttagcaaagttgtctgattagactttccactctagttgtttactttgtcaacctttctgcttatgctgctagactgtgattcccagggcaggaaattcagtgactactgataaatgactgttgaatgaataggcctyatttccatatataactatagaaattctaaatttgaatctataacagggaagaaataaaaggaagcagaaatctcaatcacttacttagccaattgatttatcgatctttacccttccacgtatatttttttggttagtatgataacaaaaagtgtatgaagttttgc

SEQ ID NO: 883776 - DNA, 644 bp, Homo sapiens
ggtgttcacattccattagctcattttataccataatgattttttgaattaagcaggaaagtgggaacattactttcattttatttaaaaaaaaaaaaaaaaaagaggagctcagaaaaatcaggcagacttcccaaagttcatctggcaaggtagtagttaaaatgatgttagaatagtggttttatatgctcttcttgctacaccgcaatatactcgaatgttctttttcaccttarcatgacaatgacagtcactctcttaaaccaaaaatgatgactagaacaagaatttagggccagaagcaaccatagtagattcaggcttgtgtcttattggagtttaaacttccaactagaattaatattttggttagtaataaagctataacccaaactccagcctgttactagatgattttcagcctttgggatatgtcccattccaatcaagctgttccttttcctgtcttgaaatgtgctaaccatatttaaacatttagctacaacgacttcaaccagatgctaaattaaatggaaaaatttgggaatttgatatttccctttcccaaatgtctaattttgtacccttgctacacttcttacacttacaattcacttcattttgtacttcacctttgttgt

SEQ ID NO: 883777 - DNA, 668 bp, Homo sapiens
atatagtgttgctggctgttttcgtctttgtttttaataacttggaaaaaagctacacctacccccaacaacaatttctgcgagttagagactggtaatttttaaatctatcatcaaattgtttcacttcataagattacaacgatgtacatgagatgcacataaggcagctgtcttctaccttcaacctccagctcccatcctgaaggcctgtggtagtgagacgttctgcacctaaggccatcttgtcaagaaacattttgctgggtaaataagtaaactacagtatgtgctttcattgtgcgttgttgacttctgcaggyatgatttagaagacattattattaatatcataggtggctaatgtaaatgatggaaaaaccataggtcaataatataatatacacagcacatatttatcaaagctagaaagagtagaaaatagaaaatagagtgcaattttactattaaattatagggcttagaaaatattatgatgcctgactactctcaagaagatttgtcaacaatttctagggaacacatcacatcttgtcaaaatcacaggccttttaataaagaatacgactaaaaacatagtctatgttattcaaaaacccttatataaaatgtacacaatagttatctttttaaaattcagttccaga

SEQ ID NO: 883778 - DNA, 625 bp, Homo sapiens
tgaaaaagaacaaaagtggaggactcacacttaccagttgcaaaacttactaaaaggtacaagattcaaaatggtgtggtgctggaacaagaatagacatctaaatagaatataatcaagactacagaaataaactttcatatttatggtcaattgatttttgacaagggtgtcatgaaaatttaatagagaatgagtagtctgttcaacaratggtatgggtgttggaacaactgtgtatccacataaaaaagaataaagttgtacctttaccatataccctacataaaacctaactaaggtgacatcagtaagatgccagaataggagacaccagcctgctggtatcatctctttcatttccttcaaaaatgtacaattaaattatgatttatgataatcttcctgctctactatcaaatactaggtcttattctttctaactatatttagaaagaagatacccccacaccaactgctacctttcccagcttctagtaaccatctttctacactccatctccatgaattcaactgttttaatatttagctcccacaaatgagtggaaacatgcagagtttggctttttgttcctggcttatttcacttaacatgatgacctcc

SEQ ID NO: 883779 - DNA, 642 bp, Homo sapiens
gggtagggcatggtatgggcaaagtggaactgttcctcttgtctgtttcaatgtggctgttcttagtctttggcttctctgggatgctacaacttcttaactggattctcatgaatgtatttttgtctatacatgcttattaaattggtgtttctctgaggggatcattgctgggacattctatttttttatcttgttgatatcactcaatatttgattacagtacacaaatttccttagtcgatagtccaaggattattttatgactttcttatgaatacaagttcaagagcctggagaatgctttttcctgctcggttctcattttccttattttcacattttaaaggaatggtagaatttatactactagacatctcatgactaattaaatgggttaacaatatataggaaaagttagctgagatgttccrgcttcaacaactcaaatttgtacagtattattttctgttggattgtacaaattattccaagctttagtacattaaattctcatattaaaaactaccaaatttacatagacaactctttcattatgccccttaatatctgagggatgttcagtcacagcctctatttgtgtgttttcacactgctataagacactggtcaagaatgggt

SEQ ID NO: 883780 - DNA, 609 bp, Homo sapiens
agtagacatttaataaatgttaagtatctttcttttgcatatttaccagtactctaattaagccattctattagtgctactggagacatagatgccaatgaactcagttaaaaaattaagcttcctgctagtaatcactatgttatttcctaagtgcttacaaaccatctgattgataatccattcwatagttttgtcatagagccaagcgtatcaaaattttctgagcgatattaccaaaattcattttctttttgcctgtaaaacctcaagccatttgtccattgttattctcctggtacttttttccatcttcaagcttctattgtcactgtctttcctccatacatcttttcactatttctaaaaatcatatccacattcttacactataaatttatcccactgaaattgttcagaaaaatatgccaaaagttcttaaggaatgtcaagaaaaaaatttcaaaaatgctttgagcaatagcagcatctcaggaaaaactttccaatttccccagccttttcctttgatgagaacaagtactcattgaactggatcagtcttgtacattttataagcttacaacttcatttctgtgcatgaatttt

SEQ ID NO: 883781 - DNA, 609 bp, Homo sapiens
agtagacatttaataaatgttaagtatctttcttttgcatatttaccagtactctaattaagccattctattagtgctactggagacatagatgccaatgaactcagttaaaaaattaagcttcctgctagtaatcactatgttatttcctaagtgcttacaaaccatctgattgataatccattctatagttttgtcatagagccaagcgtatcaaaattttctgagcgatattaccaaaattcattttctttttgcctgtaaaacctcaagccatttgtccattgttattctcctggtacttttttccatcttcaagcttctattgtcactgtctttcctccatacatcttttcactatttctaaaaatcatatccacattcttacactataaatttatcccactgaaattgttcagaaaaatatgccaaaagtycttaaggaatgtcaagaaaaaaatttcaaaaatgctttgagcaatagcagcatctcaggaaaaactttccaatttccccagccttttcctttgatgagaacaagtactcattgaactggatcagtcttgtacattttataagcttacaacttcatttctgtgcatgaatttt

SEQ ID NO: 883782 - DNA, 576 bp, Homo sapiens
cgccactgtactccagcctgggtgacagagcacgactctgtctcaaaaaaagaaaagaaaaaaagagaatgggctcagtggttgagtcaaactccaaaagtcagtttcctactacctggcccccacattcaacaactagcttccttccttctttctttccttcctcattccttcctccctaccttttttatttcttaagaataagtacacagaattgagttaaataaaaccccactttgtggcacactatcattatcagtcaaggtagggcctcttgttggctgtatcttactttattatattttcatctttatttcccatctacaatcccacttcccttttcccctccatagacattctctttccaatmcacctttcaaacatctacttagagatatttttaaaatatatggcatgtttcatgttggagtttcaatttaaataaaagcaattaaatctaagtgctatcctgtttctcaagttatttgtattcaatattatatttctgaggtctatccatgttgctaaatgtaaacttaaattattatttttaactgatactgagaatctgatcat

SEQ ID NO: 883783 - DNA, 606 bp, Homo sapiens
gcaaagcaggcaatgtgcatggcatagcatacaataagtgttcaataaatattagctattcttatagtcagtcatctccaaagctacagtagcattataatcctggatttactccaactaaaagaactcatcaaggaggtatattttctccctccaatagatcaccagtgtgtggtccttgtcttacttcttattattttgactacagatcagaatgaaaaccttggtctcctataatgggtactctcccrtgggtgggtgggtagggagtactaaatgaaacctaaaataaagcctgactaagtaaaggaaacatttgaggcaaaagacaagatatgaaaacttcaccaaaacggtctgaaatgacaaagggaaaaagtcccaaccttaatcagggaaagttagttgcatcaataaagaaaaataaccacacacgatacaatcaggcaattgagatcttgatactggaaggccaaaggttgggagtattcaagagcatttccccaagactgacctcagaggaaggactggtttaaaattagcaagatttagaggttttaggttaaatgcatacaaatttccttccctgggccctcataggtgcag

SEQ ID NO: 883784 - DNA, 606 bp, Homo sapiens
gcaaagcaggcaatgtgcatggcatagcatacaataagtgttcaataaatattagctattcttatagtcagtcatctccaaagctacagtagcattataatcctggatttactccaactaaaagaactcatcaaggaggtatattttctccctccaatagatcaccagtgtgtggtccttgtcttacttcttattattttgactacagatcagaatgaaaaccttggtctcctataatgggtactctcccatgggtgggtgggtagggagtactaaatgaaacctaaaataaagcctgactaagtaaaggaaacatttgaggcaaaagacaagatatgaaaacttcaccaaaackgtctgaaatgacaaagggaaaaagtcccaaccttaatcagggaaagttagttgcatcaataaagaaaaataaccacacacgatacaatcaggcaattgagatcttgatactggaaggccaaaggttgggagtattcaagagcatttccccaagactgacctcagaggaaggactggtttaaaattagcaagatttagaggttttaggttaaatgcatacaaatttccttccctgggccctcataggtgcag

SEQ ID NO: 883785 - DNA, 626 bp, Homo sapiens
tgtatgtggctcaaattccatgtctattatagtgctggtctaatccacccactttattttacagatgggaaaagtaaaacacagagaggttaatgaacttggtcaaggtcacacagaggcgtgagagtttggagttctctgtgaagctgagctgcttcacaggtttacagaaaaaatctgaagttccactcatggcaaagaaaacttctgagcggtaggcctctsttgctgggattgaaagcaactgaggctgagcgatctgcaggtgtctgcctgagaacaagggtggcttctcccaccaacgggcttcttagagaaaggagaaacacagaggtggtcagcagtgaggaccatgggcctcaaggcagtgagagcccggctcgggccccaggccgtaactcatatctgaggatcacagagacaggagggagcagacgttgaccctctccttccccaccttcactccccacagcagtaaattagagatcaggtggcgacttgccgagttgatgcaagaatgcagtgtgatgtctgttaccgaccaggtcagaacccagctcaaactgacttaaggaaaaagtgcaacttactggctcctaaaatgcagagggccctggattgaccag

SEQ ID NO: 883786 - DNA, 626 bp, Homo sapiens
tgtatgtggctcaaattccatgtctattatagtgctggtctaatccacccactttattttacagatgggaaaagtaaaacacagagaggttaatgaacttggtcaaggtcacacagaggcgtgagagtttggagttctctgtgaagctgagctgcttcacaggtttacagaaaaaatctgaagttccactcatggcaaagaaaacttctgagcggtaggcctctcttgctgggattgaaagcaactgaggctgagcgatctgcaggtgtctgcctgagaacaagggtggcttctcccaccaacgggcttcttagagaaaggagaaacacagaggtggtcagcagtgaggaccatgggcctcaaggcagtgagagcccggctcgggccccaggccgtaactcatatctgaggatcacagagacaggagggagcagacgttgaccctctccttccccaccttcactscccacagcagtaaattagagatcaggtggcgacttgccgagttgatgcaagaatgcagtgtgatgtctgttaccgaccaggtcagaacccagctcaaactgacttaaggaaaaagtgcaacttactggctcctaaaatgcagagggccctggattgaccag

SEQ ID NO: 883787 - DNA, 605 bp, Homo sapiens
ggaggctgagctccaccgctctgagcagccccttcccccttccctgtgtgtgactgccgggctcctgggtcccagctccctggccagcagtgcgggctgcagaggaagactgatctgggttcgacttatcatcctgttgcctcgcagccacgtggccttgggcaagtcacttcacctttaggagcctcggtttactcatctgtgaaatgggcatcacagagcctccttcaaggcattgctctccagattaaaggggaagctatatagtccctgcacatgagcatccctcgcttctggctgccagtttccgcagcattccctggccggggagcagccatccctgccctctcagactctccctctgcccacmtggaccccacgtgggcatccactcagcatctcacattccccacggcccaggaacatcaccaagtcaggcggggctgagagaatggctcatagcaaaagcagaacgtggagaaaatcagatgcttttcttaaggggagctttctaatgaacgttcttattttactctttaaagctttcaaataaacaataaatataactccattcaaaacacaaattaacttctatgttataatat

SEQ ID NO: 883788 - DNA, 635 bp, Homo sapiens
aacccaaacaaaaccaaaattatctttgtgtaatttttttttgacaaaaagactagattgttggtttaattaaaacagctgaatcttctgagttattggcaaaatgtgtttacgtttaaggttcttgggtgttcacctgctattcagacttttaaaatggttaataaataaataacttatttatttatttatttatttatttatttattttttgagacagggtcttgctstgttgtccaggctggagtacaatggtgcaaacttgcctcactgcaacctcctcttcccaggcttaagtgatcctcccacctcagtctcccaagaagctgaactatggctgtgtaccaccacgtggtaccagctaatttttgtatttttttgtagagatgaagtttctccatgttgctgaggctgaaataaatttaaataatgactagatttgtgtaacatctcagttttcagaagtaatctagataaactgttaaaaatggaaaaaattgagtacatgtaaatgagataaatgcttgtaagtggacttcttgtataatttaaaatcttgacattattttgaattaaataatagatgcttttttggatgtctgggtcatttccaattaagaaaaaaataatgtgtg

SEQ ID NO: 883789 - DNA, 635 bp, Homo sapiens
aacccaaacaaaaccaaaattatctttgtgtaatttttttttgacaaaaagactagattgttggtttaattaaaacagctgaatcttctgagttattggcaaaatgtgtttacgtttaaggttcttgggtgttcacctgctattcagacttttaaaatggttaataaataaataacttatttatttatttatttatttatttatttattttttgagacagggtcttgctgtgttgtccaggctggagtacaatggtgcaaacttgcctcactgcaacctcctcytcccaggcttaagtgatcctcccacctcagtctcccaagaagctgaactatggctgtgtaccaccacgtggtaccagctaatttttgtatttttttgtagagatgaagtttctccatgttgctgaggctgaaataaatttaaataatgactagatttgtgtaacatctcagttttcagaagtaatctagataaactgttaaaaatggaaaaaattgagtacatgtaaatgagataaatgcttgtaagtggacttcttgtataatttaaaatcttgacattattttgaattaaataatagatgcttttttggatgtctgggtcatttccaattaagaaaaaaataatgtgtg

SEQ ID NO: 883790 - DNA, 635 bp, Homo sapiens
aacccaaacaaaaccaaaattatctttgtgtaatttttttttgacaaaaagactagattgttggtttaattaaaacagctgaatcttctgagttattggcaaaatgtgtttacgtttaaggttcttgggtgttcacctgctattcagacttttaaaatggttaataaataaataacttatttatttatttatttatttatttatttattttttgagacagggtcttgctgtgttgtccaggctggagtacaatggtgcaaacttgcctcactgcaacctcctcttcccaggcttaagtgatcctcccacctcagtctcccaagaagctgaactatggstgtgtaccaccacgtggtaccagctaatttttgtatttttttgtagagatgaagtttctccatgttgctgaggctgaaataaatttaaataatgactagatttgtgtaacatctcagttttcagaagtaatctagataaactgttaaaaatggaaaaaattgagtacatgtaaatgagataaatgcttgtaagtggacttcttgtataatttaaaatcttgacattattttgaattaaataatagatgcttttttggatgtctgggtcatttccaattaagaaaaaaataatgtgtg

SEQ ID NO: 883791 - DNA, 635 bp, Homo sapiens
aacccaaacaaaaccaaaattatctttgtgtaatttttttttgacaaaaagactagattgttggtttaattaaaacagctgaatcttctgagttattggcaaaatgtgtttacgtttaaggttcttgggtgttcacctgctattcagacttttaaaatggttaataaataaataacttatttatttatttatttatttatttatttattttttgagacagggtcttgctgtgttgtccaggctggagtacaatggtgcaaacttgcctcactgcaacctcctcttcccaggcttaagtgatcctcccacctcagtctcccaagaagctgaactatggctgtgtaccaccacgtggtaccasctaatttttgtatttttttgtagagatgaagtttctccatgttgctgaggctgaaataaatttaaataatgactagatttgtgtaacatctcagttttcagaagtaatctagataaactgttaaaaatggaaaaaattgagtacatgtaaatgagataaatgcttgtaagtggacttcttgtataatttaaaatcttgacattattttgaattaaataatagatgcttttttggatgtctgggtcatttccaattaagaaaaaaataatgtgtg

SEQ ID NO: 883792 - DNA, 621 bp, Homo sapiens
cacaatgattggactaatttacactcccaccccacctctgagactttagactcctgtgacaaatttactcctccctcctcagttacatgctattgttacctcgcattttagttctttttctaataccacaaattagatgttataatgttattttttaatctgtgatttttgtttttaattatcttaagccttatgatcaaaaaaattgcaaatctgtgctgatggtatatctcctttacctgctaatgagttggcaaaaaaaaagcaccattaccagctgggtgcggtggctcatgcctgtaatcccagcactttgggaggctgaggtgagaggactgcttgagcccaggaggtgcactaaactctttctctattgcaatttccctgtcttgacaaactggctctatctgggcagcaggcaagaagaacccattgggtagttacatcgtttttctttgaatgtccgagtatcccaytgtgtatatataccacgttttctttatctagtcatctgtgatggacaattaggttgattccaaagctttgctattgtgaataatgcttcagtaaacacgggggtgcaggtatcattttgatataatgattttcttgcttttggat

SEQ ID NO: 883793 - DNA, 582 bp, Homo sapiens
ggaagcaggtccaaacaggcctattcttgggcttccacgtggcttgttctggagccagcagtggcagtggtgagctggatgggtgggcaagtcctccgtcccctgggcagtgtgtgatggcagtagcagtggtgggacaaccgttggtctccaaagtggtatgtattgatgttagcagtagctgtgatggagtgtgcagtccactcccaaggactctaggtggcatgtgctggctgtggtgatagtggcaggctgggtgggctcatcctcaggcccccagagggaatgcacagatgccagctatgatggacagggcaagataatmcccaggcccctaggtggtgtgtctgggccctggaggtcactggtgctaggccacgcaggcttgttctcaggccctctggttttatactcaggcactggctgtagtggggtgatctccaggctccctgcagtggagtgctcaggtggctacagcagtggtggcagtggatggtgggagcctgtccctagtatgtgcacaagtatacctcggccctaccgcaattgcggggaggggagggtgtgctcacagtggtttca

SEQ ID NO: 883794 - DNA, 659 bp, Homo sapiens
gccttgctcaattaattttaaaaagaggccacctcatgctaataatgatagctgtggtggtttttacaaaaaagagaaggggggtatgttgggagaaaagctgagtgttgggagagaagctgaggcagggcttgcatgtctgttagacatgctggctccttgcttctagcactcccattatttcaagcagccatatgtttctcattcactcgatacactgtttcctttcaacccccacatcctcaccacctgtttgtttgtttgaacaccaataaatagagtggattcccagagctcaaggccttcgcagcctccaccctcgtgacgccytctggtcccactctgtctctcaaactgtctttttctcattcctttgtctcctctggacttcgttgccccccacgacctggtgttggttctgatcaccccaataggcacagaagacagaagaacagatttcctgttccggaatgatttccagaccaccccacctccaggcttggcacccactgcatggactgcctagctttggcccaacttgttgccctctctcttactccctctttcaagttcctctctaagtcccctttcttaggcaaagggagtgagcgctctccattcctgtgcctaaagcttccagactcaactttgcacagccc

SEQ ID NO: 883795 - DNA, 642 bp, Homo sapiens
gattacaggtgtgagccccacgcccgacaaggtgcatttttatgtgctttttctcctctgtcttctcaacaaccctggggtaaaaggcctcatttccacttttcctatgagaacaataaagtagaaagaggtaaaagactgcctctaagatcacccagcacagagcagggatttgatttcaggtgtgtcttgttccaaacttaatatacygtgctgctgggggaaaacaaagagcaaaaggttcttaactgaagtcaaagacgaccaagaaaatgtaggcagatgtcaggtctgatcatgtggatgctcaaatgataaacagacacattgagagaaattgtattaattaaatcataaaaatatgttccgctttttggggaatttactcctcctcctggggtgacccttgacaagacattctgtcttcctgtttttaagcaaaaaaaaaaaaaaaaagtgggtagaagatgaaagtttgatatttcgctcatgcatagctttgtctccttaatatattttgtgcttgcctgtcatttcagctttctgctggcagacgaagctccttcaactgccattcctacttctgacactcctcttgtccttttcaggacaactttatgcctattgtgccttgggtcttga

SEQ ID NO: 883796 - DNA, 548 bp, Homo sapiens
caagctccacctcccgggttcacgccgttctcctgcttcagccttccgagtagctgggattacaggcgcccgtcaccatgcccggctaattttttgtattttcggtagagaaggggtttcaccgtgttagccaggatggtcttgatctcctgacctcgtgatctgcccgcctcagcctcccaaagtgctgggattacaggcgtgagccaccacacccggctaatttttttgtatttttagtagagaygggatttcaccgtgttagccaggatgggtttcttcaatttataaagggttttggtatacattatattattagatctcttgtttgcttctgagtaaatgtggtgcttcacattcctgtcattttcctattacattatctattgcgatgtgtaaatatttgctgtaaatttctttaatgtgtagatatccaatttaattcttattttcagttatgttctcctgactatagaattattgtgtgtgtgtgtgtgtgcgtgtgtatatatatatctgtgaaaatttctaggttatcttaaactgta

SEQ ID NO: 883797 - DNA, 593 bp, Homo sapiens
ttaagcaaaagtttgctaactgcagaagggttaacactggtaacatactgtggcagacaagtttcttttttaaaaaaacttttgaggttccccccctttaaattaaccctttccggtccatatgccactaagcaggtaccaacctagagraaaaaaaaaaactcatccactcagcaatagtggccctttcaaattaacagaggggtggggtaaggttgagggggaaggaaacagacagggggagaggaagggcctggtagaggaggggatctttcttgtcattcaagttagggcagccacgaatgtcccaaatctgttggagatgtcagaatgcagggaccgccaggtgggcacggaggctcgagccttggcgtcacccacgtcgtctgtgcagtggacagacaggcactgcaagtggctgccaggctgggatgctgaggccttgtttgcagggaggtcgtgggctgtggagagagaaggaagagaggacattagtggcacactcgtctctgagggacaccataatgggggccaaagtggcagaggcatacaagacaggcaccgtccacgccctctttccatggctaaagctg

SEQ ID NO: 883798 - DNA, 689 bp, Homo sapiens
gcaccacagatcacagggatgtctgtgttagacacgcttgaggagaaaggagcctgacaaccattcacatcttagtataaattagaccaaagcagggaatttgcaggacttctcatttacggctaccacatgaccactggctctgtcctgagacctgccatatgtcaatgaagagtctcattattctcatttcctagactctgactttagagtatgtccaaggtcacacagcctggaagggacagaaagctgggtttgaatatgggctgatgttgaatttctgcctcagtagtagtgagaaaagctgaaattgggggtggggggctctrctccagctgagggagcacacccagatactgaactccatgaccggcctgccctcaatcctctgtgcaagcccagccaagggccctgtgccaggcaggagtcaccggcccgccctgccctctgggattaagcaggaggcctcccccaggagctgagccacagcctgcagagaaaatcctcccagagggatgggcccaggcagctgaggacaggccatgactaactgggcttggggcccccaccctggagccccagagacactcagctttgggacctgcatgctgggaggagccggagctgggcagaaaggagacttccttggccccttccctcattcatgcaactaacatgcctttattgag

SEQ ID NO: 883799 - DNA, 599 bp, Homo sapiens
gaccaattacactgagacagcaaggtttgcaacagagaaagagatccatgatcatagggcactgagtgaggagatgggaggagaccctcaaatctatctccccaaggagttctgggctgggttttgtttttgtttttgttttgttttgttttgttttttgagacagagtctcactctgtcaccaaggctggagtgcagtggcactgtgtcggctcacggcaacctctgtctcctgggttcaagcaattctcctgcctcagcctcccgagtagctggcattcaccaccacgctcagctagttacatatatatgtatatatatatatgtatatatatatatatatatatttagtacagacggggtttcaccatattgaccaggctggtcttraacccctgacctcaggtgatctgcctgcctcagcctcccgaagtgctgggattacaggcatgagccaccgtgcccagccctgggctgggttttttacggggatcatggagggtgagggactagagaattggggctgttgattgatcagggaaagggagatgaaatcatcaggatgtgaaaactgcattcttcggcagtcagattctcat

SEQ ID NO: 883800 - DNA, 599 bp, Homo sapiens
gaccaattacactgagacagcaaggtttgcaacagagaaagagatccatgatcatagggcactgagtgaggagatgggaggagaccctcaaatctatctccccaaggagttctgggctgggttttgtttttgtttttgttttgttttgttttgttttttgagacagagtctcactctgtcaccaaggctggagtgcagtggcactgtgtcggctcacggcaacctctgtctcctgggttcaagcaattctcctgcctcagcctcccgagtagctggcattcaccaccacgctcagctagttacatatatatgtatatatatatatgtatatatatatatatatatatttagtacagacggggtttcaccatattgaccaggctggtcttgaacccctgacctcaggtgatctgcctscctcagcctcccgaagtgctgggattacaggcatgagccaccgtgcccagccctgggctgggttttttacggggatcatggagggtgagggactagagaattggggctgttgattgatcagggaaagggagatgaaatcatcaggatgtgaaaactgcattcttcggcagtcagattctcat

SEQ ID NO: 883801 - DNA, 596 bp, Homo sapiens
tcctctgaggtggccattattagcccattgcacagatgagaaaaccaagggcaacggtgaggtcccaggcaagctggtgggcagacgagactttcctgtcctagggggcctgccgccttctccttggctgggtgttacttagtccagaagccatggtaagaaatggcgcccgcagggctcgggcctgtggtacacactcagtgaagatttgttgagtgagtgagtaagagtgagtgagtgggtcagamtgggtcgacatggggccaggccatgtccaaggtcagagactcagagctcccctagcccagctcctctccggggtgctcatggctcttcatggggaggcagaggaagaagcaaaggaagagctgtaggaatcctggctttttaaaagctactactccaacccccagacaagaaaatgggggccccaagcctgacttgatgtattcagtcacaccccgggatggcaggagccaggactggaaatcaggtgtactggcacccatgccagagctcaggcagtggtggtcggagggaaggggtgctgaactcgagtcagaacacttgggccacattctgcctgtcattcatga

SEQ ID NO: 883802 - DNA, 587 bp, Homo sapiens
agcctccaatgtggtctagcacatggtaggtgcatgggaatgaataaatcaatcaaattgcttcatgaaagcaacataatcactcatcaagagcccttttcaccccagcctatcgaaccacatcacccacctgtcttcccaagccttccatcactgttcccttctgtctgcattrctggtgcattcctcctcacaaccccctttcccctttgcacccttgcctctcccttgatgataccacacagatgccagcaccagcttgggagtcccatgggagcaagagccagtggtggcctcctgacccaagttggccacagccctcaaccgctgtgggtcttggggatctttgacttccccctcctggccttgggctcatcactaatgaggggctggggcccacaggggagaagcagtgaccttctctgtgtttgtctggagaatcaggttttccaagtgtttgtgaggcatacatggtccttgtggggctatcttaagaatgaagccctttaaagcagcagtgttctaagaatagccattcttagatgctgactgccatcctcattaataaatgattctgcactgaagcc

SEQ ID NO: 883803 - DNA, 597 bp, Homo sapiens
aatcaatatctgaaagactcataaaggaactgagtgtgtgctaataataaaatgacccaattgtgaattaagcagatatgtttctctccagcagggttaacaaagtggcttgcatccagacccaacactgccatttactaccttaccttctgcaggagaaagcatggaaagtgtgcagaaaaagatacggggtgtggcaagacagaggcatgtcagtttagcagtgacttgtcattggttgtaaaacactatcctataaatgtaggatgtttgagcaataggtccatgccaggtctctctaagaggcaaacatttaagcaacaacctcttgtttaatgagaataaagaaaatctgccacccagaaatagcctttgacccagcaatcccattactgggtatacattcaaaggaatataaatcattctattataaaaatacatgcatgtgtatgctcartgcagcactattcacaatagcaaagacatggaatcaacctaaatgcccatcagtgatagactggataaagaaaatgtggtacatatacaccatggaatactatgcagccataaaaaggaatgcaatcatgtcctttccag

SEQ ID NO: 883804 - DNA, 655 bp, Homo sapiens
gcgagtggcctttgggttgctttcaagctgctaccaaagagaatgccgccatccaataaaggatggatttagagaaaggggtaaatgggcaatctgtgtagcttcctttacttgcatggaattcctaggcaaccctggcatggtcgtctctctctgtggattctctagagggctttggtgacaccagatctccctgaagatttgaccaaacttatagatggactggggcaaaaggagaagctactggtctacctagggttttcttaactcatgcaattatccatctctttgctctttgagactacaaatgtgtacaaatcagacacaactgagttcaaatcttggcttccactgggcaagttatttaatcatgctgagcctctggttttgcttctgtgaaacagaggtgatcagaatgatracaattatcatgatgatgacaatgaggctagtcttaaaggcttagcaaggctctggccaatatctaatggataatacatgtaaaagtacttcagaaagtccataaagctatataaatgttgattgtcactgagattatccaaagactgtaagcttagattcagggattcctttgaaaacttgtggtatggacagtcattgcaagagcacagatgttcagagagacaatggggac

SEQ ID NO: 883805 - DNA, 634 bp, Homo sapiens
tttattcttacatcagttcttatataatctttacattcttgcatcattattctccccattttagaaatggaaaaatagaagttcctcaaaacctgcgtgttgcacaagccagcactgccagtcaagcactctgtctgcaaacactgtgtggtctcctaacacatacatcactgagacacagccaagggaaacttctggggtctcacattttcctctcctatcacacgggctttcgcattttcctctgcaacagaataaaataagaagcagacatgtgtttgcaaaggtcatggaattcaaataaagagcgtgatgcttccttccctcttgcagagagcatataaggaaatatagcgagacggcattcactttgaattcattgccaggtcagttcctgtgctgtgggaaagcccaagacctggagaggaggggagcatccaggaactaaygggctgttcccctagaatggagctgtgtgggtgcagaaagcctcccatgctggaaaacaagcaggaaataatgggcatcaccatttcccgtgaacaatggagaggattggaaaataaatgtatgcagcagagatgaacatttacatggcaaggggcaagtggggcctctacccacaaatgtctcc

SEQ ID NO: 883806 - DNA, 538 bp, Homo sapiens
ctgttccattcttacgggggtcttacttacggggttcttactttcatcatgaaggaaggttactatagcagcacagaaaactgaaagtgatcattgattctcacgagctcagcattgtgatacaagaataggacacttagggcacccaccttaacagaaacaggctttagaatttttcaacgagagcctcctgtcagttggtcccattagaaggtttcactagcttgcaaaattacctgtgtaactgcagtaaacatatggagacattccagccctcctgggcatcaggtctgcctgcatattgtgaagtccatgctagctgacctccagcattggggggggctcattcctgagctccttgtcccaacccttgtctcctttcttgcttmcaattttggctcatgactacgtcccagtttacaaccttatccatctcagatcaaaacctggcacagttgccccattgaagacctggcttctgattcctcacttgtgaggtctccttactcactatcagctgctgcactaactcctgccc

SEQ ID NO: 883807 - DNA, 557 bp, Homo sapiens
gttcttttctgtatcaggaatggaatcattttggtttgtggattttataacatattccaaatttatccatagcagcataatatattgatattaaaaactgtatttatattcaagtccttgtactccctctttttgcctatctttctagcggcagtgagggatgccatcagaacgccatcaggaaagggagtcaaaagaacaaaaaaaaaatcaagaatcaaagtatcagctttgcatccttggatagatgtttatgaatctataacagaagccgtggtatggaagcccatgtatttcaaccctaatcctaacaagggtaatgctaaygctaatgcccttgttgttgaagtatcaaatgtttgcacagaaaaaaaatctccccacctttttttaaaagtctggaagctggcttcagatatcaagaacctagagcataaaccagaaattggaagaatgtatgaaggcataatatccatttttccatgctgcagagctgaaagaattagcaaagtgtccctcagaagggtcccagggccctgactttcaggttgaataag

SEQ ID NO: 883808 - DNA, 650 bp, Homo sapiens
atcacttcagtttctaccttaacaaaccaaaaaaaagaagaatgtcaaacccaaaagtaagcaaaataagggaaataataaagatcagagcataaatcaataaaatagaaaaaagtaatagaatcaatgaaagcaaagctagttatttgtgaaaaattaataaaaatgataaacctctagccataattatcagtaaaggaagatataaattactaatatcatgaaggaaagtgataacatcgctactgatgctatagatattaaaaggttaattagggaatgttattagtaacattaygcaaataaactcaacaacttaggtaaaatggacaaattccctggagaatgcaagctacaaaagctcactcaagaagaaataggttgcccaaatagcccagtatctttaaaaacttgaatttgtaggtaaaaacattccaaaaaagaaaatttcagatccaggtgagttcgctggtaaattctacaaagcatttaaggaagaaataatacaatcaaacacaaatattttcaaagcataggagaagagggaacttcccaatttattctatgaagccagcactagcctgataccaaaatcagacaaaggcattacaataaaattttagatcaatattcctcataaacttagacac

SEQ ID NO: 883809 - DNA, 575 bp, Homo sapiens
ctttggagtggagaccacaaaaccgaaagtaacagttctgttgttaagaggccctgaggcccagctaaggcgtcaaaactttaccctcgaagaagctataagtagaattttttttttttaaaagtcattgattttgaaatatttcattttctgcaagagaatccatatagtgtatatatatatatatatatataaagtaatgaagcaaacaccacattctcaccactggcacaagaaatagagctgcgtcaatgccatagaggccctcagcatgccccagtggcaccccttccctcccgggtccaccagcctgaattttgtgcttgtcatccccaaacagagatgtatccccagggagtgaccgaagccacattgccctccagggaaaccactctggggartgcaaagactgccatgcaggggcaaccatggggaggcctcggccaaagtcaggagtgacgctgcccccaccccagaatggacaacctcttttccatgtcagcctgcagcagcaaaaaggagtgaggaggggcatggctgctgccacccttatccctgaagggccaccacgggcc

SEQ ID NO: 883810 - DNA, 622 bp, Homo sapiens
attactgagctttttggctcccgtaaattttgtacctgaggtgaatgccttatttgtcgtggttttaaaatatgtttgtaaacaactaaattaataaatagcaaataattattgaataaattttctaatgtgtactaagttgagaaacaggctacgtgataggaagtgattgggtgtgtaacttgaatggtaagtaaaacctatctaatgtgatgctatttaggatgtgacccttatgttataaggagccagacaagggacagtttggagaaaagtttgtgaaaacaccacaggtggaaataaacctggaattttytaagaacacaccaaaaaaaaaaaaaaaaaaaaggctattatgtcttaattgtcaaggacatgataggtgactagtaatcaatttggatacagtgctagaaaacattcaaattttagggctttttaagggggtaagtagtttgaattttattccaagtgcccaggaggcaattggaagattttaagcaggggagcaacgtgatccgattgatcttttaaataactctttctggctgctgtgtcaaggatggattataggggtgtgtatggcaaaagagtagaatctggaagaactgtctgtgttccc

SEQ ID NO: 883811 - DNA, 599 bp, Homo sapiens
tcaagcatttctctgcctcagtagctgggattacagtcataggccaccacgcatggctacttttagtatttttagtagagacggggatttgccatgttggtcaggctggtctcgaattcctgacctcaggtgatccaccctcctcggcctcccaaagtgcaggattacaggagagagccaccgcgctaggccaaaattatgtaattcttgaagatccttcctgagtgcaagatcaagttaggacagaggaacagcaaataacaagatggggtgatggacatgactggagggcagttcgaaacctaaagaggatgaacgcagaacgggmaacagagtccgtatgtcgggcgggcgactgcacccgccctttcctacccaggtagggccgcgccctagcacatgggcgtaaacacgctcaaccagagaactgcccctcccgcaaggctcagcgctcggaccgcgcaagcgcacatgccctcctccgcggcccctacaaacagggcaacgcacagggcgtagcccgctccctacagaggctgcgccttagaggaactggcgtagcgtcctggtagacatgctgcagccccgccgtccccggc

SEQ ID NO: 883812 - DNA, 600 bp, Homo sapiens
gatgcgctatatgctttgaaacaaaaagatctcttcagaactcatatgagaacaccactaggggcatagtgctaaaccatgagaaaccacccccatgatccaatcaccttccaggccccacctccagcactggggattacatttcactgttagattttgatgcagacacagatgcaaaccatatcagtagttcttctgtttgtttgtttttttctaaccawtttttaaaattttgctagtatcgtatcacttagatttaactataaggtcactgttacttgaatagtatgtcttccctgtttttgaagtatttaattctgttgtttttttttttaactggcatacatttttaagtaatagtttcaggaagagttatgggaagtatacttgcatatctagaatattttttatttaattttgttttttctatgtgaataagagtttgagccattttttttttcctttagaatttccttgaacttaaattagcttcagtctttatcttatatagatgttaggtttcttgtatatgtgctctaggtcatttatttgtctcttaattttcaatttatttcagtcaccacctcttctaagaatttt

SEQ ID NO: 883813 - DNA, 612 bp, Homo sapiens
agcaatttattggacaggtctagaggtttgcaaaatggattttattccatttatattttggttcttaatcctcctttatgccaaatacttcacatttcaatttggtatttcagaatctatttaaataaatcactagagcttaatggaaaatcaaaatcaaattaaataaatgggctaactattcagctgctaagttttacttcagccattacaaggttaggaaaaaccacggagcaatttataactaacccgactgctcagggagagacctctatatcagctgtcccctcctgagcatacttaacccatctcaaatgacacatggagaaaacatcwgttctttgacaaatacctacacaagaacaatttaaattgcaaacccaaatcaatatcaaacacacatcctgctgcattttaagtagaaataggggagatagcaatgtagaattcattgcaaatcataaaagtttatttaccaagcttaatgctcagaagggaattaaactccttaaaactgagagagtgttatataatgctgagaattaagggagaagtagcaagtctgagttaagaaaccatgttttcctgaacccatcttaaccttcagggtct

SEQ ID NO: 883814 - DNA, 639 bp, Homo sapiens
aaaatgtattgctttctgagggcattttcttccgacagtaaagaatttacagaattgggactgtagtcacctgagaacatcctaacagaaatttttttacagagtgaagtatacctcttccaacattattaataaacaatgtaaattttagggcagcagttgggtgacagagtgcctatgtttgyatcaataccttatgctcatataataatttatggtctatacagtacttaacaggagctaagaatgtgggttttggtattagactacctggttctaattctacctcttccattcactagctatgtgactgtggacaacttatttacatctctgatgattttatttgctcatctgtaaatcaggaattgtaatagcatcaaccttattgtaatttttgaagattaactcagttaatgttttaagtgctttgcgcagtgcttcatagtgtcggtaaatttagttgttattatagtgatcatattagcattaatcaatacagtaaccccctgaggtaggtgaggctcagaaaggatagataaattagatttgtatttttcattttttatttagtgttcttgagaaaaggccatggaacttctaaatttgttttcagattaattttggacacagtctacc

SEQ ID NO: 883815 - DNA, 599 bp, Homo sapiens
agagagatgccatcaaatgcagaaaccatcaaaaaattttgcacactatcacgttcctgaaagtcacatcatgacaaaggcaaaaacaaaaaaaaaggtataacagagagaaaaaaaagcatagaaaaagtggggtaaatgtaagaaaataatatagcaaaaacacgttcaaataagaataattataaaaagtactgcgataaatacataggaagtaaatgtttacaatatacacttataattaagaataaaggttgaatattaaagaataaaaaagataacttaacaaataccaatttttaaaagytgtgtaagcacattataacaaataaaatagtttttgagccctctctgaagagacataaatataaatacataaagaaggttattaccacaaaatgatatatgggacaatccaccagaaagatgaatttgtaaacatgtaagtcccttataacacaatgttaaaataatttaagaaaaacagacagaattccaaggaaaaagctgacaaaatctacaatcatagtggaagatattacatatctctcctactgattaaaaggcaaagcagaaagaatatttaggaaagatacagc

SEQ ID NO: 883816 - DNA, 562 bp, Homo sapiens
cttaaatccacatgttagaaaccaaaaaagactgaaaaacaatgaagtaagcatccagctcaagaagttaaagtataaatctaagtaaaagaaaaatgaaagtagatagaataaaatttttaaaaaaccaattctatagagaggattaacaaaaccaaaatgtttccttgaaataattaaagaattattttttaaaaaccctgaaagaattaagtaaacaaaagaatgctattaacaactttacaatcataattctgaaaaatgtatacaataaaaamtttttggaaaaatataatttaccaaaactgactcatgaagaaatagagaatccaatgacacctacattaaagtattaaatcaataaaaatctatctataaaaaaactcgtaagatacaagtgatttcataggttgattctaccaaacagagaacagatactcttaatctcgtataatggtctagagaaatgaaaaaaagcaaataatccaaaacttgctttacaattttgtaaaaccttgatcctaagactcaaacaaagatagcaagagaagaaatagtgtat

SEQ ID NO: 883817 - DNA, 562 bp, Homo sapiens
cttaaatccacatgttagaaaccaaaaaagactgaaaaacaatgaagtaagcatccagctcaagaagttaaagtataaatctaagtaaaagaaaaatgaaagtagatagaataaaatttttaaaaaaccaattctatagagaggattaacaaaaccaaaatgtttccttgaaataattaaagaattattttttaaaaaccctgaaagaattaagtaaacaaaagaatgctattaacaactttacaatcataattctgaaaaatgtatacaataaaaaatttttggaaaaatataatttaccaaaactgactcatgaagaaatagagaatccaatgacacctacattaaagtattaaatcaataaaaatctatctayaaaaaaactcgtaagatacaagtgatttcataggttgattctaccaaacagagaacagatactcttaatctcgtataatggtctagagaaatgaaaaaaagcaaataatccaaaacttgctttacaattttgtaaaaccttgatcctaagactcaaacaaagatagcaagagaagaaatagtgtat

SEQ ID NO: 883818 - DNA, 616 bp, Homo sapiens
tgttaaaaggactttaaaagattagaaggctgttatatctcaagttgatttttaaaaaaatactaaaaaaaattaagattagagggagggtactcttcatatagggaaacctaggagtgtttaagaatggaagaatgtgaatcatggagaaaaaagaagtccatcacacaataaaaaagaataagtgattactaataaccaattccagctgtggccaaatgaagacagcagttaaggcataagagaagtatctggcctctagaatacaacgtagaaatgatggataaaaacataagaatattttgaaatggaaaggaagggcatcaaaaaacttcacaayggtaattaaaatctgcattaaaagtaatcaagaaacactcaacataaactcaatgtgatctcattcaaaattgcaccagaattattctaaaagttcagctgaaaaaattattgaataagaataaccataaaagatttgacaaggaatatgatgttacagcattagacactgtcatagagaaattaattggaacacaataaagttcagaaatagatacaagtccaaaaaggaatttaatataggataaaagcagtatttcaaatcagtgattaataa

SEQ ID NO: 883819 - DNA, 682 bp, Homo sapiens
attaactgtaaataggcatggcagatctgaatggctaatggaaatgttccaaaaataacttacggtaatagctataccattcagtaaagttacaaaaaaaaaaatcattgacttgtacacttgaaatgagtaaattttgtttgttttctacttgagactgagtcttgttttgtcacccaggttgaagtgcagtggtgtgatcttggctcaatgcaacctccacatcctgggttcaagcgattctcctgcctcagcctcccaagtagctggggttacaggtgcctgctaccatgcctagccaatttttgtacttttagcagagacaggatctcacctaaatgttggccagactggtcttgaactcctgacctcaagtgatcctgctgcctcaccctcccaargtgctgggattataggcgtgagccaccatacccagccatgagtaaattttaaagaaaaaacataactccataaagcaatttaaaaatacttagtgaaaaatgtgttcaatgtgttagcaattattaagataaagtaattttctttgtattatgtgatttataatatcaaatataatcaagatacaaaaataatatattttccaaggacaaacagaacatacaataaaattgttaaatttctgagaattaatgaaaatatataacgataatttcctgaagat

SEQ ID NO: 883820 - DNA, 625 bp, Homo sapiens
tcatactgcttctgttttccttctctcctcttcttgcctctttctatcccttgcctcaatccttatttctacgttcctctttcatctttctcttgccctaaaattcaacctaatgggagagatccactataagcaagtaagtataacatacagtaaatactataatagagatattactataaattattactggagcacaaagaagcactacctgagaaagtcataaaacgctttagaakagatgacacttgagtagggtataaaaaaggaatagaacctctataaatagtaaaagtacatttgaaatagcatggttaaagacagaaataatatacatggcattctataagcactaatgggcaataatcacggcagtcatatttatttacctctgtatcttcaaagtacctaggacagcaccacatagctgacatataaacatctgtggacaaatggatggatggatgaatgaatgaatgaatgtatgtgtattcaggaaagattaagaatataccagaggagctgtaactggagatgaaagcaaggtccaaattgtcaaagaaccttgaatatcatccaaaaatttttgtatttggggagtaacatgattacaagtttgccttgt

SEQ ID NO: 883821 - DNA, 656 bp, Homo sapiens
ttgaggctttagaattatgattctaatgaagttttagactaagaaaaacttattttcctggcaaatctccctacagcaaagcatagtcattcttttgaacaacgaattgtctcaatttttttcattacctattcaatgtgtatggattccttcacaattatctaaatgagaaacggcatggacaatatctaaggtcactgcttcctctcctttactttttcaatgattctttctttcttttcaataagatcttcatgctgagctactatgagtaagattttgaattcaacaccaattgcaggggaatattctggttaaagccaatctgtgatgtcaactacagttttagataagcttatttcaagatttagttcaaacccatcaaaattctgataaatacmaagcagtttcattcaaatctctcagagagacaccatcttcctctcaaattttaatattaggacacctggttctcttcttgaaatgatcaaaacattgtttgctcactctaaaaccatctttcccctactaagcctgatccattttgaagagaagtagcttttgctgaaaacattgaatggttcaatagatttactgtgtatgaacacatacataggcaatcaaagcttcatctaaccttaccagcatatcatgtt

SEQ ID NO: 883822 - DNA, 575 bp, Homo sapiens
tcatcattgatcaagctgacatttacctgatgcagaactgggagcatgtcctggtaatgctggccattcacattcagtgggacagtattcatatttagagggataagacacccagtggtttaagtcctaaagaattatttaagtccagattagaactcttgtttggaagcaaggacacacactccacattttctaatttgaaaaagtcttttgtccccttttctacccagagattgtccataattaaactgtctasagattaaaattcctgtcagtcattttcaaatctccagaaaagatttctttcccttaaaatttctttctactaactttagggtgggtggatgggtggatgggataggttgatggatggatgggtcctcaccaggaacatctttacctaacataatcccacatgtggtttttgcttatgctgttttgtttggtctttggtgaagatgggaataccctgctcaagattttttaaggtgggatcttgttttgtagagaaatataggatgtctttattacccgatgtaatttgtactgtaatttttttctccttctccacacac

SEQ ID NO: 883823 - DNA, 460 bp, Homo sapiens
ctctcaacacacaataagcgagaagagaggctactgaaatacggatgcgtgagctggaattacacactaccttgatgttaacaaggctcatttgcagcaagcaagtgcctatatagggtctgaaatatagacaaaggatggtcccaatcctggaaacagtggaattaaaaggtatggaaaggaacttacccagaaagtaacacttttaaatgttttttcttttcccatagttaaaacaaccagcttagcacttttctttttgagagagaaaaagctttgaatcgtggatgcttctcacagctggctgcaccacgwgcagtgttcaaaaaacaagaacaagctaatcatagagaaccagcagcagctaaacagccctctgcttgcttccaaagggcttataattgagcacagatggtcctagtggagatggggaatgtgtccctgctgactcctcataccc

SEQ ID NO: 883824 - DNA, 529 bp, Homo sapiens
agttatacacacacacacacactcatggaatgaggatgtgtggattccatgtgaatggaatggggaagctaactagcataaggcactattgtaagacctgagaaaattaggaacagctctcttccaaggaatacacctgtgattctcaaactggcagtgttgcaagttgaaccgtgtccccaaaaaagacatattaagtctctaatccctaaaacctcagaacatgattttatgtggaaatagatcattccagatataattacttaggtgaagacaaggttgcactggattcaggtgagcaacatgactagcrtcattttaagaagaaggccacataaaggcagagacacacagggacaacaccttgtgatgacagaggcagagatgcaagtgatgcagttgcaggccaaaggacaccaaggcttgaaaacccctatcaggaagcaagaagaggcaaggaagccctctcccctacaggctgcagtagaagtgtggccctgtcaacaacttgatttcagtattctagccc

SEQ ID NO: 883825 - DNA, 536 bp, Homo sapiens
aagtttccttccaattcattttccaagttagtgctagttatcttcatattgcaaaatgcaaatctgagtttcttaaaacctcaagataaggctggtccttaatgatctaacttccttccttcatccggtccacatttttctttctcttccataagrgtatcagaagactctgcaaactgttttgccaaagtaaaaaataaacacttgttacgttgctgtattaactttacttaacttctctgggtaacattttttaaaaatgtagaataaggttaaactagtgagaatctatgtgtgtgtttgtatatgtgtgtgtgtgtatatagtgcatttacttctattaataatgtaccttatagtttgctacatacatatattgtatttttaaaataatgagaagaatactgagatgttctttaaggtttcttttggctctaagatttctaaggcaaaatttagactttcaaaagccatttgaaatattcagttaaaaaacccaatagatttacttttgaataatttacagtttattcaag

SEQ ID NO: 883826 - DNA, 652 bp, Homo sapiens
cctaggaagatgagtaaagggctcctggaatgccagcaaagttctggttcttgccttggtttttagcaactcgggtgcttactttgtgacaattacatgaaagttttatatattagtgcacttttctgtatttttggtttttggcccaataagtagagatttttwaaaaaagaaacattacgaaagactctttccaaaaaagaataatcaaaatattttttaaagttaagtttgtttttatcatactattaaatttgttttacaaatttataatagtgggttgttggagaatatataatgtgagcatatatgataaaatataaatagtaactttacaggattgacctttcaataacttaacctgtgtatgttaaggctcagatacaaaagtgggtcctctcttacagtctttccttctagacgatgtgaagagatgcttgggaaatattgatgtgatttctgctgttgagaagcttgccattcaaaatcacatacttgaatgaagtgtcttcattccgagacttcctaagacctaatttctgggttgttccagaaaattctgatattaggctataatattcatttagttaagtataaagagaagagttagggaaactttttttgaggtcacttttaggtgctaatttaaaat

SEQ ID NO: 883827 - DNA, 605 bp, Homo sapiens
acttggggcactttcttttcttgcatctctcttcagactcacttgsccctcctgagtctagccaactaacagcactcctcccatccctaatatttcactttaaggaagtttggagcagtgtcattatttgtgatacctgggtatgagaggcatggcaggaaaatatcagcatgttttcagtaagtctttaacagctctgaaaagcctcagcttctttagacttgaaaaaatttttaatcctttttaggtgaatttatgtgactattgttgacatggtcatactagtttatctgtgagtcattgcatacaattgctgttcatttaaaatcttcttcctttattaaagtatagtttttccatatacctttcctctagtaccacaaaggaggaaattgaagtcagtttcatgaaatctcaaatttaggattgtgattctcatgctataactattgttgatttgtgcttcttacctaaaatggaggtaggggatagacaaatttatgcattgttttatttctctacataaacatttgtagttttctgctgtatacataaatccagaattactaaaaatgtttgaaataattttatagttattatccagt

SEQ ID NO: 883828 - DNA, 605 bp, Homo sapiens
acttggggcactttcttttcttgcatctctcttcagactcacttgcccctcctgagtctagccaactaacagcactcctcccatccctaatatttcactttaaggaagtttggagcagtgtcattatttgtgatacctgggtatgagaggcatggcaggaaaatatcagcatgttttcagtaagtctttaacagctctgaaaagcctcagcttctttagacttgaaaaaatttttaatcctttttaggtgaatttatgtgactattgttgacatggtcatactagtttatctgtgagtcattgcatacaattgctgttcatttaaaatcttcttcctttattaaagtatagtttttccatatacctttcctctagtaccacaaaggaggaaattgaagtsagtttcatgaaatctcaaatttaggattgtgattctcatgctataactattgttgatttgtgcttcttacctaaaatggaggtaggggatagacaaatttatgcattgttttatttctctacataaacatttgtagttttctgctgtatacataaatccagaattactaaaaatgtttgaaataattttatagttattatccagt

SEQ ID NO: 883829 - DNA, 595 bp, Homo sapiens
tcttgggaggttgtatgtttccagggatttatccatttcctctagattttctagttttatttgcatagagatattcgtagtagtctctgaggatctttcatatttctatataattggttgtaatgtctggatcatctcactgtttttcttttttaatctagtggcctatcaatgttgtttatcgtttcaaagaaccaacttttggtttcattgattcttcgtatggatttggggtctcagtttccttcagttctactctgatttttagttatttctttttttctgctgcctttcaggttagtttgttcttgtttttctmgttcttctaggtgtgatgttagatcatgaagattttttctatttaggtaggtgtatagcactatgaactttcctcttaatactgcttttgctgcatcccaaagatttttgtatgttgtgtctctgttttcatttattttaaagattttttaaatttctgccttagttttattgtttaccccaaagtcactcagtagcaagttgcttaatttccatgaaattgtgtggttttgagagatcttcttggtattgatttctgtttttatttcactgtgat

SEQ ID NO: 883830 - DNA, 543 bp, Homo sapiens
aagtgggtcatttcaatggttttatcttaatgtttactgagtctctgatttgcctggccaaatctgccattgaacatctccagtaaactttcatttgatctagtgtacttttcactgtcagaatgtctatttggtttctttttataatttctatccctttattgacacttgttctcctgattttctttgtgtgtgtgtgtgttttttctgtccctggtttattttagcttattaatcttacttaagaaagttcattaaacatcyttaactagtaattctaattttggatcttcctcagagattgtttctgtgaaattcttttatcttgagaatgggccatactttcttgtttctttgaaagctttgtaactttttgttgaaaacaacattttgaacactctattgtggtaagtagaaatgagattgtcctactcctcagggatttctcatttttggttagtaggtgctgcagtcatctatttagtgacctccccagactatttttgaaaagtctttattccttcttgtatatagtcagagatg

SEQ ID NO: 883831 - DNA, 655 bp, Homo sapiens
aaaaataagacctaactatatgctgcccccaagagactcacttcacccttaagaacatgtgtagactgaaaatgatggatgggaaaaggtattccacgcaaatataaactaaaagaaagcagaaattcctatatttctatctgataaatggaatacaagtaaaaaattagaaaaagaggcaaacagggccattatgtaatgttaaaggggacagtagagcaaaaggatataacagttgtaaatatatatatatatatatatatayacacacatatatatatatatatatatatatatatatatatatatacccaacatcagagcacttaaatatataaagcaaacattaatagagctaatggaatatattggaatacagtaatagtagggaatttcacctcactttcaacaatggacagatcatccagacagaaaattaacatagaaaaactgaatttaaactgtactctatacccaatggacctaacagacatttatagaacattctgtccaacagcttcagaattcacattcttctcaactgcatatgaaacattctccagaatagatcatatcttaggctacaaaataaggcttaacaaattcaaaaaaagtgaaattatatcaagcgttttttctgactgtaatagaagtt

SEQ ID NO: 883832 - DNA, 582 bp, Homo sapiens
taagctaataaagaatttcagcagtctcagaatatgacatcaacattcattagtagtttgacaggaataacattgaatctctaaccatctgatcttcaacaaagctgacaaaaacaagcaataggaaaaaaaaagccctccctattaaataaatggttctgggataactggctagccataggcagaaaattgaaactggatcttttccttacatatatacaaatcaactcaagatggattaaagagttaaatgtaaaacctcaaactataaaaacccagaagacaaccttggcaataccattctggacataggaatgggcaaatatttcataacgaacamactgaaaacaatcacaatgaaagcaaatattgacaaatgaaatctaattaaactaaggagaatgggagaaaatttttgcaaactatgcatctgacaaaggtctaatattcagcatctctaaggaacttaaacaaatttacaagaaaaacaaaacaaccccatggaaaagcgggcaaacgacatgaacagcacttttcaaaagaagacatacatgcatccaacaagcatgtgaaaaaatgctc

SEQ ID NO: 883833 - DNA, 671 bp, Homo sapiens
gggctattcttggcacttagaaggctgcatggatgtacagggagatctaaaacggcctggcggacattaaaagctgggagtatttgagaattgcctgaaaaccacacacaaattcatcagaaatcggtggatgttttctgttgtttggatatttttgttccccaaatacgctgaaatttgtttccaaatgttggaggtgaggactaatgggaggtgtttgggtcatgggggcagatccctcatgaatagatttattcccaccttggagggggctaagaagattgagttctcaatattacttcccatgagagctggttcttaaaaatagcctagtatctcctcctcctctctcttgcttcctctctcaccatgtgatctctgcacatgccaacttcacatcagcttccgccatgagtggaaacggtatgaggctttcaccagatacctgatcttccagccagcagarttatgagccaaataaatattttttatttataaattacccagccacagatatttctttctagcaacactaacattaagtcagtgctttcctgactcaagttattggagtaaaacctcttaccatcatttgctgaccaatcatttactgaccattaaattgtgtaaacacaagggtgacccctaggaagccaggttaaaaataaaaa

SEQ ID NO: 883834 - DNA, 671 bp, Homo sapiens
gggctattcttggcacttagaaggctgcatggatgtacagggagatctaaaacggcctggcggacattaaaagctgggagtatttgagaattgcctgaaaaccacacacaaattcatcagaaatcggtggatgttttctgttgtttggatatttttgttccccaaatacgctgaaatttgtttccaaatgttggaggtgaggactaatgggaggtgtttgggtcatgggggcagatccctcatgaatagatttattcccaccttggagggggctaagaagattgagttctcaatattacttcccatgagagctggttcttaaaaatagcctagtatctcctcctcctctctcttgcttcctctctcaccatgtgatctctgcacatgccaacttcacatcagcttccgccatgagtggaaacggtatgaggctttcaccagatacctgatcttccagccagcagaattatgagccaaataaatattttttatttataaattacccagccacagatwtttctttctagcaacactaacattaagtcagtgctttcctgactcaagttattggagtaaaacctcttaccatcatttgctgaccaatcatttactgaccattaaattgtgtaaacacaagggtgacccctaggaagccaggttaaaaataaaaa

SEQ ID NO: 883835 - DNA, 603 bp, Homo sapiens
aatacaaagcaaccttgaacaagttaaccttgaacataaactgcctaatgctccagttaaagtataggttggcaaactggatgaaaaaacaagaccatctactgcctacgagaaacccacctaatgtgtaaagacacccagaagctcaaagtaaaagaacacgaaaagatatctcatcaaataaaaaacaaaagggaacacaggttactattcttatatcagataaagcagattttaaatcaaaaacagtaaaaaaaaaaagaaaggcattatataatgataaaatgtttaattccaaaaggtggcttaactatcatatatatatatatatgcatataacaccagagcattcatatttataaaacaaatattactagaactaagaaagtagatagcagccataaagtaatagtagggaacttcagtactctgctgacagcatggacagatcattaagggagaaaaytaacaaactttggacgtaagtggagctcttgactgaatggagctaatagacatacacggaacataccactcaacaaaggcagaatatacatttttctcatctgcttatgtaacattctttaaaattgaccatataat

SEQ ID NO: 883836 - DNA, 589 bp, Homo sapiens
tctacaatgagaattacaaaacactactcaaagaaatcaggaaagacacaaataaattgaaaattattccatgctcacggatagaaagaatcaatatcattaaaacggccacactccttaaagcaattgacagattcaatgctattcctattaaactatcaatgacattcttcacagaagtagaataaacacttaaaaatccacatgaaaccaaaaaggaacctgaatakttaaggcaatcttaagcaaaaagaacaaagctagagccattgttatccaacttcaaactatactacagggctacggaaacaaaaacatcatgccattgctacaaaaacaggcacatagaccaatggaacagaatacagagcgcaaaaataaggctgcacacctataaccacgtgatcttcgacaaagctgacaaaaacaagcaatggggaaaggactcattcactaaatggtggtgggataactgtctagcaatatgcaaaagattgaagctgaactcctctcttacagcatgtaaaatatcaactcaaggtagattaaacacttaaatgtaacacccaaaactataaaagctctggaa

SEQ ID NO: 883837 - DNA, 589 bp, Homo sapiens
tctacaatgagaattacaaaacactactcaaagaaatcaggaaagacacaaataaattgaaaattattccatgctcacggatagaaagaatcaatatcattaaaacggccacactccttaaagcaattgacagattcaatgctattcctattaaactatcaatgacattcttcacagaagtagaataaacacttaaaaatccacatgaaaccaaaaaggaacctgaatatttaaggcaatcttaagcaaaaagaacaaagctagagccattgttatccaacttcaaactatactacagggctacggaaacaaaaacatcatgccattgctacaaaaacaggcacatagaccaatggaacagaatacagagcgcaaaaataaggctgcacacctataaccacgtgatcttcgacaaagctgacaaaaacaagcaatggggaaargactcattcactaaatggtggtgggataactgtctagcaatatgcaaaagattgaagctgaactcctctcttacagcatgtaaaatatcaactcaaggtagattaaacacttaaatgtaacacccaaaactataaaagctctggaa

SEQ ID NO: 883838 - DNA, 589 bp, Homo sapiens
tctacaatgagaattacaaaacactactcaaagaaatcaggaaagacacaaataaattgaaaattattccatgctcacggatagaaagaatcaatatcattaaaacggccacactccttaaagcaattgacagattcaatgctattcctattaaactatcaatgacattcttcacagaagtagaataaacacttaaaaatccacatgaaaccaaaaaggaacctgaatatttaaggcaatcttaagcaaaaagaacaaagctagagccattgttatccaacttcaaactatactacagggctacggaaacaaaaacatcatgccattgctacaaaaacaggcacatagaccaatggaacagaatacagagcgcaaaaataaggctgcacacctataaccacgtgatcttcgacaaagctgacaaaaacaagcaatggggaaaggactcattcamtaaatggtggtgggataactgtctagcaatatgcaaaagattgaagctgaactcctctcttacagcatgtaaaatatcaactcaaggtagattaaacacttaaatgtaacacccaaaactataaaagctctggaa

SEQ ID NO: 883839 - DNA, 581 bp, Homo sapiens
tgtcagcatgacaaacaatcatttaaacaatgggaatgaatgagatagttaataagtgtgtaggaaaagaaaaggtccaagggcagaacttgcacattactagagtggttaattaaagattgagtctcaaatatcatttaactatgtgaatgttcatactattcagttataaattttcttaaagcaatgacacacaaagcagaaataaaatattgcttaaattaarcattccaaaaatcacttgaaatctgatagttattattttccccaaaaaaagtctgtctatctgtatgtatgtgtttacagtttggctatttgactatatgattttatttttattttatatcattcaagtaattctttgtctgaaaattttctcactaccaaaaaaaaaaattcacaaattatgtatgctagtaccatttttccctcatgtgtagttcagatatacttaaaggctgacaccaaaatggaactagatgtataagagatttattgggagaggtagcaggagaagaaggagagaaattttagaccacaattcagatatgacactaatggatgaagagatgaaaggaaaa

SEQ ID NO: 883840 - DNA, 601 bp, Homo sapiens
acgattcacaacaatctgctgttctgcagccactgctgctggtacccaggcaaacagggtctggagtggacctctaacaaactccaacagacctgcagctgagtgtcctgtctgttagaaggaaaactaacaaacagaaaggacatccacaccaaaaacccatctgcacatcaccatcatcaaggaccaaaagtagataaaaccacaaagatggggaaaaaacagagcagaaaaactggaaactctaaaawtcagagcgcctctcctcctccacaggaatgcagctcctcaccagcaatggaacaaagctggacggagaatgactatgacgaggtgagagaagaaggcttcagacgatcaaactactctgagcttcaggaagaaattcaaaccaaaggcaaagaagttgaaaattttgaaaaaaatttagaagaatgtataactagaataaccaatacagagaagtgcttaaaggagctgatggagctgaaagccaagactcgagatctatgtgaagaatgcagaagcctcaggagctgatgtgatcaactggaagaaagggtatcagtgatggaagatgaaatgaatgaaatgaagtgag

SEQ ID NO: 883841 - DNA, 674 bp, Homo sapiens
gttcggctggatataaaattctggattgaaaattctttttttaaagaatgttgaatattggcccccaccttcttttggcttctagggtttctgcagagagatccactgttagtctgatggacttccctttgtaggtgacctgacctttctctctggctgccattaacgttttttccttgttacaaccttcaagaatctgatgattatgtgtcttggagttgatcttctcgaggagtatcttagtggtgttctctgtatttcctgaatttgaatcttggcctgtcttgctaggttggggaagttctcccaaataatatcctgaagtgtgttttccaacttggttcyattctctccatcagtttcaggtacaccaatcaatcataggtttggtcttttcacatagtcccatatttcttggaggctttgtttattcctttttattatttttctgtaatcttgtcttcacactttatttcatcaaggtgatcttcaatctctgatatcctttcttctgcatgatcgattcggctattaatacttgtgtatgcttcacaaagttctcatgctgtgtttttcagctccatcaggtcatttatgtttctctctaaactggttattctagttagcagttcctgtaacctttaatcaaggttcttagcttccttacattgggt

SEQ ID NO: 883842 - DNA, 647 bp, Homo sapiens
cttgaattttacctacttgcacttgcagatctttttagatgcatagattaatgttcttcatcaaactgaggaagttttttgcctttatgtctttttttttttgcttccttctctcctttgtttattcaaattatgtgtatataggtgcacttaattgcatcttacgtttctctgtgtctctgtcgattttttcactccctttctttctgttctttggattgcataaatcctctgattctttcttctgaagctcacatctactgttgaggtcctttagtgattgtattctctttggttattttacttttaaattccaaattttctatttcattctttttataatttatttttctttatctatattctatatttgaaagataattgtcgttatacttttctttaattatttaaagatagtttcctttagtgtttttgaagttattwtacctgctttgaagtcttttactgataagtttggaacctggagcctctcacaggcagtttacattggctgcttttgtgtgtgtatttgggccatagtttcctatatctttgtataagacattaaaagaaatctattttctaaaaggtccagttttcagcaaaacaggatctttcagagaatactttgtagcagctccggatat

SEQ ID NO: 883843 - DNA, 648 bp, Homo sapiens
gggttaagtgtcccaattaaaagatacagactggcgaattggacaaagattcaagacctgttggtgtgctgtgttcaggagacccatctcacgtgcaaagacccacataggctcaaaataaaaggatggaggaatatttactgagcaaaaggaaagcaacaaaagcaggggtttcaatcctagtctctgataaaacagactttaaacaaacaaagagcaaaaaagacaaagggggacattacataatggtaaagggatcaaagcagcaagaagacctaactatcctaaatatatatgtacccaatacaggaggacccagattcataaagcaagttcttagagaccttcagagagacttagactcccacacaacaataatgggagactttaacactgcaccatcagtattagacagatcaacaagacagaaaattaacaaggatattcaggacttgaactcagctctgraccaagcagaactaatagacatctacagaactctccaccctaatcaacagaatatacattcttctcagcaccacatcgcacttattctaaaatagaccacataattaaaaataaaacactccttagcaaacacaaaagaatagaaatcataatagtctctcagaccacagtgcaatcaaa

SEQ ID NO: 883844 - DNA, 609 bp, Homo sapiens
ggagtggtgagagagggcatccttgtcttgtgcccgttttcaaagggaatgcttccggttttgcccattcagtatgatattggctgtggatttgtcataaatagctcttattattttgagatacgtcttcaggacataggcattggcaaggacttcttgactaagacaccaaaagcaatggcaacagaagtcaaaattgacaaatgggatctaattaaactaaagagcttctgcacagcaaaagaaactgccwtcagagtgaacaggcaacctacagaatgggagaatatttttacaatctcctcatctgacaaagggctaatatccagaatctacaatgaactcaaacaaatttacaagaaaaaaatcaaacaaccccatcaaaaagtgggaaaaggatatgaacagacacttctcaaaagaagacatttatgcagccaacagacatatgaaaaaatgctcatcaccactggccatcagagaaatgcaagtcaaaaccacaatgaaataccatctcacaccagttagaatagcgatcattaaaaagtcgggaaacaacagatgctggaaaggatgtggagaaataggaacacttttgcactgttggtg

SEQ ID NO: 883845 - DNA, 644 bp, Homo sapiens
cctctctctgctactaccacaccccttttcttacaacaaatttatattctgtctttaaaatccagatgtagtgttacttcgactgctaatactttggcaaaattacttttccctctgtggaacccacagtactgttcrtaaagtacttacttcgttggattctaagttttctgattttgtttctgtcttctagacagtgaacaacttgagtgcagggaccctgtcattcatccttgtgtcctcagcacatgacaatgcctgactcattgccatgcatcacctgcataaccctgctcctctggccacagtagactcgtcctagggtggggacaggcccctgacccactttgaaattgagatccataatgagttttaaatttgctgggtggctgatacgtaccatgaaacctctttagctataggcagccatattttccactaggtggacagtagagcagagaaaatctgtttgtaaagaaagaaaaaacagagatgagagacacagaactgccaggtgaacctagaattggtttctgagagctttctaattctaatgatactggaggtccagtatcattcctgccctgagggtttgtgatacactcctgtatccttataatcaaatctcctgctttgatgttcag

SEQ ID NO: 883846 - DNA, 660 bp, Homo sapiens
aaccaacattgggaggagcctggtttacagtttatagtccaaaacaaaggtgataacaacgccttcctaagacagcttcccttttgcctggggaacagaccaagaaactctccacaagattagaaaccgtggcttaggaataacgtaggtggaggctgcaagattttgactctcccttaactactctcaagatcagtgcttaaggtattttgtaaaccctgcctttgatggattagctggcccctcccctattgataaactggcttatctgattttatggtcctcacccaaggaactgacttagcacaagaagacagccaccattgtaaaatggcagagactaaaataaagtattgccacgtggttacaggtcattttgccaagaacatgtaacaagatggagacctgttgacgtgtttgttattgactattttgttgggctggcttgaacagcaggtttatggagtcctacrcctgtatcctaacctaaggtatcctttcttttgacagaaccatacagaaagacacacaaagtacaccagattggctacagcttaagaacaaccttgcaaatactttttcatcaattaaaacttaagaatataaacaatgatccttattatttcttttaccagttttcacagggagagagaaacaaaa

SEQ ID NO: 883847 - DNA, 591 bp, Homo sapiens
aacaaaaacagctggtgaatcctgcaccagcaactgaggtatccaggctctctcactgggattgactagacagagttagtgcaaaccatggagaccaaggaaatgcagggtggtataatggcccacttgggagacacatggagcaaggggatctcccacccctagccaagggtggcagtgagtgattgtgctatgctgcctggaagatcacactatttycatggatccatgcaacccagagatcaggagatcccccttgtgagcccatgcaaagagccttggatcccaagcacagagctgggcaggttctcagtggccactcagttggagactgcctaagactactgagctcctgggggaggggaagccatcattactgtggctgcctgctgcctaagatgactttgcttctgggggaaggggcagtggccatcactgcagctccagtctgctgttttttcctgctggtgccaggaagatagacactttggatccaggaggaattctccataatgtagcacagtggttgtggcagattgtggccagactgcctctttaggacagaccctggctcatccctcctcactggag

SEQ ID NO: 883848 - DNA, 640 bp, Homo sapiens
caggtctatgcaaagcctattgaagcctaggttctggactggtacatttttatttctgtttcattttgttgaccaaagaaagtcacaaaaccagtccagttttagtgagtgtggtggaattacatcacttgaagaaaatgagacaaaattacctgccaagggcatagacaaagagagggctagaaaagtaggcgcttttatttggcaatcaatctctctcaatattagattaagacattcttttttttttttttttttttttttctgagacacagtcttgctttgtcgcccaggctggagtgcagtggcgagatctctgctcactgcaagctccgccttcacgccattctcctgcctcagcctcccgagtagctgggactacaggcrcccgccaccacgcccggctaattttttgtatttttagtagagatggggtttcaccatgttagccaggatggtctcaatctcctgacctcgtgatctgcctgccttggcctcccaaagtgctgggattacaggcgtgagccaccgtgcctggtcagattaagacattcttaaaagcaaaaacctttttccctgatgtcaatcaggaggaaaaggaacacctcatttagaatgttcttgaaagcagttaatccaa

SEQ ID NO: 883849 - DNA, 623 bp, Homo sapiens
tttcctgctttctcttgtgcgcatttagtgctataaatttccctctacacactgttttaaatgtgtcccagcgattctggtatgttgtgtctttgttcttgttggtttcaaagaacatctttatttctgccttcatttcattatgtacccagtaatcattcaggagcaggttgttcagtttccacgtagttgtgcagttttgagtgagtttcttaatctcgakttctagtttgattgcactgtggtctgagagacaggttgttataatttctgttcttttacatttgctgaggagtgctttacttccaactatgtggtcaattttggagtaagtgtggtgtggtgctgagaagaatgtatattctgttgatttggggtggagagttctgtagatgtctattaggtctgcttggtgcagagctgagttcaattcctggatatccctgttaactttctgtcttgttgatctgtctaatgttgacagtggggtgttaaattctcccattattattgtgtgggagtctaagtctctttgtaggtctctaaggacttgctttatgaatctgggtgctcctgtattggatgcgtatatatttaagatatttagctcttcttgttgaatt

SEQ ID NO: 883850 - DNA, 571 bp, Homo sapiens
tgctatctgtttattcaattctgagctattctagcaccagtgtaaggagagagggcacaaacacattacgttgagcctaggcaccatttgtgttccccagtgttttcagactcactccttccagtttccttcccttttagctgagttgtatgtaggtacaagtgctgtgagggaaaagctacctccccatcctgctgcagtggaagagagaaagagtgaggtggaatggggctattccttttawctgggtcacttttttctcagataattgaatggttcccttccttagctcctttatttcctagagtgagtgactgccctggtttgcctataaccaagggattgcccagggcatgagattttcagtgccaaaaccaagacagtgctgggaaaaccaggtggttgatcactccagttgcttaattgtctacttaacggagggcttcccctgaccagccactctgtctaaaataatgcacactcccttccccacaatctcttttgttttaccttactttatttttccacttcagctctgtttgtttgcttattttcagtctccctggttgca

SEQ ID NO: 883851 - DNA, 591 bp, Homo sapiens
tgtgaccacttgtgtctgttggggcgacagtggtgtagtcatctgggaaacagagctttaccctaaggaagcatatgagctagactgttggaggaaatggggcattctctttaacattatgaggaataggtgcagaggaaaaaatcaaggtatgtgatgaaaaggaaataaatcatgctattaggctagtgggcctttgtgagccaggctagggtttgggagttggacaatgagcattcaaagattgtcggtgggaaagaagttggatagatcagttgagacyagttgaggaagagcttcaaagcccccagagaacattatacttatggtgaaagaatgaaaactttctctcacaggtcaggaacagacaagcatgcccactttcacttctattcaacattgtactctggtttctacctcaagcaatcaggcaagaaaaagaaataaaaggcaaccagactggagagaaggaagtaaagctgtttctattcacataaaaaatgatcatgtatatagaaaattgtaaggaattcactaaaaacctattagcactaataaatcaaggttgtaggatacaagttaaatttacaa

SEQ ID NO: 883852 - DNA, 608 bp, Homo sapiens
ttctatcctaagtgccaatcattggctttttggtatctcattatgcagaataccaaagataaaacaaaacaaaacaattctacaagagaatgactattagattgacaatggaggctcaaataaaatggaatgatagcttcaaagtgatgaggaaaaatatcttctaccctgaagcctatgcttagctaaacaatcattaagaagtgagagtgaacaaaatgcattttcagacaaacaagactaaaagcagtttcctttcaaagacccttgctgaaaggcaacaaaaatatctacttcagaaaggaaaaaataataatttcagaataaaagtataggacaaaacaaacaatggtgagcatmgaaactgaaaaacacgtttacaaatttaaaaagcactgagtataaaaataaacaatagtgatagttgaggatgatttaataacaaagttaatacactagacaacaagatggaagaaggggtgatgacgagtatttgttttcttgcattgtttagaaaaatacagagtgattgatgttagacttcgttgtaacatttatctataaacatttaaggggtcacatactgatttaaatctttttaagttact

SEQ ID NO: 883853 - DNA, 608 bp, Homo sapiens
ttctatcctaagtgccaatcattggctttttggtatctcattatgcagaataccaaagataaaacaaaacaaaacaattctacaagagaatgactattagattgacaatggaggctcaaataaaatggaatgatagcttcaaagtgatgaggaaaaatatcttctaccctgaagcctatgcttagctaaacaatcattaagaagtgagagtgaacaaaatgcattttcagacaaacaagactaaaagcagtttcctttcaaagacccttgctgaaaggcaacaaaaatatctacttcagaaaggaaaaaataataatttcagaataaaagtataggacaaaacaaacaatggtgagcatcgaaactgaaaaacacgtttacaaatttaaaaagcactgagtataaaaataaacaatagtgatagttgaggatgatttaataacaaagttaatacastagacaacaagatggaagaaggggtgatgacgagtatttgttttcttgcattgtttagaaaaatacagagtgattgatgttagacttcgttgtaacatttatctataaacatttaaggggtcacatactgatttaaatctttttaagttact

SEQ ID NO: 883854 - DNA, 657 bp, Homo sapiens
acaggagcatgccccctggcattaggtcgctgtcactctggaaaagaggtccaagatgaaggagcaggcagccatctttgctgttctgcagcccccactggtgacacctccaggtgagggtatttgtcaccaccaggcctgccttgcaacagctcctgaaggaagcactaaatatggaaagggaaaaccactaccagcccctagaaaaacacactgaagtacaaaaaccaatgacactatgaagcaacyacataaacaagtctgcaaaataactagttagagtcatgatgacaggatcagattcaaacataacaatattagccttaaatgtaaatgggctaaatgccccaattaagtgacacagaatggcaagctgggtaaagagtcaagacccatcagtgtgctgtattcaagagacccatctcatgtgcaaagacacacataggctcaaaataaagggatggaagaaaatttacaaagcaaatggaaagcagcaaaaagcaaggactgcaatcctagtttatgacaaaacagattttaaaccaacaaagataaaaaaagacaaagaagggtattacataatggtaaagggatcaattcaacaagaaaagctgactgtcctaaatatatatgcacccaataggggagtactcagat

SEQ ID NO: 883855 - DNA, 656 bp, Homo sapiens
agtgttgtttccctccctgtgtccatgtgttcaacttattgttcaacttccacttacgagaacatgtggtgtttggttttctgttcctgtgttagtttgctgaggatgatggcttccaatctcatctatgtcgctgcaaagaacatgatctcattcctttttatggctgcacagtattccatggtgtatatgtaccacatttctttatttgtccagtctatcattgatgggcatttgggttggttccatgtctttgctattgtaaatagtgctgcaataagtatatgtggccatttgtcttacagtagaatgatttatattcctttgggtatatacccagtaatgagattgctgggtcaaagatccaagattctagatccttaaggaatcgtcacattgtcttccacaatggttgaactaacttctatacccaccaacagtgtaaaagcrttcctattcctccacagcatcgccagcatctattgtttcttgactttttaataactgccatttttgactgatgtgagatgctatgtcactgtggttttgatttgcatttctctaacgatcagtgatgttgagctttttttcatgtgtttgctggccgtataaatgtcctcttttgagaagtgtctgctcatatccttcgcccactt

SEQ ID NO: 883856 - DNA, 666 bp, Homo sapiens
tctcttacatcatacacaaaaataaaatcaaaatggattaaagacctaaatctaagacctgctaaattcaactactagaagaaaacattgggggaaacgctctaggacattggtctgggcaaagattttttgtgtaagacctcaaaagcacgggtgaccaaagcaaaattaggcaattgggattacctcaagctaaaaagctttgcaaagcaaaggaaacaatcaacaaagtgaagagacagaccacagaatgggagaaaatatttgcaagctatccatttgacaagggattaattatcagaatatataaggagctcaactcaataggaaaaaaacgaataatttgatataaaaatgggcaaaagatccgaacaaatatttctcaaaagaaaacatacaaatggccaacaggtatatgaaaaaattctcaacatcaccaatcatcagacaaatacaaatcaaaactacaaygagataccatctcaccctagttaaaatggcttttatgaaaaagacaagcaataacagatgctggcaaggatatggagaaggggaactcttgaacactgttggtgggaatgcaaattagtacagccactatggagaacagtatggaggttcttcaaaaaactgaaaatagaactaccatatgatctagcaattcca

SEQ ID NO: 883857 - DNA, 614 bp, Homo sapiens
aaattgttcatggatcattaagaaagctttagagaattttggtcccagtcctgtttagccatcattttgcagagttgtatgactttgggagaaagataaaaaagttgaagaattatgtcaaacttttagtgactatgtgaaatcttagcatatcaaaagtaggtaaaataattaaatgaacaattatttaccaaatgataccaatatgagtattggtatcgtgggagattaaaaaacatgatgcttattttctaagagactamaatatacttgggaagttataacttgaaattaaacagttatgagtggaagaaactaggctttgtcaacaggtgaatctgggttccaggtctggtctcccctcctctctgataggtctatgatcttgggcaggttacttgacttttctgtgagccagtttcttcatttgtaaacggagcctaagaatcctcccttatgcacaaggctcaatttgaaaagtaaataagataacacacataaagaagctgtttgccacaaggcctggcacacagtgagccctcaaaaaagtgaactcctgaaaattgccacaactcctattaataactcaatctgtgcatttaaaattttctgaa

SEQ ID NO: 883858 - DNA, 633 bp, Homo sapiens
atgttttatttgattcacttcgttaagcttagaatccaaagtctactactagtaaaacccagatttgcccttgagcatttcaaggttataggatgcctggtcttcctgttaggatgctatacattcaactttgacacctatgttttctcttgcagtaaatgggataccaytattttgtagtttgcaactaggggggaagttaaactacccagtttggacattttcctaatttggggtgattggccaaacttgtagtaaaaggctgaattcttatcattaggtcatttagttcttaaatgaagattttttttttaatgtagcaagatataataaggctgactaactggatagagtccattaacatatatggaattgagatatatatatacatcttggttgcacacatacacgcagaaatagaactgttttctcacaagatgacaaaaggctatactacgtatcacattcagtattggacagagagagtaaaagcaggaatgcataagaactgatttttttttctttttctttttttagtcacctggtgggccatttaaacattttatttatttattttttaatttttattttactttaagttctgggatgcatgcgctgaatgtgcagatttgt

SEQ ID NO: 883859 - DNA, 633 bp, Homo sapiens
ttactctgattatttcttttgctgtgaagaagtttttaaattttatcaggtcttatttatttttgtttttgttgcatttgcctttgggggtcttagtcattaattttttgcttaggcaattatccagaagatttttttcaaggttatcttgyagaatttttctagaattcaggacttagatttaagtatttgtttgattttgtgttggttttttataaggtgagagataaagatctacatttactcttctccatatggctagacagtcctaccagcgccatttattaaatagagcctccttttcctaatttctgtttttgtatactttctcaaagatcagttatttgtaagtatttggcttcatttctgagttctctattctgttgcaaaggtgtatctgcctactgttctgccagtaccatgctgttttggtaactatacactagagtagtataacttaagttctggtaatgtgataccttcagatttgttctttttactcaggattgctttggctacttgggctctttttttattccttatgaattttaggatagtttttttcctatttttatgaaaaatggtgttggtattttgatgggaattgcattgaatctgtagattgctttgggc

SEQ ID NO: 883860 - DNA, 633 bp, Homo sapiens
ttactctgattatttcttttgctgtgaagaagtttttaaattttatcaggtcttatttatttttgtttttgttgcatttgcctttgggggtcttagtcattaattttttgcttaggcaattatccagaagatttttttcaaggttatcttgcagaatttttctagaattcaggacttagatttaagtatttgtttgattttgtgttggttttttataaggtgagagataaagatctacatttactcttctccatatggctagacagtcctaccagcgccatttattaaatagagcctccttttcctaatttctgtttttgtatactttctcaaagatcagttatttgtaagtatttggcttcatttctgagttctctattctgttgcaaaggtrtatctgcctactgttctgccagtaccatgctgttttggtaactatacactagagtagtataacttaagttctggtaatgtgataccttcagatttgttctttttactcaggattgctttggctacttgggctctttttttattccttatgaattttaggatagtttttttcctatttttatgaaaaatggtgttggtattttgatgggaattgcattgaatctgtagattgctttgggc

SEQ ID NO: 883861 - DNA, 652 bp, Homo sapiens
agaaaaggtaatagaaatataggcaattgtccatatttcttgcataggttgatggacattattaagcagtagagaactcttttttccaataatccaaacattttattacacttgattaggaaatggctcattaatgatctcactttatatcatataattggtagatactcgatttgagaatggcataacatatatacactcccaaatgaattaccactcattttattcaaaagtttatcatattttataaaggcatgatgtgcattctgcctcttggaattctatgttctagatgtattctatacatcaccttcattctattgtttcaaatccaagcatactatcaaaatatcccttagaattcccttaaaaaacattttgaaaatgtgaagctgcatctttggaatgaaagcttgaaatacttaaatgtaagtcaatcattgaacatgtggayttttgctaaacttacttaatagtttttcatatttagaagtcttaaccattaaacaaaataggcacccatttgtaatggcccagcagactaattactttagaaaacagtcttctaaaatccctctcccatctgtaccacaacccagggtcaatttatttaccaggttttaatcgctagactatataaggctaaattgga

SEQ ID NO: 883862 - DNA, 651 bp, Homo sapiens
cctattggacaaggccttctaccattatataatatccctctgtgtctcttttaactgctgttgctttaaagtttgttttgtctgatataagaatagctacacctactcacttttggtgtccatttgcatgaaatgactttttccacccctttactttaagtttatgtgagttcttatgtgttaggtgagtctcctgaaggtggcagatagttggttggtgagtttttatacattctacagttctgtatcttttaagtggaacatttaagtcatttatattcaattttagtattgaaatgtgagggaccattgcattcattgctctctttattgactgtgtactttggctttttggtttttgtttttgccttttaacttgtatttttgttttataggtcctgtgtgatttaagctttaaagaggttctgttttgatgtgttwccaggatttgtttcaagatttagagctccttttagcagttcttgtagtggtggcttggtagtggcaaattctcttagcatttgtttgtctgaaaaagactgtatctttccttcatacatgatacttagttttgctggatacaaaattcttggctgataattgttttgtttgaggaggctgaagatagggccccaatcccttctagcttat

SEQ ID NO: 883863 - DNA, 595 bp, Homo sapiens
aacacaaaacaagctacatagtatgaagtaaaacagagcagaccagaataaaaattaaacaggattacaaggtataatgcatcacttccaggctcagttagtatcttagaaggatcattttgatcctttgagtcccattgacctcattggaaaatgggagtaatattactttctcacagggttattttgaggttcaaatggaatgataaatgtgagaaagatttggcaattttgttattgaaacaaagcaccataaatatgcactgagttaaattattcaaatgctttaaggactcggaattttctcttctaaagctatgagtcaagtttctttaaatgtatcagttaacagctgtttccctattaaagrcaaaagtctggtctgcgtttgaaagaaaaaataaaacatatggaaattctgatataatataccaatattagcataaatatataaagagtaaaatccaacattttatgtatcatttcttttgtttttttgttgttgtttttcagtctataagagctagtatacatccccacctatagttaaaatgcatgcctaaaatttaaaaatctgttttagtctcttcaagta

SEQ ID NO: 883864 - DNA, 591 bp, Homo sapiens
actgagcttcatagggatctgcttggattctaaggctctcactttatgtcgctattttctatttcatggcatgccttaatgagttgattcaggaccagaattattggggaaaatgttattaatatcaactggttcctataaatattttttgtttaatccyaattcttcatattaggagacaaagaatatgacattcattcatttattcttgcattcatgaaacattttatgcatctctacatttcaaaaactgtggtaatcagtgaaagcaagatataaagattaataggatagcatctatgttcatcacaaattacagcttataaagaaaaatagtatatcttggtgtcatagtataatgctttacttctcaaactagggtttggggacgtagtctcaagcttctgagcttactctatgagactgtgagtattcatatttgtgttattttttccaggacttaataaatactgtcagtctactgtgggtcatctagaggattaccatattcataacatatgttgcaatgttgtaacttgacatttcagagcccagatttctgtttctgttttgaaggatgtcggtgccagg

SEQ ID NO: 883865 - DNA, 638 bp, Homo sapiens
aaagggtataattggatggtttgccactcaatcaatggataaattcttgagggggtggatatcccattcttcatgatttgcttatttcacattgcatgcctgtatcaaaacatctcctataccccataaatacatacacctactaattatccacaaaaattaaaaataatgagaaaaaaagataaaaaaggcattatataatgataaaaaatcaatccaatgagaaggtattacaatccataactatatgcatctaacattgtagcttccagattcataaaaccattactaatagactgaagaaataaaatagrcagtaaacccaataatagtgggggacatcaatactccactggcagcactaaacaggtcatcaagacaaaagtcaacaaagaaatgatgcatttaaatgacactcttgaaaaaattgacttaacagatatttaaataacattctacccgcaaactgaagaatatactttattgtcatctgcacatggaacattctccaagacagaccatatgacaggccacaaaacaaatctcaatcatttttataaaagttgaaatcatatcaaaaattttctcagactacagtggaataaaactagaaatcaactccaaaagaagccttcacc

SEQ ID NO: 883866 - DNA, 638 bp, Homo sapiens
aaagggtataattggatggtttgccactcaatcaatggataaattcttgagggggtggatatcccattcttcatgatttgcttatttcacattgcatgcctgtatcaaaacatctcctataccccataaatacatacacctactaattatccacaaaaattaaaaataatgagaaaaaaagataaaaaaggcattatataatgataaaaaatcaatccaatgagaaggtattacaatccataactatatgcatctaacattgtagcttccagattcataaaaccattactaatagactgaagaaataaaatagacagtaaacccaataatagtgggggacatcaatactccactggcagcactaaacaggtcatcaagacaaaagtcaacaaagaaatgatgcatttaaatgacactcttgaaaaaattgacttaacagatatttaaataacattctacccrcaaactgaagaatatactttattgtcatctgcacatggaacattctccaagacagaccatatgacaggccacaaaacaaatctcaatcatttttataaaagttgaaatcatatcaaaaattttctcagactacagtggaataaaactagaaatcaactccaaaagaagccttcacc

SEQ ID NO: 883867 - DNA, 626 bp, Homo sapiens
aatgcctacatcaaaaagtctgaaggatcacaaataaacaacctaatgtcacacctgaataaatcagaaaaacaagaacaaactaaacctaaagctagcagaagaaaagaaataacacagatcagagcagaacttaataaaattgaaaaaaaacaaacaaaaaawgttacaaaaaaatcaatgaaatgaaaagctggttctttaaaaagataaacaaaactaggagaccattagctagtttaacctagaaaagaagagagacgattcaagtaaggttcattagaaatgataatggagtcattacaataaacaccacaggaatacaaaagatcatttgagactactatgaacacctttatgtccacaaactagacaacctaaaggaaatggatatattcctggacatataaaatcctcctacattatatcgggcagaaataaaaaccttgaaaatatgaataacaaccaacaaaattgaaacagtaataaagatattgccaacataaaaaccccaggacaagttaaattcacaactgagttctactagttattcaaagaagaattggtaccaatcctacgaaaattattccaaaaaactgagaagagggaattctccccaaatcatt

SEQ ID NO: 883868 - DNA, 595 bp, Homo sapiens
aatgacactccttgatcattagcttcacaagtgcctgaagtgtctgacttttctgaacagtgcttctttgcaatgttttattgaacacacatcctctccaaaataataatgagggcttctagtgcctccaaagtctaacttcaaatctgttcacttacgtctctatgattgccacataggacaagaggcagaagtaattttaattagtttagcacatcataaaaatttttcctgtgtagtgtctgtactagtaaacaagaaaaaaagaaagatgtgttgaatggaggaaaggttacctcccctgatgtaatgattttctgcatgagctcgttagaccatttcttaagttggctctgtgactcttaaatccattctccatgcaaataccaraaatatttcttctaaagcacatcagactgtaattcctcttcaccagaaacttccatggcactctgttcagtcaacagttttataggaatgagagaccatagtggctgcagcagtgataatagtagcatcagctgcggctccttgacctctggattgcagtgatggtgataggtccttgaaatcaatagtccagtggcaaacatcc

SEQ ID NO: 883869 - DNA, 571 bp, Homo sapiens
atttgggttctctgtgcctctgggtcagatctttcacaaggtcaagggtctgtggtgtcagctgggcacacagcccagggcacacacatccagacagtgattagctcaagtttgcctgcggaggctgcgaggaggagatggctagagaagaattgcaattaagagcacccactgagtacatatatacacactagcatatattagcccaagcagaaagaaggtatattggggggaaaagttatgggagcaaagcaggagggccaggcctcgtttcataggctggggctgtggttggggttgacaggaggactcaggcggtggtacccgggagatccctggtagaggatgtggccttggtgtataagctagtggccaacaggagcaccatggccgttgctagcacctgtggtgcyaataagaaaaaggttgtctcctctgaggacaccagtgagaaaaagtcaccctttttgcggggaggacagggttaggcacagccttgtacaaggacacatagcttgggcagcagaacttgggctggatttcagccctcactggtgccctttgggccagt

SEQ ID NO: 883870 - DNA, 657 bp, Homo sapiens
ggagtggcggctgagctccccaccatggccactgccgtctggccctgcagggtccatcccagctgcagcccttagtaagaatctggtggggccgccctagtgctcctttatcccaccctctgggggcagggccaaagggaggaggcgatttgcagccaggcccgccccatcccatggccccaggcctgctggtgggrggcatggagggcccagccatgatggctggggagctgggggctcagggtgtccaatccaggctccagggctgtgggtggggtataaaagccctcaaggatgtttaggtaattattggaggaaattgggggatggtttaaggactttaacagtctgggaaggcagggtgacttgggagggggccacgaggacctgggagtctgggagtcctggggcttgggaagtaatgtgtcgtctgaaggtatttgtgactgaggaagccgcttgggagcctccccacacctccagagctacatgagccccacctgtggagctaaggtcaggtggagagatcagagagcaggctgggagatggtgtgagctgggtgggggcacagagaggctgatccaaactggccctgtactggacagatccaggaggctctagggtcctgactccaggcctgagatctttccacaaaa

SEQ ID NO: 883871 - DNA, 663 bp, Homo sapiens
catcaccgatcgtcagaaaaatgccaatctaaaccacaatgagataccatctcacactagtcagaatggtgattattaaaaagtcaagaaattggctgggtgcagcggctcatgcttgtaatcccaccactttgggagrtcaaggaaggtggatcatctgaggtcaggtgttcgagacccacttggccaacatggtaaaacctcgtctctactaaaagtacaaaaattagccaggagtggcggcgggtgcctgtaatcccagctacccaggaggcggagggaggagaattgcttgaacccgagagatggaggttgcagtgagccgagattgtgccactgcactccagcctgggtgacaagagcgagactctgtctcaaaaaacaaacaaacaaatgaacaaacacacacaaaaaaacagtcaagaaacaatagatgctggcacggctgtggagaaataggaatgcttttatactgttggtgggaatgtaaataagttcaaccattgtcgaagacagtgtggcaattcctcaaggatctagaaccagaaataccatttgacccagcagtcctattactgggcatatacccaaaggaatataaatcatactataaagacacatgcacatatatgtttactacagcactacttacaatagcaaagc

SEQ ID NO: 883872 - DNA, 663 bp, Homo sapiens
catcaccgatcgtcagaaaaatgccaatctaaaccacaatgagataccatctcacactagtcagaatggtgattattaaaaagtcaagaaattggctgggtgcagcggctcatgcttgtaatcccaccactttgggaggtcaaggaaggtggatcatctgaggtcaggtgttcgagacccacttggccaacatggtaaaacctcgtctctactaaaagtacaaaaattagccaggagtggcggygggtgcctgtaatcccagctacccaggaggcggagggaggagaattgcttgaacccgagagatggaggttgcagtgagccgagattgtgccactgcactccagcctgggtgacaagagcgagactctgtctcaaaaaacaaacaaacaaatgaacaaacacacacaaaaaaacagtcaagaaacaatagatgctggcacggctgtggagaaataggaatgcttttatactgttggtgggaatgtaaataagttcaaccattgtcgaagacagtgtggcaattcctcaaggatctagaaccagaaataccatttgacccagcagtcctattactgggcatatacccaaaggaatataaatcatactataaagacacatgcacatatatgtttactacagcactacttacaatagcaaagc

SEQ ID NO: 883873 - DNA, 580 bp, Homo sapiens
ggtcatccattgagtttttaattctgctgtctttccactaacacaatttccttttggttcttatttatatctttgttttccttgctgagacttttaattttttttccatttgttttgggcatgttcataattactcattaaaacatttttatggtggtgctgctttattgctgccaagcggaaatagaaatccatgccaatgttaataactgggkgtgagggactcctcgtaactcctgggcaagggtggaagttctagttctccattaaacctctgttgatatcatcctggctgggaggggcatgaagactcattactgcttggcctctactgacattgttgagttgagttggggtggtctggtttctgctgggcaggagtgaaagttctacctctccactaacttcttctgatgccactccagtgaggtggggaggagcattttattactgcaggatgggatggaagtccatactctccatgtggtctccatgagcaccatcagtgtggtggtggtggtgaagactccttattgcctggtggagatgaagttcctagctctctgcttttcctctatga

SEQ ID NO: 883874 - DNA, 580 bp, Homo sapiens
ggtcatccattgagtttttaattctgctgtctttccactaacacaatttccttttggttcttatttatatctttgttttccttgctgagacttttaattttttttccatttgttttgggcatgttcataattactcattaaaacatttttatggtggtgctgctttattgctgccaagcggaaatagaaatccatgccaatgttaataactgggtgtgagggactcctcrtaactcctgggcaagggtggaagttctagttctccattaaacctctgttgatatcatcctggctgggaggggcatgaagactcattactgcttggcctctactgacattgttgagttgagttggggtggtctggtttctgctgggcaggagtgaaagttctacctctccactaacttcttctgatgccactccagtgaggtggggaggagcattttattactgcaggatgggatggaagtccatactctccatgtggtctccatgagcaccatcagtgtggtggtggtggtgaagactccttattgcctggtggagatgaagttcctagctctctgcttttcctctatga

SEQ ID NO: 883875 - DNA, 611 bp, Homo sapiens
ggttccacagttgctcagcactcatttatttgatgctgaagatgcttaatattctagtttctgtcattgaatctatctctatacttagctatattattcaaaaatatttttcagttttctaaaactgctatcttcaaggattccctgagaagctacaaaaaaggacatcatggtaatttatgggacgttggatatttttctaggacaaaaaatctcctatttctgcatgtatacttcagcttattctgatcagggaaagagcaagaccataatcacacagaatccttgcataagaatctgtgtgaccttgagagagcwggttgacctccctgagcccgattcctatgaactgtaaccgtctttcatgtgtacgttgggaataatcataactctctgtcagaattgtgaggattaatttgagataaggtaagacaagcattctgtagagtgactgacacatagtaggaccgtgttgtcatgagttaccgtgattaaagtggtggatcatctcatccttcttttgtagcctctgtctaccagatcctatgggaagcctttcgtgtctgtcatttcattaagtcttcccaacagcctaacgagataggtcttat

SEQ ID NO: 883876 - DNA, 637 bp, Homo sapiens
cattcacttgatgtctcttcattttatttgtctatgtccataaccttttggaaaaatttcattgattaatttgctcgctattctgagatagaagtaaggcatcagagcagtttatttcttgatatcactcctgctcactgttttgaagaggcctagcaagtagaaaacttaaagtagttttcctagaatagaatatcaaccgggaccagtaactccacaatcgttgttacggaagagtccatacttatgtccacaaattacatatattatgtaaccctgacatctraactcaaggaagaattttacattattctgattacaataaagggtgatgggtgcaccaaaatctcggaaatcaccactaaagaacttattcatgtaaccaaacaccacctgttcccccaaaaacctatggaaataaaaaaataaataggagcatttgtaaaataatatttttaacttaatatattgctaggtgactttttttgagttgaggctgatattttgcactgtgaattccaccagtctaaaaataaagcttctggaaagcttttcctggatatgaactgtagtaatgaggaggcacctgcatgtccacataggatatacatgggattgattgcaacctcctattttt

SEQ ID NO: 883877 - DNA, 459 bp, Homo sapiens
ccaatactatgttgaataggagtggtgagagaaggcatccctgtcttgtgccagtttttaaagggaatgcttccagtttttgcccattcagtatgatattggctgtgggtttgtcataaatagctcttattattttgagatatgttccatcaatacctaatttattgagagtttttagcatgaagggttgttgaattttgtcaaaggcctaaaaaaggcatttttaatgtgcaacatgttctttaatakaaacagtaaccttcagttaaataaagaaattgatgtgccaataacagattaatttttcatgcccatattgacactgttctgatatttcataccctgcctacccacttttctttgccctgcccaggctccagggacctacctgacttcctattcatgctgatcccactgagacccttatcaaccctgacctgttccccatgtgcctcttgg

SEQ ID NO: 883878 - DNA, 570 bp, Homo sapiens
atttttctggtaagaatgaaacttatattcaagtacacactatgaaacacaaattgtgtaatttcagtcgtcctgtttaagtgttaaatgtgcttatatttgcatttaaaactggcattgcacaacataaagatgaacactgaaaaattcatgctaattatttaaatttttaatctttttaaacttagaataactttaaatagtaaaaacaaaacactatgacaattcaagaaagagactgcagaagaaaagaaaaagttttatattttagtaacattagtgccatttcccctgcttttggaacaaggggtccacatttccattttgtactgggccttgcaatgtatgtagctggccctggtaggatgccttgcttctctctcttgagaaggtcaggggccaggcttataccccagtgagaaagagtggtrgattctattctggaggcattaaacagccccagaaaaaacaaaaacaaacaaaaaaaacttccatgaacttaggagttcaccaagaagcagtagactttccccattcaatctagagagaatccagggcatgtgcccgccc

SEQ ID NO: 883879 - DNA, 490 bp, Homo sapiens
taaaaatcacactgaacatattcggcatgaattaagcattttttaaaattatactttaagttctggggtacatgtgcacaatgtgcaggtttgttacataggtatacatgtgccatgttgatttgctgcacccatcaactcgtcatttacattargtatttctcctaatgctatccctcccccagtgccccccaccccccgacaggccctggtgtgtgatgttccccaccctgtgtccaagtgttctcattgttcaactcccacttataaatgagaacatgcagtgtttggttttctgtccttgtgatagtttgctgagaatgatggtttccagtttcatccatgtccctgcaaagggcatgaactcatccttttctatggctgcatagcattccactgtgtatatgtgccacattttctttatccagtgtattattgatggacatttgggttggttccaagtctttgctattgtgagtgccacaataaa

SEQ ID NO: 883880 - DNA, 642 bp, Homo sapiens
ggtatgtgagtccaagtcaaaaaggatgaagataaattatagcctcgcttacggtgatcttgaaaaatagtagtgaggaaaacgcctcccaatggacagagtttcagatggtacccagtcattcactttgtgtggaaagagaagtagtttgaagttagaatatgtataactcataggtagtgataaatggcttaggaggcttttcaggtggctggaaagaaaaagatagaaacacttggaaaaaagaagtctggaacagaggcacatgcataaacatataagagtgaaggtatgaagtgttgcattatttgtattacatgctaaaactacaagatggaatccatcatagaaaatgaattaagcaactaggtagaaaaygtgacttggcgagcagttattgtcaagagcttctgacatttgccctcattatcctacctgcaatgctagagcaatgagcttatgaatgaagccaccatgatagtagggatagaagcaatgcatgggtttaacagcatgcattatagccactggtcaaacatccagtcttccatcaataagtgtcccatgcaatgactggataaaatagtttcccatcaaaagatcaaccagttatttaatgtcaagttgatgacactggacttt

SEQ ID NO: 883881 - DNA, 642 bp, Homo sapiens
ggtatgtgagtccaagtcaaaaaggatgaagataaattatagcctcgcttacggtgatcttgaaaaatagtagtgaggaaaacgcctcccaatggacagagtttcagatggtacccagtcattcactttgtgtggaaagagaagtagtttgaagttagaatatgtataactcataggtagtgataaatggcttaggaggcttttcaggtggctggaaagaaaaagatagaaacacttggaaaaaagaagtctggaacagaggcacatgcataaacatataagagtgaaggtatgaagtgttgcattatttgtattacatgctaaaactacaagatggaatccatcatagaaaatgaattaagcaactaggtagaaaacgtgacttggcgagcagttattgtcaagagcttctgacatttgccctcattatcctacctgcaatgctagagcaatgagcttatgaatgaagycaccatgatagtagggatagaagcaatgcatgggtttaacagcatgcattatagccactggtcaaacatccagtcttccatcaataagtgtcccatgcaatgactggataaaatagtttcccatcaaaagatcaaccagttatttaatgtcaagttgatgacactggacttt

SEQ ID NO: 883882 - DNA, 686 bp, Homo sapiens
agagagcccagacataaactcatgcatttgtgattaattgatttttgccgaagatgccaagaataaacacactatggggaaaggacagtttctttaataaatgatgcaggggaaatcaaatacccacatacagaagaatgaaattgaacccttatctcacaccatgtgtaaaaagcccactaaaaatggtttaaagatttaaatgcgagacctgaaaatgtaaaactactagaagaaagcatagggaaaaatgtccctgaaattaatcttggcaatactttcttggtgatgatctcaaaagctcaggaaaccaaagcagaagtagacaaatgggattacctgaaaccaaaagcttctctacaacaaagtaaataacagattgaagagacaacccatggactgggagaaaatatttacaaaccatacatggctaatatccaaaatatgtaagaaatgcaaacaacttaaatttgttagcaagaaaacaaataacgccatttaaaactgagcaayggacttgaatggacatctttcaaaagaccaatagatatataaaaaagtgtctacatcactaatcatcagggaaatgcaaattaaaacaaaacaaagagatatcacctcatacctgttagaatgactattatcaataaactaaaaggtaataagtactgacaaggatgtgggga

SEQ ID NO: 883883 - DNA, 588 bp, Homo sapiens
gcccgggctgtactgagcatgcaatcaaccactgggcttcagaaagtgtttaggacatgtggagcccatcttatggttgtatctctctttttcattccagtcatgtgcatgtatctccagccaccatcagaaaattctcctgatcagggcaagttcattgccctcttttatactgttgtcacaccgagtcttaatcctctaatctacactctcagaaacaagcatgtaaaaggggcagcgaagagactattggggtgggagtgggggaagtgacagggaaatcatgttgtctgttgtcattgtttttcctagggtcttagccatcttgaaaggtggtttccctgcttctttgtgatttatttttgttctaacagctcacaaaacagaatagttcagtmtcacatttgttgctctttttattatttagttctgaaatattatgttgagataaagtttctgattagtgccactttgttcttttacaattgtatattttatttctgtgaaaattgtggactgtggtttcaacgtaaataaatgtgcatgcgaatagttatgaggagattatttcaaaaatgttgggaatat

SEQ ID NO: 883884 - DNA, 550 bp, Homo sapiens
tttgggttaaagccagagtgaaaataaagaacagccacaagcaatagggcagggatcaagaactcagctggggcagaaagctggagccagagctaataagatcatatagatcccttaataattcacagaaatatgggagagggctgtagctttccacagtccagacagttcaaacaaaccttatctggatctgaagggcctgggagagcctcagctgggtttcatttataaartactttagcacaagtatggtcatcccctccccagttcacccccaccccgaagttcttagccttgtatccaaatgaacatgtgggcactaaagcctgctctttcctccttctatctttgtattaacactaaacaaactggcctttgtttctgaccttgaagagacagtaaaatcaacatcattctccaaaatatccctcaaagatgggcctataagaattcagagagtttagagaatcgctgcttagaagctttctcccctcaaactcatcccaggaatcttctcccttttactcccactcccaccctcaacacaccc

SEQ ID NO: 883885 - DNA, 640 bp, Homo sapiens
ggaccacagcaagttattgtgccatgattttgtctttgacgtacttatttctgaaattcattatgacttgaaatatccttttcataaagactgcaataaagtcctttgacaatatggctagatggatcaaagggcttatctctgttgaatcttgagtagccacccagatatcactggagaagcaacaatgcaggtaattcaaaacaccctcaactcacatttagttgactttgggatgtagcacagttttgcaggaatatatttatatttcttatatttcataacctaatagaagcttaaatagttacctcagccttcattgcacagataatgaaagagaagcttaaagaagagaaattaagtacttgcccaaggtcacatagttagttaatggaagaaccaaaactagaacctagatcttctgatgccacatttcaagctccatgaaccacyggtaagaactaccttttatgctggtacacagtgtgtgtacaagattacacctataatgataaaactggtggtttttattctgtccttttctatttgattatttcctttttaatagtgctggtcatggtccacaaactgactacgaggtctcagctagcatctgtaaacactgctgtggatcacagaa

SEQ ID NO: 883886 - DNA, 566 bp, Homo sapiens
tttcttcacagaattggaaaaaactactttaaagttcatatggaaccaaaaaagagcccgcatcgccaagtcaatcctaagccaaaagaacaaagctggaggcatcacactacctgacttcaaaagattttttaaaagcccasccacatgttgtgatggttaatttatgagttcacttgactgtgttaaggaatacacagatagctgataaaacattatttctggatgtgtctgtgagggtgtttcaggaaaagtttagcatttgaatcagtaagcttagtaaaggagatccacccttaccaatgtgggtagatatcccatcctctgagggccaagatagaacaaaaaggaagaggaaagatgaatttgcttttgtttcagttgcaccatccatcctttcctgccctcaggtacctgaactctttgcactcaggccttcagactcctggacttataccagcagcccccttcagttctcagaccttgatgtagatcttagagttatgccataggctccctggttctcaggccttcacactcggactgaattacatcactggctttcc

SEQ ID NO: 883887 - DNA, 592 bp, Homo sapiens
gtctgtgatattctgatatacaagtaaaaacgaactaagatagaaaattattgctgagaagtggggctattgttaataacaagtacctgaaaatgtaaaagaagatttggaactgggtaattagtagaggctggaataatttggaggtgaagggaagaaaaagcctagattgccataaatagagtgctaaggaaaattttggtgagggctcaaaagaaaagaattgtagaaaattctgaatcttttagagattatttaagtggtgattatcaggatgctgagagaagtatggatagtaaagaacattctgatgaggtctcagaaggaaatgaggaacaakatattagaaaatagagtaaagaccatgtcacgtgcatccgtgtgaagagaccaccaaacaggctttgtgtgagcaataaagctttttaatcacctgggtgcaggtgggctgagtccaaaaagagagtcagcaaagggagataggggtagggccattttataggatttgggtaggtagtggaaaattacaatcaaagggggttgttctctggtgggcaggggcggggttcacaaggtgctcagtaggggagct

SEQ ID NO: 883888 - DNA, 612 bp, Homo sapiens
acagagacaaactacatcattatacccctggcccttctcaaatctcatgcccttttcacactgaaaaccaatcatgccttcccaacagtaccccaaaatcttaactcattccagcattaactctaaagtccaagtccaaagtctcatctcagacaaggcaagtccctttcacctataagcctgtaaaatcaaaacaatatagttacttccaagatacaatggggraacaggcatggcttgaatgttcccactccaaattggagaaattgcctgaaacaaaggggccacaggccccatgcaagtccaaaacccagctgagcagtcattaaatcctaaagctctaaaatattctcctttgactccatgtctcacatccagggtatgctgatgcaaggggtggactcccaagaacttgggcagctctaccagtggctcagcagggtacagcctgagcagttgctttcaagggctggcattgagtgcctgcggcttttccaggttcatggtgcaagctgttggtggagctcctattccaggttctggaggatggtggccctcttctctcagctccactaggcagtgtcccagtggggatgctgtgtgggggtccca

SEQ ID NO: 883889 - DNA, 508 bp, Homo sapiens
tccccagtgcagttggtgagaggcattctcacctcctccctggagagtggggttcctccttaccattgcctggtggttgagctctagtccttctgtctggctggccgtgtagccttgggcaagccgctccatctctctgtgcctctgttgcctgggctgtaaacagaagtgagctaaaggcaggcagaccgaggtctgtgaccacgtaataactcatactcagttccagaaatattcacccacagargtgtctgggacaagcctggaaggctgatcacaccagccctccgggtgctgctcgtggctgagagaacagaagggagccctgtccaccatgggaagctgctgtttccatcaccagcctgggctgtggtgcagaaagaaggaaggggagtctgggtggggcgagggaggcagcaaagggcctggaccttcgtgggagcacggacacacaggacagccattgtcgagcttggactgaccctacttggtgacgttaagttctcaa

SEQ ID NO: 883890 - DNA, 645 bp, Homo sapiens
aataaaacaaaatcgattacttgtaagaaacgaggttttagagattgttgattatatgagaaaggcacccatataagataattccctcacttaaattagaagtgtaacaaaatgcgcttccccatgaccttaaatcattaaattccatgtggatttgagcaaacaaccgatacctggaattacttaaacgaatatttttcagcccaagacaaacttgacccttcctttgctgaagaagcatcagataatccatctgagttgtaaatgtggattatttaatcttaccaaaaaaagctgcatgcatcctgacattttctggtaacaacaaactttaatgatattgttctttattctctattgagtaataattcaatgaaatatccagactaacttatatgcataagttataagtatataaagttataamttatataaagtgtaactatcaccttaaatgggaaattagtatcctccctcaaattaatttatgtaaattaatgctggccatcacagtagttactatgcatgtattcattcatcatacacttattttttcaagatataggcattaagaacctatgatgtgatagactctgttcgaggtgctcaaaatacagcagttaatatttctcactcttttgaact

SEQ ID NO: 883891 - DNA, 642 bp, Homo sapiens
gaccagaacagtctatcccaggacatataaaaattcagcccttacttagcaacgcccaaaccaagtaaataaagtctaccaaaaatagtttgtatctcaagcatgtaagttattttgtgcctctgaaacatagaacaggaaatgaaaagcaatatatttaaaagctatcatttttcagatacttagccaagggtatgccaaaataacagtgaggtctgtgttgaaaggaaaaactaaccagcttgggaaagatctaaaaaaagtgtccctaaaaatatccttrtatcttttctctatcaactgctttatgtgtcatcttataccacacaaaataagaaaaacagtagtttaggtgaatgatctggtctaaccagattatctaaatagccctgtcctccaaaatatttacttattgtgagtaaacatgttttgctatacacattttatactgaatgacagttccagaactccattagaaaaatctaccaaagccaaagatgttatttttagaatataaactctgatagtcctgcaagctcctgaaaattggagacaagaaacatctaaagaagggtctaaatcaaccaggtcctaaaaacacctggcacaatgcttcattccacaaggtagtcagactataga

SEQ ID NO: 883892 - DNA, 594 bp, Homo sapiens
agatgatatataaacaacatacttcaaagtgctgaaggaaaataatctgccaactaagaatactttacctgaaaaaaactgttcttcagaaatgaagagataaagactttcttaaacaaaagctgagggagtttatcaccaacagacctgtcttataaaaaatgcaaaaggtagtttttcaagctgaaagaaaactatgcagattagtatcacaaaaacacatgaaaatattaaactcattcataaaagtacacagtcaaattcagaaaattaaggctgtaatggtgttgtgcaaaccatttacatcttttgcttgaaggttaaaagacaaaactattaaaataataatagctgtaataatttttaagacacacacacaaaataaaaagatgcacattgtkatattgaaaacataaaatttgtaaggggtaaggtaaagtaaataaatttttaaaaatgagattaaacataatatgttatcagcttaaaatagaatagcctgttttaactataagatgttttatgtaagcctcatggtaaccacaaagcaaaaaccttttgtagatccacaaaagataaaaagcaagatatcaa

SEQ ID NO: 883893 - DNA, 594 bp, Homo sapiens
agatgatatataaacaacatacttcaaagtgctgaaggaaaataatctgccaactaagaatactttacctgaaaaaaactgttcttcagaaatgaagagataaagactttcttaaacaaaagctgagggagtttatcaccaacagacctgtcttataaaaaatgcaaaaggtagtttttcaagctgaaagaaaactatgcagattagtatcacaaaaacacatgaaaatattaaactcattcataaaagtacacagtcaaattcagaaaattaaggctgtaatggtgttgtgcaaaccatttacatcttttgcttgaaggttaaaagacaaaactattaaaataataatagctgtaataatttttaagacacacacacaaaataaaaagatgcacattgttatattgaaaacrtaaaatttgtaaggggtaaggtaaagtaaataaatttttaaaaatgagattaaacataatatgttatcagcttaaaatagaatagcctgttttaactataagatgttttatgtaagcctcatggtaaccacaaagcaaaaaccttttgtagatccacaaaagataaaaagcaagatatcaa

SEQ ID NO: 883894 - DNA, 617 bp, Homo sapiens
cctctgtcacactcgggttctggaagtcttcctcaaagctgaggcgtggaaggtttggaaagagaggcatgaggcctgttgttcaggagcagcaggtaaacgtgtgagcagggatggggatgatgggatcccacaggcctgaggaagacagtgacagtgtgagtagcttcagctgagaaactcacctatgatggttctgacaaaggctggcttacagctcttcttctcttaaggtggtgctctagggcctcacaggtcrcctgtcttcctaagaggtttgctccctcagaacctgtaggaggatgtgagaaagcacctcggggcacagctggcaggcagagcctgaggcaccaggaatggcagtaggtggctatggccaggtgctgccaggtctgctctgtttgtgggggtagggcccttggtacacagtcagggcgtgcactcaccttgactcctgatattgcctgggcctcctctgctgtgctgactttaggaagtgtgcctcagacccaggtcttcaactcctggttcctggagcacctgcaagaggaagtgagggagcccctcaggctaaagactgcaagcagagtcttgggcctcccaaggctgacagctgg

SEQ ID NO: 883895 - DNA, 592 bp, Homo sapiens
attaaatctgctgggtgttctaaaccttcttgtacttgaatactaatatgtttcttgaggtttgtgaagttctctgttatccttttaaataaactttctaccctgatctctctctctacctcctttttaaggccaataactctcatatttgccctttggggctacttcctaaatgttttargtatgcctcattcttcgttttaatttttttcgttttgtctcctctgactctttattttcaaatagactgacttcaagctcactgatcttttttctgctagatcaattctgctgttaagagactctgatgcattcttcagtttatcagttgaatttttcagctcagaatttccacttgattctttttaattatttcaatttctatactaaatttatgtaatagaattctgaattccttctccatgttgtcttaaatatctttgagtttccccaatatggctatttttaattatctgtttgaaaggtcacatatctttgtttctccaatattggctcttggtttcccatttaggccatttagtgaggttgtgtcttcctgaattatcttgatacttgtagatgtttgtctgtg

SEQ ID NO: 883896 - DNA, 588 bp, Homo sapiens
gtgagtcttcccttcaaggtagcatgttcccttctggcccacagtgtttctagaaataccttctgtgagctagggcctggaatggggacctcaggactctgcttgtcaccttatcctatggcgtctgagctggtatccaagtgaaaagacaaagtccactttactgttctctctcttctcaagcagaggggaggagtctctcctgtagctgtaagctgcactgcctggggctgggattgcagggggtgacacaagcattccyttagccatcctggctcctatctcactaggtctcatgcactccaaatccactgactccgagcccagcacagcaccaggacttgcccagcatttgcatttcttgtggcctagactacctttcaaacttatttaggatcctgtagtactttagcccttgatggcagggcttgccagaactcaggttccaaccactgggatgggtgattccgctctgtctagggctggtctatatgccccctccatggatatcaactgaattctgcccaatgttgctttccactgtaacagggcagcattgagttccaatgcaaagtttcacaataattg

SEQ ID NO: 883897 - DNA, 576 bp, Homo sapiens
aaatccaaaacctgaacagaccaataacaagtaatgagattgaagccatgctaaaaagtctttcagtaaaaaataaataaataaataaataaataaaaatctggggcccaatggcttcaatgctgaattctatcaaacatttaaagaataaatagcaattttactttaactattctgaaaaatagaggaggagagaatatttccaaactcatctatgaggctggtattgcccttataacaaaatcagacaaagacacgtgaataaaagaaaactacaggctaatatctctgacaaataaagaagcaaaaatcctaaagaaaatattaggaaaccaaattcaaaaatacattacaaagaccattcatcatgaccargtgggatttatccatgtgatgcaatatatacgtcattttaacagaatgaaggacaaaaatcataggattgattggcagtgtcccacctgtcttctcctcagactctgccaggttgagacactccccatttctccccacgcagccatggttcagctgtttttcctagccaccagtgactctgtcagcttaaactcggactac

SEQ ID NO: 883898 - DNA, 563 bp, Homo sapiens
tttgctcttcagggtaagagttaaatgtttctgcttccacaagcaattacttatacgtttaaaaattaatgttatgttcttgtttctgtgttttctcttttctaaatacctcacctccttagtcactccattttggacaatctttggtttgtcaaaatctctctcaaactgcatactcataagcgtagatctggtatgaatctgagcttttgtaaatcctgcccctgttaagttttatccttcgtcctacaataacctttctaagtacatattgttatcatcttcatcttatgtatgaggagatggagattcagggatgttaaggaatttgttcacagtcatgttacatttaagcatatgtgactgttgtatgttgtactagcatatccttatatatctctacaaatctattgacaaaatttarctttttaagcacctactatgtaatagatactattatatttacaaagaaatataagctgacttttcttccctaccttgtttttaagaagattacaatgttggtgaggctatgtaaaatatatgcatttaaaaaatccctt

SEQ ID NO: 883899 - DNA, 595 bp, Homo sapiens
caagaagtttctcaccagatgcagcccctcaaccttggacttctcagtctccataacagtaacaaataaattaaaaaaaaaattgcctcatttcaggtattctattaaaaggcaacaataaactcactcaggcaggtggtgatgggtgtgttcatttgatttttgtaattattacacaatgtttatgtacatcaatttattgtgctctgtactttgaatatataaaatctttgtcaatttaataytgtaaaattttagaatgtttattatcccccaataattatgctttacttttatgcagattctttataaacaactttcagacccagatttggtttgtttgcttacccattcattcacagaatatatattcaaatgaaacataagttaaagttgttatctgataccagtgatagatgcgtaccattcaatctcacttgtcagaaaatattcccagataagaattagttgctccctccatttaaggtcacattatactctactaagtgaatatggttcacagtcaaataggcacaaattgactaatacaaggtgttttaaaacctggccagcacgggtagtgtgtgttggggag

SEQ ID NO: 883900 - DNA, 617 bp, Homo sapiens
aaactggaaagagcaccactctaccgtacaagaagaaaaaaagctggacaaagtacaaatcaatgacttttcttaaatccatcagagaagtgaagtcacagggtagataactaacctaaaatatatagagaagcaagcaactacagacagaatgagcatttgcttacctgagataggtgctgctaaatatcataaaagccactaggaagattaaacaaaacagttttaccaaatgccaaaggcttaacatagtctagcatgagagcatgaagcctatggagaacacagacacagagaggttattgctctcatgtaggttttttgggttttttycccctaggaactctaccaggctctcacaggaaacattgattagaaaggaatggggcttgaaaaaagggatggagacatatgggcatattctgatgaagatgaggaccttgagcccccaagggttggtctctacttgcctaagaatctgtaacagcctttcctgaaggaactgccctgaaggagatctaatcttctttagacttacctctcattccctcatcatctctcattgcttctagaccagggtttctcaacaatgtcactactgacatttgggaataaat

SEQ ID NO: 883901 - DNA, 611 bp, Homo sapiens
tacatctaaattttcttgctcatgttcatttatgggacatttttatcttgtcatcttttttcatgtaccgtgcaagcaagaagaaaatatccagcacaacatacccttcagaaacaagctaatagcacaatttggtgtcaatttcacagctcagtgaagtgaaagtgatctagctggccatccacatacacctagaaggaggtctactgcaagtgcccagccttcatgttgcttgtgtcatgcctacaagcaagataagttcaagtagaaacattatgtattcagaaagaaagcagttatcattcaaatgcccttagagccagctagaacagaatgtggagagataaagcagagccagactttcatttttatattgtggagagttgtttttcagaagtcatgcttatattcacmaatggtagggaacagtagcttccctttgggattctgataatgtttagaagcagaaattttatttaacggatgcatgaaaattgaataactatcttaacagtttctcatgctttataatggaggcaaaatcatagactttcaactaatataaaaccaaaatgccgcaggaagagtatgcagctcctattattaacaat

SEQ ID NO: 883902 - DNA, 633 bp, Homo sapiens
gagcattgggggaaataatggctaccttataaaaatcagcattgaaaaaaagtatgctatctttctttctttctttctttctttttttttttttttttttttttttttgagacgtagtcttgctctgtctcccaggctggagtgcggtggcgcaatctcggctcactgcaagctccgcctcccgagttcacgccattctcttgcctcagcctcctgagtagctgggactacaggcgcccaccaccacgcccggctawttttttctattttttagtagagattgggtttttcactgtgttagccaggatggtctcgatctgctgacctcgtgatccacctgccttggcctcccaaagtgctgagattacaggcttgagccactgctcccggccggaaaaaagtatgatgtctttcaatccacctattctatcatgagcaagacattttttaacctctactttgtgtggccactggagctcatgaatttaaatcttttcactcccagattgctaatgaagtaacaatacagcaataagcaaagtcctggacccagagaagaagggaaaatagcagatgctacatttacctgtttaattcatttgcttagagatttccagaaatatttgttggggg

SEQ ID NO: 883903 - DNA, 633 bp, Homo sapiens
gagcattgggggaaataatggctaccttataaaaatcagcattgaaaaaaagtatgctatctttctttctttctttctttctttttttttttttttttttttttttttgagacgtagtcttgctctgtctcccaggctggagtgcggtggcgcaatctcggctcactgcaagctccgcctcccgagttcacgccattctcttgcctcagcctcctgagtagctgggactacaggcgcccaccaccacgcccggctatttttttctattttttagtagagattgggtttttcactgtgttagccaggatggtctcgatctgctgacctcgtgatccacctgccttggcctcccaaagtgctgagattacaggcttgagccactgctcccggccggaaaaaagtatgatrtctttcaatccacctattctatcatgagcaagacattttttaacctctactttgtgtggccactggagctcatgaatttaaatcttttcactcccagattgctaatgaagtaacaatacagcaataagcaaagtcctggacccagagaagaagggaaaatagcagatgctacatttacctgtttaattcatttgcttagagatttccagaaatatttgttggggg

SEQ ID NO: 883904 - DNA, 586 bp, Homo sapiens
catgttgaggtgagaaataaataaaataatacatgtgaactctctagcatggggcctgataaaaaccagttgttactaaatactagtttccctttatctctccacttatggagtttttatctattccattccattgtccttttstaagccacaaaaaaatttttggtcatgtaccacttatttgctcttatccaataatttactgagttttattagttatctgtctgtcttacttgtcccagtagattaggatggcgatcatgcccaaacctcacagtgacgaataatagcactaggcacagaggtgatgttaagtaaatctgttgtgtttcattttataatacactaaagcaaagacaatcttgactggcaaactgtgcaggatgcaggtaacaaaaaggaaaatgaaaatggattccacaattccagggaagttaaggagaacctgcttagggagcttggggtggagaagagagaatggtattacagtagggagaaagggcccttgattcatgatgcccagtttagagatacctgtggttatgcctgtgatcccaaactacatggtgaattaaaacaactgatt

SEQ ID NO: 883905 - DNA, 597 bp, Homo sapiens
taatcacttgtattttgaatgtcccggggaaaaaaagtatagaaaagtcaacccaaagcagtggctgcaaatgagaggtgtgagactgggagttccagttctcaactactgtattgtttgtgcagggagtttgcaatcactctayatcccagggctaaaagtagctgtttaatctgctgatgtaacccagtacaggacatattataggttaccttcttgccaatggcaattaggaatatgatgaggttgagggacaacactaaaatgggaaaacatgaaagaataatcaaggacaatagatgaaaaataaaaatgatggaaaatgtggttttgacaagataatcggaagagatgtttgcatatatacttctaaatgaaaattttaaaaaaccccaggaattttggttcattaaacataagctgtatcgatgaaactggtgacaatgaagcaggcaatgtattgacaaaacaggcagctcaagtaaaggctatgcactctttcacactaaaataaattacagaaacatatcaacttgtgaaaaggagaatggaaatgtgtcaaaataaagagccggtttgcagataaaaaagcacctt

SEQ ID NO: 883906 - DNA, 608 bp, Homo sapiens
ttgtcctattatttctgcttagtattctattttctgggcctctaccatgattcatagggcagttttctggccccctctatgaactggttattgaacttcccttaacgctgatgtcctatgtcctaattctctactccttaccacttctaaccttacacacacacacacacacacacacacacacacacacacacasagagagagagagagagaatgcatggagtcagagtcaatctaagaaaggacacccatgaaggtgagaactgaggatgcagtgtggcggtcacacgggtgaggagtcacccttctgcaataattagcctgtaggacattaaagagaggctcgcaacctcttagggactctatcaccccaactagagtaggtgatctatccagtagatctttttcagttccaagattctactgccttaagaaggtctatcgtgcagagagtctagaatacatctttctaattgatacagacaattcaatgtcattccacagcatggacaggatattgccaagtttgttgtctagctccctactcccacccttaccctaatttcagctatgggattgtagaagataataaagttttaaagaagtgt

SEQ ID NO: 883907 - DNA, 608 bp, Homo sapiens
ttgtcctattatttctgcttagtattctattttctgggcctctaccatgattcatagggcagttttctggccccctctatgaactggttattgaacttcccttaacgctgatgtcctatgtcctaattctctactccttaccacttctaaccttacacacacacacacacacacacacacacacacacacacacacagagagagagagagagaatgcatggagtcagagtcaatctaagaaaggacacccatgaaggtgagaactgaggatgcagtgtggcggtcacacgggtgaggagtcacccttctgcaataattagcctgtaggacattaaagagaggctcgcaacctcttagggactctatcaccccaactagagtaggtgatctatccagtagatctttttcagttccaagattctactgccttaagaaggtctatygtgcagagagtctagaatacatctttctaattgatacagacaattcaatgtcattccacagcatggacaggatattgccaagtttgttgtctagctccctactcccacccttaccctaatttcagctatgggattgtagaagataataaagttttaaagaagtgt

SEQ ID NO: 883908 - DNA, 690 bp, Homo sapiens
ttcaaatcagaagggaaataagcatacaaaaggcaagaattagcagcctgctgttggtatagtagacccaggttataatcatgctcattaggataaacggtgttcctcaaataacactgcatgtaatgaaagtctaaaaagtcttattcctaatttatccaggaggcaggtggatgttctgatctacagtagccaaagtgaaaggggtttttgctgtattttgttttatttttctgttgttacctgcttctaaaactaaaacaaaaatactccttgtgggagatgcttccaaaactcagtacccgttggtctaaccttggcagtaagaaaaaattgctgcaaacttttccctgtgtatttttgactacyatttatagcacactggtaataagcaagtctttgattaacatcagtcatttctatcttcagctgggattcattttaatggctgaagcaattttattattaaaaaaaaaaccacttctgtgcctcaaatttatacttagctgatggactcttagggcaatccaaacataaagaaaggatttagggtcaaacatcaaaaggaacatcctagtgatgacatgtgaggtacagggtaggaagaggaatacgaaagtcatttccaggtgattttatagcagtacattttctgatattgctttatatgttatgctttagttgggggaa

SEQ ID NO: 883909 - DNA, 686 bp, Homo sapiens
ctagtgacggaaagcccattgttgcctgatgaaggcagatgatataaatgaggcaattgcttcaatacataattaaaataagccaaatgaagcagcagcaaaacaagacagattcatggtttggagatctaaggatgaaccctttgcagaagacagtcctccctccctcaccccagctggcactgcgccccagaagcgtattgactggccaatcaattctcaaattctagatagatgggctggtgataaacaatgaccactcagcccctttctcagccctgccaggcccagctaatgcacactgaaccatcccccgttttgaaagaccttcctgggattgtttatctctctaccctctccacttttgtttccagctacagggaactcctaagtggaaaatcgataggcgctttaattactggcccccaattcatcagggcctcaactgtaattactctgcctgagccaggagccaataagcagagaccgccaggcactggacaatgtgcaagacaatcagcccagagtctgtggctcagcctgcgggragccttgtgaggctgcctgctcaccttcccgctatggctttcctgtcccctttccctggtcagcagcaggggagaggcagtccccaaagagatcccagggcagaactggtagggggcatgggatggacacaaagccaa

SEQ ID NO: 883910 - DNA, 686 bp, Homo sapiens
ctagtgacggaaagcccattgttgcctgatgaaggcagatgatataaatgaggcaattgcttcaatacataattaaaataagccaaatgaagcagcagcaaaacaagacagattcatggtttggagatctaaggatgaaccctttgcagaagacagtcctccctccctcaccccagctggcactgcgccccagaagcgtattgactggccaatcaattctcaaattctagatagatgggctggtgataaacaatgaccactcagcccctttctcagccctgccaggcccagctaatgcacactgaaccatcccccgttttgaaagaccttcctgggattgtttatctctctaccctctccacttttgtttccagctacagggaactcctaagtggaaaatcgataggcgctttaattactggcccccaattcatcagggcctcaactgtaattactctgcctgagccaggagccaataagcagagaccgccaggcactggacaatgtgcaagacaatcagcccagagtctgtggctcagcctgcggggwgccttgtgaggctgcctgctcaccttcccgctatggctttcctgtcccctttccctggtcagcagcaggggagaggcagtccccaaagagatcccagggcagaactggtagggggcatgggatggacacaaagccaa

SEQ ID NO: 883911 - DNA, 600 bp, Homo sapiens
ctttcatagaatggacaaataaatggggcagaaaattgattacttaaatgatagtaaatatgataacagaaaaacatataaagttattagtgctattgggtatgctaaagtaccagtcctcaagaacatctcaaagattacacagataagtaataaaaggccataccaacacccatcaactaatcatctgttactcagatgatacaggcatctaccctatgttacattcagcagtgctatagaagaccaggaaatgatgagcagcaatatatttggtgggatctttggagatgtaggaggaagtccaggttgctgctgattaataagttttaagttaaaaagtgtgattgtatagattttctgcagtttaggcctgaaccttaatatgaaagtaaagttgcatctcagatatccctcctcaaactcctaaggtrcctgtagtcaaataagagtctgagggtgttgttcagtgagttttcactaggaacaaaactaccctccttgtctgtggtcagagaaagtacctctgcaaagcagaatatactctgtgactaagaaaacatctttttcattggttgtaggtcagcaaatgcctaggca

SEQ ID NO: 883912 - DNA, 564 bp, Homo sapiens
aaggctgagtgcaatccattttatcaagctctatatattcacttttttaaagaaataaagaagctccagtatcctaccagtaccccccgccacctcctcttatgatatcaaagtgttcaaggccacagcaggcccttaggcttgggctgtccttgactggagctctctggggctgatgcctcctkctttgagggacaaaccacaacatgactgaaggtctctatagagctgtgaagagctctaagggtgcatcataatcttaacaatgggtcagactcaaccatccctccccacagccccacttgactcagggatcaatgcacaggaaggccatgggagctggctggaggactctcaggtcctgcttctatactcagaagaggcacttaatggagagaatgaagtcacgtgcacaacagtgataggaatggaaagactttgaaataaatatgtcttttaacaaaaagggagatctcactctgtgtccacccagtgctaagttctgtgcctaagagatgcagaatgtgtaagacatggcctcctgtcttcaagaagtgctttctt

SEQ ID NO: 883913 - DNA, 564 bp, Homo sapiens
aaggctgagtgcaatccattttatcaagctctatatattcacttttttaaagaaataaagaagctccagtatcctaccagtaccccccgccacctcctcttatgatatcaaagtgttcaaggccacagcaggcccttaggcttgggctgtccttgactggagctctctggggctgatgcctcctgctttgagggacaaaccacaacatgactgaaggtctctatagagctgtgaagagctctaagggtgcatcataatcttaacaatgggtcagactcaaccatccctccccacagccccacttgactcagggatcaatgcacaggaaggccatgggagctggctggaggactctcaggtcctscttctatactcagaagaggcacttaatggagagaatgaagtcacgtgcacaacagtgataggaatggaaagactttgaaataaatatgtcttttaacaaaaagggagatctcactctgtgtccacccagtgctaagttctgtgcctaagagatgcagaatgtgtaagacatggcctcctgtcttcaagaagtgctttctt

SEQ ID NO: 883914 - DNA, 602 bp, Homo sapiens
gctgaacattcttaatgctttcttaggagttaaaactaattataaaccaaacattttgtttaatagttgactgcattaaaaaaaatctaggtttgagagatctgttacttgtcagattttatattgccagagactttaatgttggttttcacagtcttaacatggaatagaaatttctttttgtaaaatacatgcctcttctttggccctcagtttaaagaatcagaggctgtggtagccattaatgattttttttggttataaagctgtattctggccttgagactgtacttgctgatgcccaggcaataaagtacttttggtctrcgtacataatagaacagggccgattgactattcagcttgcttcagacagctttcagctaaacactgggtatatcgtagtgcttgcaaatactacttggtggtaagcacttgaacagttgaacctccctaagaaggtacagggagttagtaaaaatggcatggagatatgattcagcagctcttgtgtctggtcctcaagataaactcactactttacggtgacactttggagaagccgggttagtttttctaggtcctagtttccaaataaaaaa

SEQ ID NO: 883915 - DNA, 631 bp, Homo sapiens
ccaagtattctatagtttcctctatgtgtcttacttgctaaaatctagcaccgcaataatgttcaatgataacagaatttgcacttacccctatcttgttcctaaattttattgaaattgatttagtgttttgccatttgggacgaccttagatgttgggtttaataaattatcttttaaaaattataaattacagctgtattataaaataactttttagcagctagtgatataattacatgggtttttactttcaaatatttgatataatggattatcttgatagataacaaaatagtctttcattcctgcaatgagacatacctttaaaaayatatgtttgttcttttcatgtatcacaaattgtatttggtaatacttaatgttttttttatagctacctgctggtgcaattggccttatttttcctccctttgcaatattattgttaggctttgatatcaaaactatgcaggttttgttaaaaaaattaaagaattttaaaaccttttcctatgacctgaaatagtaacactatcatcgaacttaactatttttaaatggttagataaaacttagttatgaattcatctgctcctggtactgtttgtaatggtaaatctttaatcat

SEQ ID NO: 883916 - DNA, 660 bp, Homo sapiens
tgccagcatgagagtgtatcaatcagctttagtggtcttgaagctcagaaagcagaatagaccacggttgaaagaagagggaaaacaagctacattcaagttaccagtttgctagaaacttcctactatatttgtagaaattattgaaattgagaggacacagtaagagagtgatgggcactgtgacatagtggggcactccatccaattattgccaagtgggaaggaagaccttgtgttgctacatctctccatttttttcaagaaaaatcataaatctggaattttatttaatatcttttcttttcaaaatattgaagatttgtggaattgtttttgcaaatactgtgtgaaccaaaccaaacttgtctttagattggattcagcctgcagcatcctaggttaggatctctagagtagatggtattttggataayagatggacatctctaacttttaaattctgtattgatatggtttggctctgtatccccgcccagacctcatcttgtagctcccataattcccacatgttgtgggcaggacctggtggaagatgattgaatcatgggggtgggtctttcccatgctgttctcacgatagtgaatgggtctcatgagatctcatggttttaaaaatgggagtttctctgcaccagc

SEQ ID NO: 883917 - DNA, 697 bp, Homo sapiens
attacttagtatcattaagaagtgagctccaccaggcttgatagagactactgacatttaagagcatacaatgaaggaaatttatttaaaaatcagctgtgtcacatactgtgttaagactttcatacctatgatctcacttagcctcacaacaaccccgtgagctaagtagcattattcttattctgtacrctagcaacttaagatttgaagaggttaaataccttctccaggatcacacagatggtaaatgactgaacaaggagactcacccaagtcttcctgattccaaagcatgtgctctttccattacacacggaatgttgggaattcagattatatttcgttttggcctaggttagagacctgctctggacatttctcaggagtcaaataaaatagaggctaatgaaaacagcaaattcatctcctaacaaaggctaacacacctcagtagcaaaggacagggtctcactaatggaataaaaattatgacatgaccaaatactctgttctcagccattccttctcatagatgcagtgatctcttaaagtccaccgcaagtgttccttcctatgtcctttttttaaaaataaaattatttctctgggagacaggaaagaatcatatatgagataaattcacactcaagtgcttagtgactaatctttctttctaagaagaaaggcagtcaac

SEQ ID NO: 883918 - DNA, 697 bp, Homo sapiens
attacttagtatcattaagaagtgagctccaccaggcttgatagagactactgacatttaagagcatacaatgaaggaaatttatttaaaaatcagctgtgtcacatactgtgttaagactttcatacctatgatctcacttagcctcacaacaaccccgtgagctaagtagcattattcttattctgtacactagcaacttaagatttgaagaggttaaataccttctccaggatcacacagatggtaaatgactgaacaaggagactcacccaagtcttcctgattccaaagcatgtgctctttccattacacayggaatgttgggaattcagattatatttcgttttggcctaggttagagacctgctctggacatttctcaggagtcaaataaaatagaggctaatgaaaacagcaaattcatctcctaacaaaggctaacacacctcagtagcaaaggacagggtctcactaatggaataaaaattatgacatgaccaaatactctgttctcagccattccttctcatagatgcagtgatctcttaaagtccaccgcaagtgttccttcctatgtcctttttttaaaaataaaattatttctctgggagacaggaaagaatcatatatgagataaattcacactcaagtgcttagtgactaatctttctttctaagaagaaaggcagtcaac

SEQ ID NO: 883919 - DNA, 661 bp, Homo sapiens
tctacaaaattgtcacaatatgtttaattttcaaatgctatagattttaggccattgctaggtatgtttatgtaatgcaatgctgattgctcttactttatggggcttcactttaaggtctttgtataaaataatgcatttaaaactcaacaaagatatatattgattctaattaaaggaaattatgaaaaatgtaaagatctatatatattacctattttcctcattgtctcacttattagatatggaagaaatatttcaaatttagacataaaaaattatctttataactccaagaaattaataaggaacttttaatttacttaaaaagatgatattcaatgtgcctgagtgggttatgtatgttaagagagagagagagagagagagagggagagagaaatgacataaataaattttaaaaatrtgaagattaatgtatattcttcagctgagattatttgataattatagaaattactgtaacatcttgggatgttatgagtgccagatactttctagtcaccatgataatttcctgcaaggtccatggattaatgtaaaattttgtgacatgccagcacttacacttttccctttttcaggaatcaataatataaaacttatatttaatgaaagacaacacctgaaaactatcttt

SEQ ID NO: 883920 - DNA, 484 bp, Homo sapiens
aagcattgtcttttctctgcaaccttgccaatatcagttgttgtttttttttgcattttaataatagcccttctgactggtgagatggtatctcactctggtttttatttgcatttttctgatgattattagtgatgtggagcattttttcatgttttttggccttatgtatgtcttcttttgagaaatgagtaaaatttttgaagcattgatcaaatcacattttttgttgtatttgtcttctcacttagctaagccaaaacagatcagccagcaggggtcaggcttttatagtgtatgggtttgaactttccatctctcacagtatcttttargaacctgcaggtttcttgattacaccattagcattgtacttttcagaaatgaatgcttaccagttaattttttaactagaaccaaaccaaattaatgtagaattgtgagactctgtagaagctttctgagacaaaattatttgtttaaa

SEQ ID NO: 883921 - DNA, 703 bp, Homo sapiens
tagagggagaaagggactacatgcaaagaacacatagagagaccacaagtatggctaaatctagaccttatttggatttaagatatatggaacttctttgaaaatgttcattaaacatgtaattctaaaaattgagtagtcactgctggctagctatgatggagcaatacgatttagattttgccctccacttgtcctatggacaaaatatatgaatcaacatttgcagatattagacaacagtcatcatttgaccatgtatgatccctttgagaaagaaagaaaacaaggtgattcttacgttcacaacagatttatacatagaagcacagttctgaacatgaagcagggagaggaatcccaaaaacgagacggcagtatccttgggtagaggagacagagatcggactggagggttctgaggaggtagacatttccagaagttccagaagaactctggagaacagaatgttacccaatacccacactaaaaaatgctgcccaaagaactctgagtctttgcttaatactaacatgggcatgttcatgcaaagaatggctggmcatctgtaaacaacactgtcctacaacacacagaaggctggtaactgttcaagttctcaacatacagaagactgataatgttcaagtcctcacctaccagtgttgagtggctttgatccacttgattcaacagagaccc

SEQ ID NO: 883922 - DNA, 559 bp, Homo sapiens
cccagagatggaggaagggttgcaagaagggcatcactggatgtcatggtgaggaagttagtcctattttcacattttggtgaaattttcgccctccacaattgaattctgcctatttgagaaacagcactgtatattgttcattcattcagagcatacactgcatcctgtaagtgagtacctcaactttgctaagtgctgtctcacagatgatgctaatactgaatcttcaataggacattccattgttacataaagccagctacttctaagtaatgggtgcatgttattattagtaaatttcatgggcmttaacctatttccccttatttttttctttaagaatttctttttcagagcaatattgagtgagacacagttatagttttaaatgggcaatttattagtcccacagatggtatttttgggaaggaaagtgggtactcacactaagtattccaggaagaaaaacatcactgacctctccatgctgcaaggggtccaatatactcagtctgtcctcagattgaggctaatatgcctggagcatggtgctatg

SEQ ID NO: 883923 - DNA, 624 bp, Homo sapiens
atgaccttgacagtttcgatgaatattaatcaggcattttgtagaatcttcctcaatttggacttgtatgatgttttcctcatgattagatggtggttacaaattttggggaggaagaacacagaggtagaatgccattttcctcacatcacatcgaaggttcatgctgtcaacgtgacctgtcatggatgatgtcaaatgcgattatgtggctgaagcagagttattttccaataagagttactctttyccttccctccatgctgtgttctttagaaggaagtcactatgtgcagcccatacttatgggggttgttgcagggggagttattctccatatctttgagggaatagctatacaaattatttggaattcttttgtacatgttatttattcaataactcatgaatatttgttttatacattgggatataatgtaatactgcactatttattttcttgctccaattatcccagctggggccattggaatatctttctgttggcttctatattcctttaacatactccgtttttgttttgtttttagcatttccttatttgatgacactacacgatgctgcagacttgtcttgtatattttctgccccattcctagaatc

SEQ ID NO: 883924 - DNA, 617 bp, Homo sapiens
ggtaagatggggtggggtagggaggagccatttgagcgtctgttctttgcatgttttttggtctcacaattaacctcctagactcctagaggctgggtgtgagagctgtgtatgtacacactggagacagaggggactccaggcaagacatgaaagctatgagagcttcaggatgaccaacccaacatagaaacttacattggctctgctttgatgcatcccatccctttacctggcccaatttacctagccaactgatttcacagcatcagtgagaggcctgcagaagttgacctcaagtgctaatttgaaggctatgtagattaggcccaagtaatacaatttccacagaaatcataaaagcagggactcyaagagacaaaataatgatcttataattgaatgagccacccatttactgcttgggatgttagccatttactatgtgctctaatcaaaagatgaggtagcctctattgaaaccaccagttcaggtgatttctgatcagctgatttctatgtgtaattgacacaaatgagtatttgtgtactgtctagaccatgtcaccatcccgtcagaagctcaggcaatacttatacatgatatgtactagaac

SEQ ID NO: 883925 - DNA, 658 bp, Homo sapiens
caactgttcaaaacgttgtaaagagttgagaagatgacgacgaagaatgatcactggctttggtaagatatatgagaggtgaggaacttaagacagttagtaaagataaatttgaggagttttggtgaacagtaatgtttccagggtcacaaagcaagttaaagccaagcaatttaaaacaggtctctggattccacttcctgtgctatttttgtggctctaagctacctgtcatcctatggataataaagaccctctgaagaactttgagcaggaaagaggggtgctaaaagagagttattgtaaaattaatctgatagcagygtatgagatcaattcaagacagaagcttccatagtagacaggtgcagtgatgagagcctgcattagtagacagcaaaaatggagaggaataggccatagggacagctccaaagaatgcacaaggccagggaaagttagaatgattcccattgagtgccactaatcccaagaatcattcaacaagataggagaaaataaagtgatgaaatgcaaaagggctaagtacttttgaaaaattctattataggatatgtcacacaatgcctgtatttaaaaataagacataggtcaggagtggtggctcacatctgtaatcccagcactttgggaggcc

SEQ ID NO: 883926 - DNA, 636 bp, Homo sapiens
agagcatgagaaaacggatgctcagaaaggttaagcaattgtcaaagaaattcctcaaagatcacacagcagtgggtcactccttggcctcctgcttctcagtgcaaggctgtttccattggcggtacatggacataggtttaagatcccatctgccatggacaaaccgtgggtgaatccctgttggagcttgagtttcctcatacataagaaggggataataaaggtgctggcccatttctccaccactctatgggsgagcccacgtggagaggacacatgaaagtgacctgtcaattttaaattgccaagtagtagatatattgctgttgtcattgatactaatgaacaaagcagttttattgctgaataaggaaacccaagctgaagaaatgttaatgtctaggccctaactaaaacttcctgcttcactgagggctctgagtacgtcctatcagcatagtaaacagtcagaaagcttttatacagtgactaaagttgactcttgaatgccgcaggggttaggatgttgatcttacccctaccctggaccgagcagttgaaaatctgcatatgatttttgactcctccaaaacctaactactaataaactactgttgaacagaagccttaccg

SEQ ID NO: 883927 - DNA, 636 bp, Homo sapiens
agagcatgagaaaacggatgctcagaaaggttaagcaattgtcaaagaaattcctcaaagatcacacagcagtgggtcactccttggcctcctgcttctcagtgcaaggctgtttccattggcggtacatggacataggtttaagatcccatctgccatggacaaaccgtgggtgaatccctgttggagcttgagtttcctcatacataagaaggggataataaaggtgctggcccatttctccaccactctatgggggagcccacgtggagaggacacatgaaagtgacctgtcaattttaaattgccaagtagtagatatattgctgytgtcattgatactaatgaacaaagcagttttattgctgaataaggaaacccaagctgaagaaatgttaatgtctaggccctaactaaaacttcctgcttcactgagggctctgagtacgtcctatcagcatagtaaacagtcagaaagcttttatacagtgactaaagttgactcttgaatgccgcaggggttaggatgttgatcttacccctaccctggaccgagcagttgaaaatctgcatatgatttttgactcctccaaaacctaactactaataaactactgttgaacagaagccttaccg

SEQ ID NO: 883928 - DNA, 641 bp, Homo sapiens
aaaaaaaaaaaatctacttttcttcaaggcgaggaccttatacagaaaatagcatatgggaacagtttcagggaaggtctgagaagactgcgtgtctcctgacctagctctaccatctcatcaacttgctgagctcatatttaagcatacaagagctcttcagactgcacatagattttataatgccacctaccaagggcctaatttggagggctctggtagaggcttatgaaacaccaatatgtagggtgctaaaagccttacctttcattmatttaacaaatatttaatgagcatataccaagtgtcagatgttttgcctggtgccaggtctacaatggggaatcagacatcatctccgtctgccctgcagaaattgtgcctagaggacagccctctcaacacaggttagaactactgttctcaacctggatagatctcaatacatctacacattaactaacatcttcgtctaaaaagcagtattttaaaaaatttcatcatcaataccaatacctgtactgagtattactgtacctactgggttactgccctgtagatctgccttagtcttattcactgtcagtactcccaatatactcacattttggagaaataggatacaaaatggcttatgttct

SEQ ID NO: 883929 - DNA, 641 bp, Homo sapiens
aaaaaaaaaaaatctacttttcttcaaggcgaggaccttatacagaaaatagcatatgggaacagtttcagggaaggtctgagaagactgcgtgtctcctgacctagctctaccatctcatcaacttgctgagctcatatttaagcatacaagagctcttcagactgcacatagattttataatgccacctaccaagggcctaatttggagggctctggtagaggcttatgaaacaccaatatgtagggtgctaaaagccttacctttcattaatttaacaaatatttaatgagcatataccaagtgtcagatgttttgcctggtgccaggtctacaatggggaatcagacatcatctccgtctgccctgsagaaattgtgcctagaggacagccctctcaacacaggttagaactactgttctcaacctggatagatctcaatacatctacacattaactaacatcttcgtctaaaaagcagtattttaaaaaatttcatcatcaataccaatacctgtactgagtattactgtacctactgggttactgccctgtagatctgccttagtcttattcactgtcagtactcccaatatactcacattttggagaaataggatacaaaatggcttatgttct

SEQ ID NO: 883930 - DNA, 641 bp, Homo sapiens
aaaaaaaaaaaatctacttttcttcaaggcgaggaccttatacagaaaatagcatatgggaacagtttcagggaaggtctgagaagactgcgtgtctcctgacctagctctaccatctcatcaacttgctgagctcatatttaagcatacaagagctcttcagactgcacatagattttataatgccacctaccaagggcctaatttggagggctctggtagaggcttatgaaacaccaatatgtagggtgctaaaagccttacctttcattaatttaacaaatatttaatgagcatataccaagtgtcagatgttttgcctggtgccaggtctacaatggggaatcagacatcatctccgtctgccctgcagaaattgtgcctagaggacagccctctcaacacaggttasaactactgttctcaacctggatagatctcaatacatctacacattaactaacatcttcgtctaaaaagcagtattttaaaaaatttcatcatcaataccaatacctgtactgagtattactgtacctactgggttactgccctgtagatctgccttagtcttattcactgtcagtactcccaatatactcacattttggagaaataggatacaaaatggcttatgttct

SEQ ID NO: 883931 - DNA, 619 bp, Homo sapiens
aatccactttctgttttatctgggtcaactcctgcttaatggcctgaaggtcatctcctttcagctttccagacttggaagatccccgctttccactcttagaattgaagccacttttgccccttcgtgaggtgtttcctgatatgcgctggcgtttcgagggcactacagccagagcaatrggaggaggaggaggtacacgtgctgggaaactgtacatcccaccataataatcccgttgcaagttatagtccaagtcaaaagaggagccgtacatctctgctgctgatcgtttcacacctgcgtttcctcggttcacttttggctctgcagccaggttaatatctacaacctggctagcaatcattctgccatcctctcctgctacagcagcccgggcatttttctccttatcatattgaacgaaggcaaagcccttatgaacagagcagcccgcaattttgccatacttggaaaagatcgcctccacatccgatttcttgacaacaagagtgttgagattcccaatgaacacacgggagttcatggagtgaggatccatcttgttggtaacgttgctggccattgtgttggatgataaggtttctcaaaaagccaa

SEQ ID NO: 883932 - DNA, 604 bp, Homo sapiens
tctggtgccctctattattaagtaacctgttttccagtttaagcctcaggaatcttcagttattgatggaaaaaacaaaaggcactgactgagttgtccaatcaataagatgcagcccaggaaaatcaaggcatttaaatgaaatttggttattgtaatcactttcctcccattcttttattggagacagagtttcactcttgttgcccaggctggagtttagagtgcaatggtgccatctcagctgactgcaacctccacctggggtttaaatgattcttctgcctcagcctcccaagtagytgggattacaagcatgcaccaccatgcccagctaatttgtgtatgtttagtagagacagggtttcctcactatgttggtcaggctggtctcaaactcctgactttgggtgattcaagcaagtaggcctaccaaagtgctggggttacaggtgtgagccactgtgtcaggcttttttttgtttttgttttttaaaggtctcctgtcactcaggctacagtgcagtggcacaatcatacctcactgcaacctaaatttcctgggttcaagtgatcctcccacctcagcctcctgagtagctag

SEQ ID NO: 883933 - DNA, 604 bp, Homo sapiens
tctggtgccctctattattaagtaacctgttttccagtttaagcctcaggaatcttcagttattgatggaaaaaacaaaaggcactgactgagttgtccaatcaataagatgcagcccaggaaaatcaaggcatttaaatgaaatttggttattgtaatcactttcctcccattcttttattggagacagagtttcactcttgttgcccaggctggagtttagagtgcaatggtgccatctcagctgactgcaacctccacctggggtttaaatgattcttctgcctcagcctcccaagtagctgkgattacaagcatgcaccaccatgcccagctaatttgtgtatgtttagtagagacagggtttcctcactatgttggtcaggctggtctcaaactcctgactttgggtgattcaagcaagtaggcctaccaaagtgctggggttacaggtgtgagccactgtgtcaggcttttttttgtttttgttttttaaaggtctcctgtcactcaggctacagtgcagtggcacaatcatacctcactgcaacctaaatttcctgggttcaagtgatcctcccacctcagcctcctgagtagctag

SEQ ID NO: 883934 - DNA, 526 bp, Homo sapiens
ttcacaaaatggctgccaacaagaattctgaaatgatgtaaagaaaagcacaacaacatttttgaaatcacgacaaaattgcatttagaaaaaaaaatcaaagcttcaaagtgttcatatgaaaaaaagaaaaaaagacakgatatagttctatgccatcgtaggctgcactgtcaccgttctagaccggctgactgtaggtcacatgggagtgtccttacagaaattagtgacttaccagatctggttgtagtttagaaggtgctcagacctcaggaagagccaagcaggaactccaggcttgaagactttgagtttgtcctgtgggtctttagaagcttttattgacctttctaatcacaactcccacccacgcccctccacgtatccgctgctagcttccaatcaaaaagcgatatctgattgcatttctgaagctccactcagttaatcctgattgggtttttgactgtccgaagactaatggattgaacgagatatccattcatatcacatatgcataatc

SEQ ID NO: 883935 - DNA, 526 bp, Homo sapiens
ttcacaaaatggctgccaacaagaattctgaaatgatgtaaagaaaagcacaacaacatttttgaaatcacgacaaaattgcatttagaaaaaaaaatcaaagcttcaaagtgttcatatgaaaaaaagaaaaaaagacatgatatagttctrtgccatcgtaggctgcactgtcaccgttctagaccggctgactgtaggtcacatgggagtgtccttacagaaattagtgacttaccagatctggttgtagtttagaaggtgctcagacctcaggaagagccaagcaggaactccaggcttgaagactttgagtttgtcctgtgggtctttagaagcttttattgacctttctaatcacaactcccacccacgcccctccacgtatccgctgctagcttccaatcaaaaagcgatatctgattgcatttctgaagctccactcagttaatcctgattgggtttttgactgtccgaagactaatggattgaacgagatatccattcatatcacatatgcataatc

SEQ ID NO: 883936 - DNA, 526 bp, Homo sapiens
ttcacaaaatggctgccaacaagaattctgaaatgatgtaaagaaaagcacaacaacatttttgaaatcacgacaaaattgcatttagaaaaaaaaatcaaagcttcaaagtgttcatatgaaaaaaagaaaaaaagacatgatatagttctatgccrtcgtaggctgcactgtcaccgttctagaccggctgactgtaggtcacatgggagtgtccttacagaaattagtgacttaccagatctggttgtagtttagaaggtgctcagacctcaggaagagccaagcaggaactccaggcttgaagactttgagtttgtcctgtgggtctttagaagcttttattgacctttctaatcacaactcccacccacgcccctccacgtatccgctgctagcttccaatcaaaaagcgatatctgattgcatttctgaagctccactcagttaatcctgattgggtttttgactgtccgaagactaatggattgaacgagatatccattcatatcacatatgcataatc

SEQ ID NO: 883937 - DNA, 526 bp, Homo sapiens
ttcacaaaatggctgccaacaagaattctgaaatgatgtaaagaaaagcacaacaacatttttgaaatcacgacaaaattgcatttagaaaaaaaaatcaaagcttcaaagtgttcatatgaaaaaaagaaaaaaagacatgatatagttctatgccatcgtaggctgcactgtcaccgttctagaccggctgactgtaggtcasatgggagtgtccttacagaaattagtgacttaccagatctggttgtagtttagaaggtgctcagacctcaggaagagccaagcaggaactccaggcttgaagactttgagtttgtcctgtgggtctttagaagcttttattgacctttctaatcacaactcccacccacgcccctccacgtatccgctgctagcttccaatcaaaaagcgatatctgattgcatttctgaagctccactcagttaatcctgattgggtttttgactgtccgaagactaatggattgaacgagatatccattcatatcacatatgcataatc

SEQ ID NO: 883938 - DNA, 561 bp, Homo sapiens
taaccatgtcagtaattacattaaatgtaaagagttgtgatattctatttaaaggcagagatcatagaacagaaaaacaaaacaaaacaaaactagcagtctgctgctaaatgtttaacaaccagctccccagagaaataaatgtcctaatttgtatygattgtgggttttgtggtgtaaagacttccactatggtcaatgtcaaggtacaaggtgacgtctaccagcttgcaaaattcctgaagatgtaacaattagctcttgtgagtcagtatgtgctggccccagcacatcactagttaaaaacccatctatatactgtttacaagaaacacaacataaatataaagacactgataagttgcaactataaaaaatggtaaaagatgtacaatgttactaacaatcataagaaaatttgagtggttacattaatttctgacatagaaaattttggtaaaaaggatattttacgctaataaagggatctacttatgcagaagacatagttctaaatatttgtgcaactaatgacagaacttcaaaagacactaaggaaaa

SEQ ID NO: 883939 - DNA, 561 bp, Homo sapiens
taaccatgtcagtaattacattaaatgtaaagagttgtgatattctatttaaaggcagagatcatagaacagaaaaacaaaacaaaacaaaactagcagtctgctgctaaatgtttaacaaccagctccccagagaaataaatgtcctaatttgtatcgattgtgggttttgtggtgtaaagacttccactatggtcaatgtcaaggtacaaggtgacgtctaccagcttgcaaaattcctgaagatgtaacaattagctcttgtgagtcagtatgtgctggccccagcacatcactagttaaaaacccatctatatactgtttacaagaaacacaacataaatataaagacactgataagttgcaactataaaaaatggtaaaagatgtacaatgttactaacaatcataaraaaatttgagtggttacattaatttctgacatagaaaattttggtaaaaaggatattttacgctaataaagggatctacttatgcagaagacatagttctaaatatttgtgcaactaatgacagaacttcaaaagacactaaggaaaa

SEQ ID NO: 883940 - DNA, 561 bp, Homo sapiens
taaccatgtcagtaattacattaaatgtaaagagttgtgatattctatttaaaggcagagatcatagaacagaaaaacaaaacaaaacaaaactagcagtctgctgctaaatgtttaacaaccagctccccagagaaataaatgtcctaatttgtatcgattgtgggttttgtggtgtaaagacttccactatggtcaatgtcaaggtacaaggtgacgtctaccagcttgcaaaattcctgaagatgtaacaattagctcttgtgagtcagtatgtgctggccccagcacatcactagttaaaaacccatctatatactgtttacaagaaacacaacataaatataaagacactgataagttgcaactataaaaaatggtaaaagatgtacaatgttactaacaatcataagamaatttgagtggttacattaatttctgacatagaaaattttggtaaaaaggatattttacgctaataaagggatctacttatgcagaagacatagttctaaatatttgtgcaactaatgacagaacttcaaaagacactaaggaaaa

SEQ ID NO: 883941 - DNA, 570 bp, Homo sapiens
aaaaagatctaaaattaggggccagaatcttagactagaatttgagaataacaaaatacaatgcttaagctgaaccctaagcttgtacttaactatctctcctctacgctggtcctgctgccacttctgccccggccacggcctctcaggagccatctcactcaaagggccctgctgggctgcccagcttggagccatgatgctcacaggactgccaccccctcctccactttggccatggcccagaccctgcccacttggctcagctctgtggtagctcccargccctacccgagatggagccaacctggagatgggggcctgaggccattccagtcttgggggaaaaggcatccggaagtgcagtgggatgcagggggcatacaggttcttcctgggtggggaatgagaaattaagttgaggtggtgagtaggagtgaaggctgaggagggaggattttaaaggccaggaggaaaaacagctgtcatggatggctgaggtgttcatccccctggggcagagaccggactggaagaatccttgaaggctgtgccagatctaggattttg

SEQ ID NO: 883942 - DNA, 444 bp, Homo sapiens
aagtttaattggctcatggttctgtaggttgtacaggaagcataacactggtatctgcttctggtgaggactcagaaagtttataatcatagtggaaggctgagggggagcagctgtctcacatggtgggattaggaagaagcaagagagagagaaagtgaggtaccacacacttttaaacaagcagattttgaaagaagtcactggctttcaagcrgacagcaagaagggagtggtgctaaaccattcccattcctgagaatccaccttcatgattctatcacctcccaccaagccccacctccaatactggggattataattcaacatgagatttgggcagggacatatagtcaaactatatcagagatgtccgggtcatggggatggatccctcatgaacagattaatgccttccctgagggaggggaagtgagtgagttc

SEQ ID NO: 883943 - DNA, 623 bp, Homo sapiens
ttaatgctgctttacttaatgtggaaagtacaatgtcaaggactaaaaaaaaaaatagtcaaatcttcgttcccaggagtctaaagataaatggcaatactttctggcactaactttttactttaaccctttggaatattttatttctcattctattctgygccacatgatttatttaattattgccttggtttaaggcacttgaaaataaggtcctcttttgcatcccaagcagtgtacaaagtttcaagcattctctcagatattatgagattactcaggggaaaagtgctgcctcagcagaaatgttgtagctgtcactgatttgtggagacatcaaaaggcaatgaagggagaccaaagactgaataaagcagtcatttcaagtataagtaatcccaagaacaaagttttgctcatttatagtttctacaattttagaaagttagtgcctggggattttccttggccccttctgtttgtgtacaattatcttgagattgattttctagcaaatgatatgctcaaaaatgagagtaattcatgagaatgtatttattcagtgactcattaaaactacattcacatttttactaagctatacagttttgattttctatgtg

SEQ ID NO: 883944 - DNA, 650 bp, Homo sapiens
atgattatgtaacagagcttcctatgaatgtttggagaagcaatttttatgtagcttgttgtacttcttccttgcttagaatcactgttgaagcctcactagaaatggaaagttagcttgggatagtggggagaatagcactttaagtccgaaagtttattttgaagttcaaatgggatacacacacacacatacacacacacacacacacacacacacacacacacacacatacaggttgagtatcccttatccaaaatgcttgggacccgaggtgtttgggtttcagattttttttttattttggaatatctgcattataccagttcagcatcccaaatccaaaaatctgaaatctaaaatgctccaatgagcatttcttttaagcctcttgccagtgctcagaaagttttggattttggaacttatggattttgggttttcagattatacacacacaaagagtcatawaaggaactgaggagggaaacagctgactatgacagaatgacaagcttcctgccatataacatatgaagatgaaatcttaagctactagcagtgtgactctgggctagtcatttgtcccccatgagaccctaatgcagagtctttgctcatttgaattcaacatgtatttacttagcacc

SEQ ID NO: 883945 - DNA, 595 bp, Homo sapiens
ttcatagcacagtcacttaataagaatatgtaaaaattccctttccttttcttcaagagaatgcacagaatttatcagaatagagaatatacactcaaactcagagtgttttattttcaaatagtatatcaatgaatataaccatttgccagtagccacagtacattttatcaataacaaatactagtgagatattcaaatcttgttaatatgagatatcattgctctgggaattgccataggaagtctttgagcactacatataaaccagtgattctcagtcttagctgcatactggaatctctrcagagctttaaacatctcaatgcccaggttacagaattacattagaatttcaggggggatttgaagccatcacaattttttaaagctccctaggtgatttccaaggtgatgtagtattgagaactacagagactttatagttatattaacactttccctgtggtcacacatttaatgatttgaactgaaaggtaactcaggtaaaaatcaggaaataagcaaaagcacataaacaaagcaacaaaatcacaagaacaaagcaacagtaacaactataaacttttgtttt

SEQ ID NO: 883946 - DNA, 595 bp, Homo sapiens
ttcatagcacagtcacttaataagaatatgtaaaaattccctttccttttcttcaagagaatgcacagaatttatcagaatagagaatatacactcaaactcagagtgttttattttcaaatagtatatcaatgaatataaccatttgccagtagccacagtacattttatcaataacaaatactagtgagatattcaaatcttgttaatatgagatatcattgctctgggaattgccataggaagtctttgagcactacatataaaccagtgattctcagtcttagctgcatactggaatctctgcagagctttaaacatctcaatgcccaggttacagaattacattagaatttcaggrgggatttgaagccatcacaattttttaaagctccctaggtgatttccaaggtgatgtagtattgagaactacagagactttatagttatattaacactttccctgtggtcacacatttaatgatttgaactgaaaggtaactcaggtaaaaatcaggaaataagcaaaagcacataaacaaagcaacaaaatcacaagaacaaagcaacagtaacaactataaacttttgtttt

SEQ ID NO: 883947 - DNA, 595 bp, Homo sapiens
ttcatagcacagtcacttaataagaatatgtaaaaattccctttccttttcttcaagagaatgcacagaatttatcagaatagagaatatacactcaaactcagagtgttttattttcaaatagtatatcaatgaatataaccatttgccagtagccacagtacattttatcaataacaaatactagtgagatattcaaatcttgttaatatgagatatcattgctctgggaattgccataggaagtctttgagcactacatataaaccagtgattctcagtcttagctgcatactggaatctctgcagagctttaaacatctcaatgcccaggttacagaattacattagaatttcaggggggakttgaagccatcacaattttttaaagctccctaggtgatttccaaggtgatgtagtattgagaactacagagactttatagttatattaacactttccctgtggtcacacatttaatgatttgaactgaaaggtaactcaggtaaaaatcaggaaataagcaaaagcacataaacaaagcaacaaaatcacaagaacaaagcaacagtaacaactataaacttttgtttt

SEQ ID NO: 883948 - DNA, 585 bp, Homo sapiens
ctaacaccttggttatagacttctgacctccataactttgggataatatagttgtgtcattttaaaaccattaagttcatagtaaattgttataacagcaataggaagcgaatacagttctgctcagggaaatgcaagtgaggatatgtctgggataaagtgttagtaaaccattgaatgacttttggcaggggaagaaatgaagcaggatcatattatagaaaagccctacttacagcaatattgatgatagtttgaaatagggtcaactccaggccaggtgcggtggctcaagcctgtaatcccagcactttgggaggctgaggcaggtggatcacgaggtcaggagatggagatcatcctggctaacacagtgaaaccccgtctctactaaaaatacaaaaaaattagccgggtgtggtggcgggcgcctgtagtcccagctattygggaggctgaggcaggagaatggcgtgaacctgggaggtggagcttgcagtgagcagagatcgcgccactccactgcagcctaggcgacagagtgatactccatcttaaaaaaaaaaaatagggtcaactctacaa

SEQ ID NO: 883949 - DNA, 612 bp, Homo sapiens
ggactcataattgcctaacacgctaagctccctgggcaggggaagggcagcatccatccaccaggccgtgcttttcccctcctggagccagggaacctggacggcttggtccccaagaggtccccacagcccaacacactggctacggcagactatggccagagcacctcttcaagcctgaccctgacacatccttcctcactgggcggggcttccctgcaggaactccaacaactctagtcagaggctcagggacagaatctggatctccttgggcctgagcccctaggggtcagggtggccacagtctctgcggaccagcagacttagcctttcctcctggtagttctgaggaatctgggcagcccagaagagtgggttttcccccagcaaagcacacccycctccaccaggggacattcaaagtgctttgttaaatgggtcctgttccctgtgccatccaactgggtgagatcctccaacaggggttgtcagacaccctatacaggagtgatattactggcatcaggttggtgcccctcaaggtcagagatcccaggagaaggagcaggtacccatctttgcttctttccagcctccttgagtgacatc

SEQ ID NO: 883950 - DNA, 638 bp, Homo sapiens
acccaacattctttcagagctgtccaaggtgaaaggggtgtggaagaacaagaacatcggtgctcagcatgaatctgccccatgtcacattggagctcgccatgggaactgagtctcctatcatatcctggttttccagttgacaaaacatggagtgaatgaggggtgcttctgatgaggtcttagaagtcatcaagacatcaaggaagatgtgtctcaggttttggctcaacatttctgattatctggatgtttaaaacattgaatgtttgaaagattattttataaagaaaatggtgacaaaggaaaagaaaacatttttttcccccagagattccctaagggatgtgcacgtagatcttctactccaggctggattgctctgtggtcagtagagatagcatgagatggaacagcagatgcacygtgtccaggtactaggaggagctaggacactggcatcatttatctgtacagctcacttcctgattttacccttccgtaatcacactgaacaactaggtactcacatttaagtgccgtcttaggaattggccaaattaaaaagatacaaatttcccatctaggaaccaagacattaaattgctaataccagatgaggcaaacttccatgggct

SEQ ID NO: 883951 - DNA, 574 bp, Homo sapiens
attctattgcggtcccggcaggctgtttaagtgcatcctatagacctccttttaaaaacctccatgtgttgcttaatgacgggggtgtgtcctgagaaatacatctttagattattttatcattgtgcaaacatcatagagtgtacttatgcagacctggataatatagtcactatacaastaggctacatgatacagccttttgcccccaggctgcaaacctgtacagcaggttactgtactgaatactgtaggcaatgggaacacaatggtatttgcgcatcaaacatacctaaacacagaaaaggtatagtaaaaatacagtattataatcttatgggaccacttatgtatacatggttcgttattgacaaacatcattacatggtccatgactgtatttttattatggtctttattattatactccttattcattctggattttctaccacagccccaattttagttaaaatttttttatagtggcaatttgttacaaatactatctaaaattaattattaataaataggtatgtcaagaggaaaagtaaaattcacctgatttgcatcc

SEQ ID NO: 883952 - DNA, 624 bp, Homo sapiens
aaggaggtgaggatgcagcagctgtggtgggagtctcagaaaacacagcagtgttcacttccagagcagagggccccatctggggtggcagctcccgtgaacagagatgaaatcagagtgaccaactcttcctagttgcctggaactttactggttttagcactgaaagtcctatgtcctaggaacctccccaaacctgggcaaactgggacgcagctcaccccagatgaactggaacagagtgggccaccaaagggagatggcaaaggcctgggaccgcacgggtggcagagtataaaaagtacaagtgaaaatagatcaacaaaaagtgaggatactcccgtggaaggtaagagatgtgttccaggtggcagtggcttataaagatactgtgatgtcacrtgggaagaagccattctgagccttttaaaattttttctgtcttttaaaaaatttccaatttttaattcttatgggtatatagtaggagtatgtatttatggggtacatgaaatattttgatacaggcatgcaatgtgtaataatcacatcatggagaatggggtattcatctactgaagcatttatgctttgtgttacgaacaatccaattatactctttta

SEQ ID NO: 883953 - DNA, 624 bp, Homo sapiens
aaggaggtgaggatgcagcagctgtggtgggagtctcagaaaacacagcagtgttcacttccagagcagagggccccatctggggtggcagctcccgtgaacagagatgaaatcagagtgaccaactcttcctagttgcctggaactttactggttttagcactgaaagtcctatgtcctaggaacctccccaaacctgggcaaactgggacgcagctcaccccagatgaactggaacagagtgggccaccaaagggagatggcaaaggcctgggaccgcacgggtggcagagtataaaaagtacaagtgaaaatagatcaacaaaaagtgaggatactcccgtggaaggtaagagatgtgttccaggtggcagtggcttataaagatactgtgatgtcacaygggaagaagccattctgagccttttaaaattttttctgtcttttaaaaaatttccaatttttaattcttatgggtatatagtaggagtatgtatttatggggtacatgaaatattttgatacaggcatgcaatgtgtaataatcacatcatggagaatggggtattcatctactgaagcatttatgctttgtgttacgaacaatccaattatactctttta

SEQ ID NO: 883954 - DNA, 612 bp, Homo sapiens
ctgcagacacaggattgaactaaatgacaacctccctgccctatctatacagcactttccctccagagctccttaccccactttatttttattcatagcatttatcactacctgaccttttactatgtatatgcttgatttttttattatctgttgatccaaatagaaagtcagctccatgaaaacagagctctctctgtgttattgccagtactagcgcagtgactcacatatagtgtatgatcaataaatatttgctggaaagacaaattctagctctaagacctargattataaaacagaaaacagaatccggtatagtctggtggttaagctcagttgtcaagatgccatagttcaaatctcagctccatcatttctggttgtgtgaccttgggtaagttacttagctctttagggcttcaattttagcttttgtcacaggtaatatggacctaataatatgcctcataactcaaagttgttaaataaatacaataattcatgtaaagtaatcagcacaggatctgagtttaggtcacttgttgctatgcgtgtctgggttcacaaagcatcgactcaccttttccaagctaggatgaaaaaattcag

SEQ ID NO: 883955 - DNA, 566 bp, Homo sapiens
tcattgtggaaataaaacaaatgttgaggtgtccttaaagtctaatcactagtcttatactctaaagggaaactttgataccaagcatgaagaatttaaccctcttcataattccgaatactgggcatataatttgtgtggggattacaacctgaatcttcttaggtacctccggtttctgacacagcagcagtctttgaatcacggagtgttttttccctgccgcttaatctttgtagcagccaatttatagacgggaggagtttttactttatctgttccaaccacacttccactttatacttttgtactgggaagcagctttggctgtctgtggctcagtgtaggtgtgccagtgtgagtgcactttcctgtgtgtgtatctggatattcctaaagatgttggaaataatagtraacaagtaagggagggagaggacctttattgtgtaacaaactgaaggcaccaaggaggctgcatttgttgtgagtcaaaaggtttatacaaagattttcttagtaatgtctaagattttaatagggtaattaatctttttaaatgttag

SEQ ID NO: 883956 - DNA, 567 bp, Homo sapiens
attttatgggaaagttgtctttttgaactgaaacttttcatttggtctcaaggaagagaatgtaactataagatctgtcacatttatttattagtatacacttttctctctatggcagttgctattctggtttatgacaccattatttcaccttacatgattcacgttaaagaggtgagcttctgtgtagtattgcatggcaaatcgcaacacctgctcacttgcattagggaaacatcacatttttaaagaaactgtatgtaatattaaaaggataacatgctaaagttttatgtttattagaattcaaggcattataaaataatatctaaaacaatgtactttaatatagaatgatcactgaactcttccctttgagaacacaaattagaagataaagagcatgctcgatactctgtttagaaagsaaaagattcgtctatgcatcatcatccattctattaaaacacgctttcctggcttcctacttcttgttgcccaagagctcatcaacatgccctgctgtttgatggaggttcaggagtgagtttttgacttgctcctgtg

SEQ ID NO: 883957 - DNA, 605 bp, Homo sapiens
tgtcagaattggggtcctcttggtaatgtcagcatacttgttgcttgctcttaactggattgcttctgaaatgtttcttgaaaatgaaactgcttcaacaataagcttcttaattatgtcatgggctcaccatgagggtatacaaacagatcctcagcagtagctaattytcctttaattgtatctcattcttatgttggaatatcctattttttattcatgaaaagctctaacacatgttaatccattacaggtggagtaactaatacggcacaatatcagaacaggctaatggtgtatgaacctaaccaggtaagaatcatgtaagaacacctcattatcttaattaatgaattttaaaagattccagagtaattagtaattggaatgccaagtgtacacacacagatatgcatctttagcttatatagagaaaaggaagcatctgaataaactgctttttggttcctttttttgttttgttactcaaaacatttcagctcctctagttttgtgctatacagaatacatcaccctttcagagttctgcataatatagaaatgatttgaattgtcctgttgtaacgtccttctggaaggggctg

SEQ ID NO: 883958 - DNA, 605 bp, Homo sapiens
tgtcagaattggggtcctcttggtaatgtcagcatacttgttgcttgctcttaactggattgcttctgaaatgtttcttgaaaatgaaactgcttcaacaataagcttcttaattatgtcatgggctcaccatgagggtatacaaacagatcctcagcagtagctaattctcctttaattgtatctcattcttatgttggaatatcctattttttattcatgaaaagctctaacacatgttaatccattacaggtggagtaactaatacggcacaatatcagaacaggctaatggtgtatgaacctaaccaggtaagaatcatgtaagaacacctcattatcttaattaatgaattttaaaagattccagagtaattagtaattggaatgccaagtstacacacacagatatgcatctttagcttatatagagaaaaggaagcatctgaataaactgctttttggttcctttttttgttttgttactcaaaacatttcagctcctctagttttgtgctatacagaatacatcaccctttcagagttctgcataatatagaaatgatttgaattgtcctgttgtaacgtccttctggaaggggctg

SEQ ID NO: 883959 - DNA, 666 bp, Homo sapiens
tgttcaaaagtaggccacttctttactacttaaagaacatccaacagaggcaagatgatgggagactggaataatatttatgagaaaatgcttaacagtggaaattcctaagtatgtcagtgggttgagaagtacagaagcatagtggggaaaaaatcatatgcatactaaaaatataaaggtttaaattttttgtgtcrtcagtcacaaatctgtatatttgatccaagattaatccacaaatcattaatccaagagcatggctgattaatggaagtcatacttaaatagttctgagattgttctattaacatttggaagtactaatttttttttgccctcaaaagtaccagccaataacttctcacttaactgtcccttctggaccctaatccaagctcatttaactgtgatttgtaggattcaaccacagtgggatgaagcatgtccaatgttgaaaaagcatactttatttcctgctactactctgatttagcacagactatttatccatcagaaggacaacccaaacaagagaaaagcagagatactcttaggttgagatttggacttgttagtaataaacaaacactcatggaaaataatggaaatagattactgacgaaagtgaaggtgttcttgtttatttagtgggtgtgtaaacta

SEQ ID NO: 883960 - DNA, 555 bp, Homo sapiens
tgtgctcagttctgaaaatgtgacctctagatccagccaaacctgaaaagttaattcgacttgaatctatgactgcagtttcagattcctctggttttcttggtgtctctcacatttcacaagggactgcatttggggtctttccaaggagttccctatgaatctttcaaaagatgcagacttacacctctgggctttatagctttttttttttttttttttttttgctttatcatatcgtgttttacatttttgtagttcttgttcaraagttgtttagtgcctcctgttgacagtggaaacagaactaggctattgtttcaaaacacagacactaaatgaaaggaattattacagattataaatatatatttcctgggattttatttggtggtggtggtattttaaatttggattacatcatgtcgccattcaacctggactatcagattgttgcttaaaataatagctttaaattatgagaacccccaattcaggatttttggtaagcacttcagcttcacttgtagggggctggtaatatgcataccagtg

SEQ ID NO: 883961 - DNA, 670 bp, Homo sapiens
tggaacattgtggaggggaaaaaaatcagtcatgagaattgttgaagcttggagtatatgagagtttgttatattattctctcacaacttttgtataagttgttaatattttattatgggaaaattagaaaaagtmagaaactggccttataagaatggctcaaaaaaaataaaaaacctcagtaacatatctagtctattattttttcatagtcaagtttaccactcttttttttagtaacttcttattttaattttagatttgtagaaaaattgcaaagatagtacagataattcccatgtacccctgtgttagtccattttcatgctgcttataaaggcatacccaagattgggaagaaaaagaggtgtaattggacttaaacagttccacatggctggggaggactcagaatcatggtggctggcgaaaggcacttcttacatggtggcagcaagtgaaaatgagaaagaagcaaaagcagaaacccctgataagcccatcagatctcatgagacttattcactgtcatgagaatagtatgggaaagactggccccatgattcaattacctccccctgggttcttcccacaacacgtgggagttctgggagatacaattcaagttgagatttgggtggggacagagccaaaccatataattccacc

SEQ ID NO: 883962 - DNA, 670 bp, Homo sapiens
tggaacattgtggaggggaaaaaaatcagtcatgagaattgttgaagcttggagtatatgagagtttgttatattattctctcacaacttttgtataagttgttaatattttattatgggaaaattagaaaaagtcagaaactggccttataagaatggctcaaaaaaaataaaaaacctcagtaacatatctagtctattattttttcatagtcaagtttaccactcttttttttagtaacttcttatkttaattttagatttgtagaaaaattgcaaagatagtacagataattcccatgtacccctgtgttagtccattttcatgctgcttataaaggcatacccaagattgggaagaaaaagaggtgtaattggacttaaacagttccacatggctggggaggactcagaatcatggtggctggcgaaaggcacttcttacatggtggcagcaagtgaaaatgagaaagaagcaaaagcagaaacccctgataagcccatcagatctcatgagacttattcactgtcatgagaatagtatgggaaagactggccccatgattcaattacctccccctgggttcttcccacaacacgtgggagttctgggagatacaattcaagttgagatttgggtggggacagagccaaaccatataattccacc

SEQ ID NO: 883963 - DNA, 670 bp, Homo sapiens
tggaacattgtggaggggaaaaaaatcagtcatgagaattgttgaagcttggagtatatgagagtttgttatattattctctcacaacttttgtataagttgttaatattttattatgggaaaattagaaaaagtcagaaactggccttataagaatggctcaaaaaaaataaaaaacctcagtaacatatctagtctattattttttcatagtcaagtttaccactcttttttttagtaacttcttattttaattttagatttgtagaaaaattgcaaagatagtacagataattcccatgtacccctgtrttagtccattttcatgctgcttataaaggcatacccaagattgggaagaaaaagaggtgtaattggacttaaacagttccacatggctggggaggactcagaatcatggtggctggcgaaaggcacttcttacatggtggcagcaagtgaaaatgagaaagaagcaaaagcagaaacccctgataagcccatcagatctcatgagacttattcactgtcatgagaatagtatgggaaagactggccccatgattcaattacctccccctgggttcttcccacaacacgtgggagttctgggagatacaattcaagttgagatttgggtggggacagagccaaaccatataattccacc

SEQ ID NO: 883964 - DNA, 670 bp, Homo sapiens
tggaacattgtggaggggaaaaaaatcagtcatgagaattgttgaagcttggagtatatgagagtttgttatattattctctcacaacttttgtataagttgttaatattttattatgggaaaattagaaaaagtcagaaactggccttataagaatggctcaaaaaaaataaaaaacctcagtaacatatctagtctattattttttcatagtcaagtttaccactcttttttttagtaacttcttattttaattttagatttgtagaaaaattgcaaagatagtacagataattcccatgtacccctgtgttagtccattttcatgctgctkataaaggcatacccaagattgggaagaaaaagaggtgtaattggacttaaacagttccacatggctggggaggactcagaatcatggtggctggcgaaaggcacttcttacatggtggcagcaagtgaaaatgagaaagaagcaaaagcagaaacccctgataagcccatcagatctcatgagacttattcactgtcatgagaatagtatgggaaagactggccccatgattcaattacctccccctgggttcttcccacaacacgtgggagttctgggagatacaattcaagttgagatttgggtggggacagagccaaaccatataattccacc

SEQ ID NO: 883965 - DNA, 588 bp, Homo sapiens
tcaaataaattaggtgctttggaattttacagtcaatgtcaagaacatgccatgaggattacatatgaattcagagctattttttttctgaagcatattgcattaaaaacattttgaaatgatttgaagcaatacaatacaacataatacaaataaatgtggaaagagaaataataactgggcaggggcttcatttggaaggggaaaacatccatgcaaggcttggtcctgctaaatttcaaatgtggtatcagggcttgagtttttagaagaaacatcaaatagattcaagtctgctaaagcctgcaggtggctttgttgtacagtgtgggggaaaacctttgctacatagttctcagtctgagaattcattatacactcaatcattctctcctcctcatcagttctaaggttggttcctgcattaaagcccagagtcaatgtacmatggacttagctgtcattgtgaatatagtgtttgtgcccctatgttgtgtctatcttgcgatgcaactacaaatagtccctgacttatcatggtttgacttcaatttttcaaatttaagatgggttcatcaaggcattaaa

SEQ ID NO: 883966 - DNA, 584 bp, Homo sapiens
ctttgtgatgctgaaatatttcacagcttttcaagaataaacaaaaagaatttggtgtaattttagtggaaatggtattttaatcatactctaatatttgttaaaaatatgttaacccctgtatattacacatgaaaattctctttattctatatagcatcatttatttatgatgtatagtttctttcyggtaatatagtttattttatattcacatgttatctacttatttactatagtcttgtcttagttttgaatgtcatctggcaaacaatatcatgcatacttgaaaagagattctaggttctataaggacagagcacagatgttccctatgttaatgaaagtggggccattttggttgtggaaatataaacttcagaaaaatagaaaggcaaagacaggaagtcatagtagggaaaggaggataagaacatcgtggttgaagccaagaagatgaggacgataatgaacattccctagaagcaaggatgtaggattggcaaaggattttaaagaacaagtagctttcttgattgttctgccatgtggcaacattgtgtagccctaggccttcagtaata

SEQ ID NO: 883967 - DNA, 588 bp, Homo sapiens
actggaaggtgtcccagatagcatcagagcaccgagatgttgaaccaacattgtcctccaagagggtggtagaatattacaatgtgctcataaaaataaatggttaaattaaacctatgggcagtgactaaaataactacttccattatataaattcacctatcrtgggcagatgcaccatggctccttcaaagagctattatgacccctgtggacttcagtgtctgaagataacaggttctcagaaatttctgacaaattaataatctaacaagtgaaaatgtttgtataacttggatcaatggttccccatttcccagcgttagtttaaagggatattatgcttttgaactataaaaatcatgacatccttttaaagttatctacatatcttactcaataattagaaaaagcactgaacctgcagtcagagagaaacacaagtcttaaactctgacctgcctctactgagacttcaatttctttatctgcaaattgaaatacttgaacattctactcttctgtatatcatataatctgatgcaaatacgtacaaacaaacagatcctgactgatggtcaagggaaa

SEQ ID NO: 883968 - DNA, 620 bp, Homo sapiens
cctacaggggtatatggcccactgccaggagggacagtaggcctcattttagggagatgaagtctaaatttgaagggagtccaaattcatactggggtaattgattcagattataaaggggaaattcagttagtgatcagctccactgttccctggagtgccaatccaggtaatagaattgctcaattattgcttttgccttatattaaaattgggaaaacaaaacggaaaggacargagggtttggaagtaccaactctgccagaaaagccactcaatgggctcgtcatgtctcagagaatagacctgtgtgtacagtcactattcagggaaagcagtttataggattattggataccgatgctgatgtttcccttatcgccttaaatcaatggccaaaaaattggcctaaacaaaagcctgttacaggacttgtcggtgtgggcagcgcctcaaaagtgtatcaaagcaccatgattttacattgtctaggacctgataatcaagaaagtacagttcaacctatgattacttttattccaaataattttttgggccgagacttgttacaacaatgacatgcagagattactatcccagcctccttatacagccccacg

SEQ ID NO: 883969 - DNA, 666 bp, Homo sapiens
tttgtcaagattgagtttatttattgattgtttgattttcagactgggcctacatctgtcactcaggctggagtacagtggcacgatttcagctcactgcagcctcaaccttctgggttcaagcaattctctcacttctgcctcccaagtagctgggaattacrggtgcactccaacaagccctactaatttttgtattttagtcgagatggggtttcaccatgttggcccggctggtctcaaactcctgacctcaagtgatctcctcacctcagcctcccaaaatgctgggataacatgcatcagccatctcacccaccctagattgagttcagaaattaaaaggagaatcatcaaaagagatagggcagacttaaaccataacattcactttgaaaacacagggggcaggtatagtcttggccctactagaaggtaaagggtgtttacccacaaaaatgatgggctcctctcagaaaaccagcttgcaaagatggaatctgagaatgtgagctggagcagaggccagagagaagattgtggctacacctgggaagggtggctgtcccaagctggaagccacccaggtagaaactgtgggctctacaggatgtgagagagaaatgaacgagggtccatatgtccgtcattgttctatcatctgga

SEQ ID NO: 883970 - DNA, 660 bp, Homo sapiens
ggctggcactcctggtggctgttccactccaactactcaggcttagcagaaatcctgatttcagataaccctcctttttccttcttttccagtctttcttcaattccagaacatatccacattaccctcccactccaaatttttgttttattattttctttcattaaacttttaagtgtaattttaatgctatcctaaataattagtgtgtatacacaggcaaacacacaracacacacacacacacaataaggaggtttgctttaggggaaggatggcttggtcttcaaaattacaatggctagcagggaaaatgtctgtatttcattctaaggaaggtcacctccctgtctataagagaaattgacttctcctaatgcagcaaagaaaaaggcaaaaagtaagttgaattgttgacattaaaaaaaaatagattggacataaatattcggctgcatgtctgtgaaggctccagccaaagtggtttaatgatgctggctcagagaagggctgggagcactccaagactggtcagggagacagtagaagccaccagaaaaaatggtagaagacaccagcagaggtggcacctgggtggcccttacttgactgtcaacttcagagcatttcccccaacctctgccattttgttctggtttc

SEQ ID NO: 883971 - DNA, 636 bp, Homo sapiens
tgaactatttgtaaataagttgcaaacatgatgacatgtcacctctgaatcttctgtttacatctcctaaaataaaggcattttcacatatatctacaatatcattgtcacactcaagaaagtgaacaacaattccttttagcctgggtgatttttgaaaaatagatccctggtctcagacccactaaactggaattttgggagataggatgcagcagccaggaatctatattttaagtgcttctggtgttctaatgtatctagctcagcagtgatttgaagggagcaggaggacaagacaggaggcatgtcacagctgttgcagaagttagagctgagcgaaagagaagacatctcagtggtgctcaggatgaagaccagtattcccaggctgcagaccccacagagttaccacagtggggcayggtggagagtggacaagtgtacaaattatgaaaaaggtgctcttttatctagcctgttgtctgctcgggcaggaaatataataattatcatatgaacatgtatgatggcttcaaggtgaatggcacctgctgaagttgttgcactgcacaacctgcccaataatagcaggggccctgtcttaagtgtccattttctgtggtctcttaatat

SEQ ID NO: 883972 - DNA, 636 bp, Homo sapiens
tctccctgacctgcctgctctatgccccacaccctacgtgccgtggctctgtgcagtgtacgtagatagctctcgcctgggtctgtgctgtttgtcgtgaaaagcttaatgggctggccaggctgtgtcaccttctccaagcaaagccatatggagcatctacccagactcccactctgcacacactcactcccacctctcaagcctccaacctcttggccagattgggctcattaatgtcgttgcctgcccatctgcatgaatgacaggcagctycccatggtggtctgcctgtgagctcttcaagttctaatccttaactccaggattagctcccaagtgcgctgagacccagccagcacacttctggcccttctccctgcctcaatctaaaagcagtgccacaccctccaaagtggaatagaaagaagttcatgagtaagggctgcaaggaattcttatcctggccacatgtcctccgtgcacacacccaatggagttaaccttggaagttgactattttaatgtctgccaggagttctaatcctgcctctgttcccttttctctccttgaaagtccagcacaccattcttgtccttccccagtttcctcgccctccacccctccagcttcat

SEQ ID NO: 883973 - DNA, 624 bp, Homo sapiens
tcttatagctataatttctatatcttttaaagagcagaatccctttcctaaatgatattacacaggaaatccacaatatgaataactgatcaagtgaatacacagatttctagataggataaatcttcattatttggcaatactttatgtggagtctgcttgtccctgtcaccaccatccccagcccttctgtagattcccagggttgagagtgaaaatgactcagaggaagtggttcaagctgagatgaagtgtgcagtaagtcctggagctatggaagcaaagagcttccctagaggaaggtgtagtgggacctargagcagtggcttgaaaagatttggggaatggaaaaagggaaaaggacaggaccagatgaaagaagacaaacaaacaggaagacaagaacagaatgaaagcttcctcaaaggccaattaagtgatccgaaggaaggctatatgaagccttagcaactgctgcatacacagccaccttttaaagaaagtggcccctatccatccttttccacttgctgactattataggctgaattatgccccctaataagatatgttgaagctctgactcatagcacctcagaatatgacattatttgaaactaggg

SEQ ID NO: 883974 - DNA, 624 bp, Homo sapiens
tcttatagctataatttctatatcttttaaagagcagaatccctttcctaaatgatattacacaggaaatccacaatatgaataactgatcaagtgaatacacagatttctagataggataaatcttcattatttggcaatactttatgtggagtctgcttgtccctgtcaccaccatccccagcccttctgtagattcccagggttgagagtgaaaatgactcagaggaagtggttcaagctgagatgaagtgtgcagtaagtcctggagctatggaagcaaagagcttccctagaggaaggtgtagtgggacctaggagcagtggcttgaaaagatttggggaatggaaaaagggaaaaggacaggaccagatgaaagaagacaaacaaacaggaagacaagaacagaatgaaagcttcctcaaaggccaattaagtgatccgaargaaggctatatgaagccttagcaactgctgcatacacagccaccttttaaagaaagtggcccctatccatccttttccacttgctgactattataggctgaattatgccccctaataagatatgttgaagctctgactcatagcacctcagaatatgacattatttgaaactaggg

SEQ ID NO: 883975 - DNA, 624 bp, Homo sapiens
ttttgattctgatgcaaacagcactgtggattttacttcggaaaataccaactcgccaaatcccctcatgttataaataaggaaattaagacattgagaagttaaatgttttgcccaaacccaaacggctaattagaggcaaatctggacttggcactaacttctgattctgtcatttgcaatcaaaatagtcaccatttaagggcacttattattcatcaggtgctgtgctaaatgcattggctcatataatccttccatcaattctgcggagaagacgggtagtattactaactccattttataggtgaggaaacagaggcttagagaggtgaaatgacacattcaggtaccaaaaagcagaacaagactcaaactcagtgcatgtgactttaaactaaagctctcccccactgccccactctgcytcagaagcatagcacagactttaatcttttgtggccctctgaaaagcaggagtccccccaaatttgaaatgtaatgatgcacatgtgacatccaaggacacactttagcaaaccttctctcttccctcaagagagagaatcttcaagatggggcatctttgtaaatctcagaaaaggaatcttcttcaccacaccc

SEQ ID NO: 883976 - DNA, 596 bp, Homo sapiens
aaatgtataaagatgaaaagagcattcatccagtcagtaggcacttatttatcatctacgaagtactgagtattggaaaaaaatctttctacaaacccaataaatgaatgtagggaaggaaaaaaaatccccttaccctcttatttttagtggctggtcttgcaaaataaactgacaaaggcaatttaacaggagaaaagcatacatgcttatttaaaattaaaagttttatatggcacaagagagcttcataaagaagagaaaagcctccaaagaagcagttaggcttggaggcttttatgccattcagacaatgaatgatcaatttgtagagaagtgataagacaaaggaaaggcrtttctgggctttttagggatggtaaactgtgggaaggtaaatacatgggtgacactcaatgatagataacggttactttgcgaggtttgtttttgtaaattattttcagtgccatctcatctctggtgataatgttgtcttcccctaactggtacaaaaagtagggtgggtggaataccttcacaagaagaatttatgttccactttcaggaagatagggagagagcagaaaactcat

SEQ ID NO: 883977 - DNA, 596 bp, Homo sapiens
aaatgtataaagatgaaaagagcattcatccagtcagtaggcacttatttatcatctacgaagtactgagtattggaaaaaaatctttctacaaacccaataaatgaatgtagggaaggaaaaaaaatccccttaccctcttatttttagtggctggtcttgcaaaataaactgacaaaggcaatttaacaggagaaaagcatacatgcttatttaaaattaaaagttttatatggcacaagagagcttcataaagaagagaaaagcctccaaagaagcagttaggcttggaggcttttatgccattcagacaatgaatgatcaatttgtagagaagtgataagacaaaggaaaggcgtttctgggctttttagggatggtaaactgtgggaaggtaaatayatgggtgacactcaatgatagataacggttactttgcgaggtttgtttttgtaaattattttcagtgccatctcatctctggtgataatgttgtcttcccctaactggtacaaaaagtagggtgggtggaataccttcacaagaagaatttatgttccactttcaggaagatagggagagagcagaaaactcat

SEQ ID NO: 883978 - DNA, 589 bp, Homo sapiens
gagacatcatatcagcctttgaggtcccaccaagtaaccgtcttctgtccttgtctatcctaatcccctaagcagtttcagaccctaagtcatgaaaaactttgcaacaccttaaaataccacattctgctttctcttacatgtgttgcaccattatctccctttggagattktaaacttcctgatggctgggacagtatcttacatatctttgttgctcaatggtttgcacttggtaccatctccgtgtgtctgcctgagttgagaatttttcctcaaataagtccccctacaggcaaggagagttgtccttgattagaaaaaactttaatggctatattttgaagaagggttaaggggacttctcctgggaggagtgtaattggaaagatggaaagattatttccagaacattagggattgcagtatttgaagaatcaaagactgtctgctctgtcaactcaagtatgctcctttgcatttaaaagcaatgccatttacttacaaattatagtggctttgatgcaaatgaaccactccaggacagtttcctctcccccagattagctaagaaatgctggggaaattg

SEQ ID NO: 883979 - DNA, 589 bp, Homo sapiens
gagacatcatatcagcctttgaggtcccaccaagtaaccgtcttctgtccttgtctatcctaatcccctaagcagtttcagaccctaagtcatgaaaaactttgcaacaccttaaaataccacattctgctttctcttacatgtgttgcaccattatctccctttggagattttaaacttcctratggctgggacagtatcttacatatctttgttgctcaatggtttgcacttggtaccatctccgtgtgtctgcctgagttgagaatttttcctcaaataagtccccctacaggcaaggagagttgtccttgattagaaaaaactttaatggctatattttgaagaagggttaaggggacttctcctgggaggagtgtaattggaaagatggaaagattatttccagaacattagggattgcagtatttgaagaatcaaagactgtctgctctgtcaactcaagtatgctcctttgcatttaaaagcaatgccatttacttacaaattatagtggctttgatgcaaatgaaccactccaggacagtttcctctcccccagattagctaagaaatgctggggaaattg

SEQ ID NO: 883980 - DNA, 589 bp, Homo sapiens
gagacatcatatcagcctttgaggtcccaccaagtaaccgtcttctgtccttgtctatcctaatcccctaagcagtttcagaccctaagtcatgaaaaactttgcaacaccttaaaataccacattctgctttctcttacatgtgttgcaccattatctccctttggagattttaaacttcctgatggctgggacagtatcttacatatctttgttgctcaatggtttgcacttggtaccatctccgtgtgtctgcctgagttgagaatttttcctcaaataagtccccctacaggcaaggagagttgyccttgattagaaaaaactttaatggctatattttgaagaagggttaaggggacttctcctgggaggagtgtaattggaaagatggaaagattatttccagaacattagggattgcagtatttgaagaatcaaagactgtctgctctgtcaactcaagtatgctcctttgcatttaaaagcaatgccatttacttacaaattatagtggctttgatgcaaatgaaccactccaggacagtttcctctcccccagattagctaagaaatgctggggaaattg

SEQ ID NO: 883981 - DNA, 606 bp, Homo sapiens
ccatatgctaattcatttattcttcccaacaactcattgaggtaggcatatttaccaatgaggaaactgagacacagagaagccaagatcacacagttaataggtagtgaagcagagatttaaatttaaaaaaactggttctagaatacacgttcttaagccctggtaattatttcaattattttacctatttcctatggcacagcaggagaatgaacagggcttagtagttacctgcacagcactatttgaaggatgaaagaatatccgtcttatccatccccaacccagaaaatctttcctattaaccaccgtgttatcagacattttaccattaaamaattaaaggtctgggctgggtgcagtggctcattcctgtgatcccagcactttgggaggctgaggtgggtgggtcacctgaggtcaggagttccagaccagcttggccaacatgtgaaaccctgtctctactaaaaatacaaaaattagctgggcatgatggtgcatgcctgcaatcccagctactcgggaggctgagataggagaatcgcttgaacctgggaagcggaggttgcagtgaggtgagaccgtgccactacactccag

SEQ ID NO: 883982 - DNA, 584 bp, Homo sapiens
ccaagaaattataaccctgggctcaagtgaaaatgaggatcatctgatttcagcttgttaacaaggaatattggagagtctgaatggtgacgaccatccatggcctgttgatatatagtgtgtgcctttctgccctgccttgtttgctggtctgagattttgcaccctctgtgagtggctagagaattaggttacttcctaactgctttcaggctcaccgtttccctcaaaaatcctacattccaattcttgargtcagacttctttggggctacaaggtaaaggcactggccttgttttcctagttcctctcggtgtgatgttagatgtttaatttgagatctttctaactttttgaagtacgcatttagcactataaactttcttcttaacactgcttttgctgcatcccagagattttggtatgatgtgtctctgttttcacttattgcaaagaattttttttatttctgcattaattttgttgtttacccaaaagtcatttaggagcaaggtatttaattttcatgaattgtgttgttcaagagatctttttggtattgatttttgtttttattccactg

SEQ ID NO: 883983 - DNA, 625 bp, Homo sapiens
taatcaagtcagggcagaaatatcattatgacagaaggttcaacaagattgtctagttattacattgtttattttcttctaaaaatgtaatactgtagtttaaaagttcacttagctgtaatttggagttgtgttaaagaaacatttcatattcaagttaaatcagtcttgaattttaactaaaagaccacaaaattttgtaaaatacagcatcaaaagtcttggctaatgaaaaaagttaatataaagaaaatttatgaaatagatgggttatgtaacattctacaaagtattaattctgatagttgctgaacataaaatttgcatttcatataaacttataaatgctttctgacatggtagatatatattttatcggaggcagggaaagaggatataccctttgggaaagaactatacaaagatttttatttgactatatagtttgagaatgagtttctgagtaattccacyttttgctcataaagaacctcggcatttgtgttgttgctcaagtttgatgtggcttctccacaggaactttctagatctatgacagtaagagaccagagcagtgagaatatccaggggctttgctgtgccactgacctcactgagtctgtta

SEQ ID NO: 883984 - DNA, 655 bp, Homo sapiens
ataaaaaaaattgagtattaaaaaataaaactgtttcagcataaggagttatatgggatgatctaaaagtgatctagaaagagggacactaaaggtaattaatgttacaggaaataagtggttgaggacaggatagaaatcagtaggattcattgaaatgggatgtgaaatacagataactggttaaagaaccaaaataaaaaagagtgaggacwtctggatgttgaaaaaaaaaaaaagaaaaacaaaataaagagtaatgctcacatacgtatatattttttaaaaatcctaccatatgtaacaacacataaactttctggggaaaaagtacctctaatccgtcattcaggaaaaaacagtgctgtccttttggcacttttttttcctctacattcttgtatttgacttttgtattttagtcttacattgagttttgtatctttgttttcagttaatataatgcagaaattgtttgcccatatcaaaaaactaaagaaatgttaggtcatatcaaaatgtgtacaattataaaagtgttttgataagtaacttcatatgcaatcacttgtatgcattttgacctattttcttaagaagtaaaccttgcagtggaaatataggactgaaaggtacagagatgtaagatatgatg

SEQ ID NO: 883985 - DNA, 655 bp, Homo sapiens
ataaaaaaaattgagtattaaaaaataaaactgtttcagcataaggagttatatgggatgatctaaaagtgatctagaaagagggacactaaaggtaattaatgttacaggaaataagtggttgaggacaggatagaaatcagtaggattcattgaaatgggatgtgaaatacagataactggttaaagaaccaaaataaaaaagagtgaggacttctggatgttgaaaaaaaaaaaaagaaaaacaaaataaagagtaatgctcacatacgtatatattttttaaaaatcctaccatatgtaacaacacataaactttctggggaaaaagtacctctaatccgtcattcaggaaaaaacagtgctgtccttttggcacttttttttcctctacattcttgtatttgacttttgtattttagtcttacattgagttttgtatctttgttttcagttaatataatgcagaaattgtttgcccatatcaaaaaactaaagaaatrttaggtcatatcaaaatgtgtacaattataaaagtgttttgataagtaacttcatatgcaatcacttgtatgcattttgacctattttcttaagaagtaaaccttgcagtggaaatataggactgaaaggtacagagatgtaagatatgatg

SEQ ID NO: 883986 - DNA, 638 bp, Homo sapiens
tgcaggcatgtacatgggcataagctttcagctcatttgaataaacacaaagaaatgtgattgctgggaaagaggtacgtggaggagagtgtggaactcatcttgatggcattgctgcacccctgaatccagccatttttgtgtatgcagccagaagcactcctggacatttcagtactatcaagctacgaatccccctttttaacctaggacatttaaagtgagttgtctgccatcttatattgaggagttgtgactaatgcactagtactcctttattgattatcaaatgagctrtatttttcctgatgttatatttttatcctatacctgtgtgatcacagagctaaaagcagaactaccatagacccagcaatcccattactgagtatatacccagaggactataaatcattctaccataaagacacatgaatataaatgttcattgcagtagtattcacaatagcaaagacatgaaatcaacctaaatgtcctttaataatagattggataaagaaaatgtggtacacgtgtaccgtggaatatgatatatccataaagaagaatgagatcatgtatttagcaggaactaggatgaagctggaggctattactagcaaacttacgcagggaca

SEQ ID NO: 883987 - DNA, 473 bp, Homo sapiens
agtccctttgactttggctaaaaattctagaactttcgtcttgctggtttcagcctgggctcttggaccacacagaaattcatagcatggaggatcactgctaggcacctatcagtattttaggtaatttgcttgcacccaatctatggtgatgagctttctgagctccccatagaygaaatgctcctttccagcatacatgcccagcatattctggaaatcctagatgtcttccccagaggcaccattaccctctatgaatatcacacccaggacaatgatcaggaggccatttttcagcattctctggctgtcagccagcatctcatcataggtgaggtcccgcgagttaacaaggacataggagtggctgatgcggtccacttccttcatgtcaatgccagagaccacctccaagcacttggaggctcccttgaagggcagggagaaatcagttcttgtatcttttgaca

SEQ ID NO: 883988 - DNA, 730 bp, Homo sapiens
taagagcactttaactcattttggcttctttcacagtaatatactaaagaagtaagagagtaaataatatatcaagatcaactccaaagactaacttctaaaatactaattaattttaatagctacgttatttgtactgtatttaacttctacattcaagtttgctttcatgtaaatatatccatatgtatgtattatatattacacatatgcataccatacattcacatttattatttatgtgtagatatttatattctgtttttaaattaaatttttaagcaatttatttttcaaattgtggaaattatagtactgctagcaaaaacatatacatatatatatatatatatatatatatagagagagagagagagagagagagagagagagatccmccagctataaagtacaaatagttgacttttaccacttaaaaatgtaaatcttatcatatacacacacacacaacacacacacaatgcacctacttaaaaagacaaatatcacactaggaaaaatgcataatatgtagtgaaggtttttttttttttttttttttacccttaatataggaagtactctagagaactaataagaaaatataaaaattcatatgggaaagtgggcaaagtatgtcaacaggaaattgagagaagagatggaaatgggccattaacattaaaaagatgaccaaggtcacccataaatagaacaaataatagcaaga

SEQ ID NO: 883989 - DNA, 620 bp, Homo sapiens
ttccattgtgtgcctacaccgcactctgctacccatccatccaccaatgaacactgaggttgcttccatcttttggctactgtgaatgatgctgctatgaatgtgagtgtacaaatgtctctttgaggctctgctttccattctttttgggtatayactcagaagtgaaagttgctaaattatatggttattctatgtgtaactttctgaggaatggccatactgttttccagagctcctgcaccgttttacatttccaccaacagtaaacaacaattctaatttttcagcaccctcgccaacactcattatgctatttgttttgatgtagctatcccaacaggtgagagggggtatcttatcgggtgttgatttgcttgtggtgttgatttgcatttccctaaggattagtgactggcgttgagcatctttccatatgcttcttggtcatttgtatatcttctttggtgaaattatccttatattttataaacaacacataacagcatttgaaatggtactttctagcattttgacacaactgacaaatgtcaggatctgagtacctgactagctagtggaacattattattgatgcgctaggaagatggatgggttta

SEQ ID NO: 883990 - DNA, 556 bp, Homo sapiens
ttattagtaagaaatccagggagacatctgtacttttctgggaagagaaggtgattgatggcagcacttagtagcctgtctaaatgctgattgccatgtcgattccgtcttctcgtgtctgattcaataactgtgtgggcctggctctgctggacctaaatctctgggatgagttaagtcgatgggaattattcacctccttaaaaacattattagggccaggcagggcggctcacgcctgtaatcccagcactttgggaggctgaggcgggcggattacatgaggccagaagttggagaccagcctggccaacatggtgaaaccctgtctctactaaacatacaaaaattagtcgggcatggtggcacatgcctgtaatcccagctacttgggaggctgaggcaygagaattgcttgaacccaggaggtggaggttgcagtgagccaagatcatgccactacactccagcctgggagacagaacgagactccctctgaacaacaacagaaaatcattaggagagaaaaatggaataatgggcaatgcctagtggc

SEQ ID NO: 883991 - DNA, 708 bp, Homo sapiens
tgatggacatttgggttgtttccatcttttggacattatgaactaaccagcctcttaactagattctgcacagcactctcagattaattttctgaaagtacagctctcattatgtcttccctccaattagaagtcatcactggtttcttattgcctctaggacactgtttaaacttttgagtttggattttattgtgggaaagtgcaaggcatggagtgagcacttatactggrgaaggaatggcaagggaactgtgctttactgagcccttgtccttaccctgccttatctcccaagatcctcaacacaaactctctcttatatttacatggatctaggcatcattcttcaaatatgtttctcattgtcttatctagactctgtttctcctccttgaaatgcctttctgttttatggctaagtcaggcccttctaaaccctgcttgtccatggagcctttccacgttgctgcggccttcagctagctctcccttccctttcatcccctaagcctctcaccgtctgtacggcccatttggccgtcagcatgtggggctgcacaatgagatggggctgcttttctatctcattttctttggtggattgggaacctcttgaggccagggatcaagtatgacttattatcatgatcattagtataagagtaatccctatcatttgtcctaggcattgttatgtgctgggtc

SEQ ID NO: 883992 - DNA, 609 bp, Homo sapiens
aaaggggcctcaaaaagaagccaactctgccaacaacttgatctcagatttctagcatcaagaactgtgaggtaatatatttctgttgtttcagccatccagtctgttgtatttttgttatgtcagcccatgcaaactaatacaagggcttacccacacagaaggggcaggtgtgttgtgcttactaccttccccacgttatccagggtagaggtcaacacctataaaccctccagtatgctttgataaaaagggtctcagatgattctgatgatatgcctggaaaagaagatgatgaacwtaaggggatgatgttacttgttgaccttttttaaaaagattggtgggcatagagcctggggattcagacaaagaaaactcaggaaggataaagagcacatgctaaatccctacttttggccaggcagtgtaggctgcaagagtgaaaaaacagatttcctctagagctgaggcctttgggaagatgccctagaggaagagagaccagaatgccatgtggtgaacttttggctttatcaaaatgtgcagccaagtataagcatgttccagtgtcatatacaggagctgtgaaatcagtagagggctcta

SEQ ID NO: 883993 - DNA, 682 bp, Homo sapiens
tgtatcatatgagtttagctactcatgttctattttgttttctatttgcaaaaaatatcttttctccttcctttactttcagtctacgcatgttcttacaggcgaacttgagtctcttgtaggcagtatatagttgggaggcaattaggattagataaggtcatcagggtggagcccccatgatatgactggtagctttataagaagaagagagatctgagttgaagcactcttgacctctcaacatgtaatgtcctctgccatgttgtgatacaccaaaaaggcccttaccaaatgacataaccatgcccttggacttcccagcacagaaaactctaataaatatattgctattgtttataaattacccagtctgcagcattctgttatagcagcagaaaacaaaataagacaagggktcagaggccaggagtcaggtgaatgcagaattggataataaggaacagagcaaatttggggaaaataaaggaaactaaggaaactataatgttaacagaactgggttacctgtgactcttcactattgggtgcttggtacatgaggagttgattaaaaggatataagcaggaaatatagtggagctctctggctggtgtgattttattcattttataatacagcctacaaggatcccctgaccctggaaacaagggctcaggc

SEQ ID NO: 883994 - DNA, 682 bp, Homo sapiens
tgtatcatatgagtttagctactcatgttctattttgttttctatttgcaaaaaatatcttttctccttcctttactttcagtctacgcatgttcttacaggcgaacttgagtctcttgtaggcagtatatagttgggaggcaattaggattagataaggtcatcagggtggagcccccatgatatgactggtagctttataagaagaagagagatctgagttgaagcactcttgacctctcaacatgtaatgtcctctgccatgttgtgatacaccaaaaaggcccttaccaaatgacataaccatgcccttggacttcccagcacagaaaactctaataaatatattgctattgtttataaattacccagtctgcagcattctgttatagcagcagaaaacaaaataagacaaggggtcagaggccaggagtcaggtgaatgcagaattggataataaggracagagcaaatttggggaaaataaaggaaactaaggaaactataatgttaacagaactgggttacctgtgactcttcactattgggtgcttggtacatgaggagttgattaaaaggatataagcaggaaatatagtggagctctctggctggtgtgattttattcattttataatacagcctacaaggatcccctgaccctggaaacaagggctcaggc

SEQ ID NO: 883995 - DNA, 659 bp, Homo sapiens
atgcaattcgttttcttgacgtatattaagtgtttctctttcccttaaaggactatttaagctttcaaaatatagtgtgttataacatgaggaaggcattgaaatgtcatctttatatagctctggtaaatagtgggagcttttgccrtcagtctacaaaatcttaaatgatcttgcctatgatctactacttaataggtgagtggaatcaatactaacttgatggacagtaattcctcacatgaaaataatgtgggaaaaggtttctttttgccacagcttgcaacttcctcacaatcacattccattcctaagaaattggcctttgcaccataagtgtcttcatatacttgctcatgaatatctgaccttaattggtaagaacatacctatacatgcacaggtatcaaaatatatttggctgaggagcctggctttaaagaaacatggagtaatgaaggaggataccacagatgaagtgtgagaaatgggagcagagctagagaaaaagagatgaaggagtaacaaagagatggacagagctggaagagacagtcttaccgtcactgttctcatgaattatttaagctggtttactattcaaagatttaaggtaattgacaaaagcaaagctgaagtcttggatctgtgctggccaa

SEQ ID NO: 883996 - DNA, 607 bp, Homo sapiens
agtaatgccaaggctgtgataaaaatgtacttaaaatgtataatcaatatgcaatatgctgaaagttatttccttcataaccatttaaactcatgattaaaatgtatatacatatatctcaatataaagatgtatgaacagttatgtagtttttcaaaatgttttttttccttttagaggggatataagcaaaaagagaaattgaggatcaccaaaatagatattctgaaaagtctgtccatctctatcagtctgggcttctctaatgttcagaagcactttttacccattccttttaatccccgagccaarccttacctgattttcagtcttcagaatttgtattactggattctgcaaatctccttgaaacatgtagcatcctacctttcaaattcttaagtagaaatcaaaaagaatatactacttcatctctctcctggctcatgagtgatgatcaataataatttcatgttgtctttaccatgaggacttgattagggagagaatgttttcttttaaaaaccaaattttgcattagttgacactttgttcctgcaattagctacaaaatgcaatacaattgctaacactcttcccatgaaac

SEQ ID NO: 883997 - DNA, 614 bp, Homo sapiens
tccatatttagaaattcccgagctaaataaatttcttggtattgtcatagatatctagagtaggcagatttcatctgaaaaataacactcagaattagaggccttgcagagataaagctataagagaaattatcacagttatgggaaatagcacagacatctaaccataataggagattgattacttttgatagttgagccacacaatgatactatgcagacataaaaataattatataacacgataatgacatggaaaaacaatcataatttactattaactgaaaaaaaaaaataggtaatacatctttgtggagttaaatggccagcccagagttataaaactacttcgaaaaagcaccaggaaataaccaagattcatccatacccaaaccgtgttcacactattgtgtcacattaaaaccccaaaattcaagtttggagtccccaaayaagctataatatccactgccttgaattaagtgaagacttagtataaatttccaggcagatatttttaaaggctttataaaaacaaaggaatgctgaaagtatgtttttggcatcttaaaagaatcctgcctgaacagtatgtctcaaggcctagagacttc

SEQ ID NO: 883998 - DNA, 614 bp, Homo sapiens
tccatatttagaaattcccgagctaaataaatttcttggtattgtcatagatatctagagtaggcagatttcatctgaaaaataacactcagaattagaggccttgcagagataaagctataagagaaattatcacagttatgggaaatagcacagacatctaaccataataggagattgattacttttgatagttgagccacacaatgatactatgcagacataaaaataattatataacacgataatgacatggaaaaacaatcataatttactattaactgaaaaaaaaaaataggtaatacatctttgtggagttaaatggccagcccagagttataaaactacttcgaaaaagcaccaggaaataaccaagattcatccatacccaaaccgtgttcacactattgtgtcacattaaaaccccaaaattcaagtttggagtccccaaataagctataatatccactgccttgaattaagtgaagacttagtataaatttccaggcagatatttttraaggctttataaaaacaaaggaatgctgaaagtatgtttttggcatcttaaaagaatcctgcctgaacagtatgtctcaaggcctagagacttc

SEQ ID NO: 883999 - DNA, 697 bp, Homo sapiens
tagtttcatgtagtctaatttatcaatattttatgtatttagttatttttgcatatggaatttcatgtaaattgaaaagttgtagttggaaagccttaaacaacaaaccttaagaggaaatcacccatattttcttctagcatttctgtggtttcatttttacacttatttagctgttccttttggagttcattattttatatagcatgagatatagggataattaaatgatgataataatagagcccaatccatataataaaataaataccttggagtatatactaataaaaataaataattgaataaataaataaatggagaagaagggcagatctttttacagtagaattcaaattaataaatgtagaatgaatgatatagatagaacattgctattgggcaaacaccacaaaagtgattattgtagttaagaaatgttgatgagtgctaaaattagtgagcaaaacatatgatgaataaacaggtattcatggtatttacataatctcaaagtatttcctaataaaatactaattaatacwaagggaaaactgtatcatccttataatggaatgacctggtgacaccacatttcctaagtgatcaaggttaacatcaccagtaaggagacatagagaaattatgtacctcttgatatcatgcactgggaaagacacacttctgtgttatcccc

SEQ ID NO: 884000 - DNA, 595 bp, Homo sapiens
ctagtttcaataattatactatgggaatagaagaagttaaaatgaggggaaactaagtatgcagaaaatctgtactgatgttgccatttttcagtaagtctaaaattatttcaaaataaaaagttaaaaatgtccctttttgcaatccaacctatttcatccaaagtgaacagtgtaagaactaaagcagctttcatcatcaatgcttaatgaaaacgtatctctaagacaayagagtactcaaacctaaactctagctattggttaactatcatagctgaataccatcccttctaaaaactcttccctcattacacccagttggcatagtgatcatcaaaataacagatacataggaaccagacaaacgaaattctcgctgctttctgcacatgatagctatatgatcttaagtgccttaatctcttagagatgtactttccatatctgtgaaattgagataatccccaccttcccatgaagcataataaaaattaagtgacacactgtgttgtcataaagattaaatgagttaaggtgtaaaagtgcctcttacagtgtcaaaaacctagtagacaccaagtagtaactactc

SEQ ID NO: 884001 - DNA, 595 bp, Homo sapiens
ctagtttcaataattatactatgggaatagaagaagttaaaatgaggggaaactaagtatgcagaaaatctgtactgatgttgccatttttcagtaagtctaaaattatttcaaaataaaaagttaaaaatgtccctttttgcaatccaacctatttcatccaaagtgaacagtgtaagaactaaagcagctttcatcatcaatgcttaatgaaaacgtatctctaagacaacagagtactcaaacctaaactctagctattggttaactatcatagctgaataccatcccttctaaaaactcttccctcattacacccagttggcatagtgatcatcaaaataacagatacataggaaccagacaaacgaaattctcgctgctttctgcacatgatagctatatgatcttaagtgccttaatctcttagagatgtactttccatatctgtgaaattgagataatccccaccttcccatgaagcataataaaaattaagtgacacactgtgttgtcmtaaagattaaatgagttaaggtgtaaaagtgcctcttacagtgtcaaaaacctagtagacaccaagtagtaactactc

SEQ ID NO: 884002 - DNA, 595 bp, Homo sapiens
atttggtatctgtctcaatttttccatctgtgaaatctgaaaatggtatttgttgtacatacccaacacagggcatgtacagcaggtaagattaatgcaggtgccctgctttgcacagtaaaaaatgctgcatgaatgctgagttgtcattgcttcacaaagaaggcagtcaccttcaggctcttcaaaggtgagagttgagtgaattgatttgtggaagactccctttaaatcttaactctcctgtcttgttcagatacagtccaacgtacatatagattttcactctgaagttttgtaaagtgagaaatatttaygacacttaaggaagttactggattcttggaacgtcccttaaatctctgttcatcatattcccatttgaagcgtacgtgatttgcatgcccctgttgtcttaaaatggcctaatgtcacagcagatccaggggttgtgtctttgtcacagggaagatgaatttattgatgaaaggatgagctaatcatcagtgttggccatcatgtcctgttgcggtggtgaagtgtgtctccagcttgaggcatttctcatagtggctcctctctctgggaacgccat

SEQ ID NO: 884003 - DNA, 630 bp, Homo sapiens
gctcaagggtgcttagcttgaaaacaagaacaaaatatgtctgatcacgcccgtgtcaactgtggttaagtgtgggaaccaggataaggacaactgaaggcatggattgagttgtaaggggccgcctccttttccctaggcccagwtattgtcaacatgagggtttgttctagagctactgtcttatctgccacattcctttttcataagaaggcaatttggtagcatcagaatttatcattgtttttgtccaaaaatgtgtgtcccaggccaggcgctgtggctcatgcctgtaatcctagcactttgggaggccgaggtgggtggatcacctgaggtcaggagtttgagaccagcctcaccaatatgatgaaaccccgtctctactaaaaatacaaaaaattagccaggtgtggtggcgtgcacctgtagtcccagctacttgggaggctgaggcgggagaattgcttgaacctgggatgcagaggttgcagtgagctgagatagcgccactgcactccagcctaggtgacagagtgagactctgtctcaaaaaataaaaaataaaaaataaatgtgtgtccctccagtgccgcttgccccttgttctcccaagcaccagggggaccc

SEQ ID NO: 884004 - DNA, 699 bp, Homo sapiens
attaaataacatttatatttcataggagctcaaataatgtttaatcaaatgtttattaatgtaaactaagaaggcatcacagagataaaactaatataagctaagaaaacatcagataaattacagtttcaggatctgtattttacagacaaggatactaagactcagagggttaaggggcttcctcaaggtcacacacctagttgggacagagctggggctggaatgtaggtcttccatctccgattgcccttctctttccattccagcatgctatatagctcatattaatttaatattaattgtggaaatagtgtaatatataatcaaaggcagactcatttttaaaaatggttaatttacttatraaactataaactttgtatttttctgattcacttttccaatgtcacattagatttatttcaagttgtgtgaatgttattgctggtatttctgatgtgaatgaaatagactcaattccactctccctgctggtctatcagaaaaagccaaagacagcatctaatatttacacctagttttaatgtgcagcctcacttacataaaccaatttgcacagtaaatttcccattattttaagtaatagttaattagtaatgccaaacctgaggaggaggggcctgaaaaggtgacacttttaatataagttaactgagattaaggattttatttcct

SEQ ID NO: 884005 - DNA, 610 bp, Homo sapiens
aaagtttatgcttacaaccattttgcatttaagctttctgtcatttagaagacattgacgttgtcattactattttttatacatgaattatgtgcatctataattaagatgacaactgcttgtccagattacttatccctgtaaaaaaatgtttccgaacaatgtgaagtgtgagtaaataatacatcctgcataaaatgttttgtggatcaatgagatggcttattagaaacacttagcttcttccaagaagggtttccaaaatrgcaaatgtagtagaattctttataacacttgtacctggagtcagaagtcacacgtaacatcagactaactatatcagttggggcttttagggttgtgctttttggattttagagggatgtgatttgacctttgattaagaaggcatcatggggctgggtgtgggggctcacacctataatctgagcactttggaaggctgaggagggaggattgttgagcccaggagttcaggacctcagcctgggcaacacagcaagatcctatgtctaccaaaaaaaaaaaattggctgggcgtggtggcatgcacctaatagtcccagctactcgggaggctgaggtagga

SEQ ID NO: 884006 - DNA, 584 bp, Homo sapiens
gcttacacaattatgaaggctgagaaatcttatatcgtctgtctataagctagaggcctaggaaaacgagtagggcagttccagttcaaacctgaagggccagagaaccaggggagccaatggtgtgtaagtgtcagttgagtccaaaggccccagaaccaggggcatcagtatccaagttgaatgtcccagatcaagacagagtgaattcattcttcctccaccattttgttcarttcaagccctccgtggattggatggtgccctcctgtattcggcagatcttctttattcattccatcaattcaaacacaaatctcttccagaaacagcctcacagacacacccggaagtaatatttcatcagccatcagccttagcccagtcaagttgacatataaaattaatcatgacaggtgttttttagcacagacagtagtaaatcactactactttgagcactcactaggtgctggaccttgcacttgacaaatggtataaatgatcaggaaagtatcctgatctagaccctaagagagaggattcttggatctcgcccaagaaagaattagaggtgagtgcac

SEQ ID NO: 884007 - DNA, 610 bp, Homo sapiens
ttagtattgatgttctattggcaaggtttccagaccagatttgatttataagaacagcactgcatataagagtgtacattgcttagatgggacatccaggaactgtgttaatctacattttcaggtacttctactcaagagaagcacagaaaatatctttacaaagttccaaaattaaattttagaaaaaggtttgaacaaaaatgtttgcttattaatttatccatggttactccagcgagctctctcatgacaactcatggmatgctttactagatgctgggccctatgcatgggtttcatctgatattaccctaaaaaggactcttcacatagatatcataaccttcagtttacagtttgagggagctgcattggatctcacaacgagcagatatgagcgctggacttccagggtcctcgaaagtagcaatcactgtgagtacatgatggcagccgacacatagaatggacgtggtccatacaggccatgactagggcaggttgtctcactcacacaaggcctgttcatttattcattcatttctcttcacttgtttaataagtacgcattgagaagttaccatgtgccaggagaacacaaaaatga

SEQ ID NO: 884008 - DNA, 573 bp, Homo sapiens
actcgatattaaagttacttaatgatgcatgttaattttcccatagaaagactatatgttagtttcagggcccactagggtctaggtgctctcctgtggtgaggtttgcaggagttggtggtggggatgtggactkctggaggtctctcacttaccctttctccacactgtggaggctctctgggctcccatctggcctgagctggcttcctggcatccctctccttccatgtctccagtatttcctgtgacttctctgttgaactcaagtgttctctcttagatgctttattcaaaatgtgattagctacttgctagtttagtttttctttgtggaggaagtgagtgctgtatgtctctagtcagcccccttgaggcttctcttcctgtggcttcatttttatcatcattatagatttttgaaaactaaagatataacttctgtactcttgcatattagtggattttttgacttgctctgaacatttccgtttcaaatcttgcagaaaaaataggtcttagatgaatctttggattgcatttttggatcaaacccctgaagatatccagtaa

SEQ ID NO: 884009 - DNA, 540 bp, Homo sapiens
agatgctgccagtctctttgcacagcaagagtgacctttgttccagttaccaagaagttcctcatctccatctgagaccacctgagcctggatttcatttttcacatccctatcagaattttggtcaaatccattcaacaaatctctaggaagttccaaactttcccacatcttcctgtcttctgaaccctccaagtctctaggaagttgcaaactttcccacatttcctatcttcttctgagccctccaaactgttccaacctcgcctgttacccagttccaaagtcacttccacatttttaagtatctttacagcagcaccccaytctaccagtaccaatttactatattagttctcatgctgttaataaagacatatctgagactgggtaatttataaagaaaaagaggtttaatggaatcactgttccacatggctgggaaggcctcacaataatgggggaaggcaaaggaggagaaaggcacaccttacatggtggcaggcaagacagcatatgtgggggaactaccctttataa

SEQ ID NO: 884010 - DNA, 486 bp, Homo sapiens
gggcccaaatggtgcgagtctctttgcatagcaagagtgacctttactccagttcacaagaagttcctcatctccatctgagaccacctcagtctggacttcactgtccatatcactatgagcattttggtcaaagccattcaacaagtctctrggaagttccaaactttcccacatcttcctgtcttctgagccctccaaactgttccagcctctgcctattatcctgttccaaagtcactttcacattttaaagtatctttatagcagcaccccactctactgataccaatttactatattagtctgttcccatgctgctaataaagatatacctgagactcagtaatttataacaaaaggaaggaagtttaactgactcacagttccgcatggctgaggacgcctcacaatcatggcggaaggcaaaagaagggcaaaatcacgtcttacatgacagcagacaagagaacatgtacaagggta

SEQ ID NO: 884011 - DNA, 655 bp, Homo sapiens
tgtatctgtctctcttgcatggttttaagcttccggatgtcagagaccatgcctaattcctctaaatattccctcaaagcactcctaatatgcattgtgggagttagtactcaataaatacttgctgattaggagaatacttagaacaggggtgtctgatcttttgacttccctgggccacattggaagaagaagaattgtcttgagccacacacaaaatacactaatactaatgatagctaataagcttaaaaaaatttttttwaaaaatcacaaaagaatctcataatgttttaagaaagtttgcaaatttgtgttgggctgcattgaaagccgtcctgggccccatgaggcccgtaggccacgggttgggcaagtttgacttagaagatttcgatgacctgtttagttctccaagttggaattgacagtcagaggcttcataataaggaatatgtccttaggctaatttccaggaggcaaatgctatttaactgtatatctttcagatctaggttgcagccatttccaacaattaataaagtattttaatacatgaaagagaaatttctggttcagaagatacttctctgatcacacacgtcgtagggcattgtacatcagggcctttggccaccaaacttctaagtagcta

SEQ ID NO: 884012 - DNA, 655 bp, Homo sapiens
tgtatctgtctctcttgcatggttttaagcttccggatgtcagagaccatgcctaattcctctaaatattccctcaaagcactcctaatatgcattgtgggagttagtactcaataaatacttgctgattaggagaatacttagaacaggggtgtctgatcttttgacttccctgggccacattggaagaagaagaattgtcttgagccacacacaaaatacactaatactaatgatagctaataagcttaaaaaaattttttttaaaaatcacaaaagaatctcataatgttttaagaaagtttgcaaatttgtgttgggctgcattgaaagccgtcctgggccccatgaggcccgtaggccacgggttgggcaagtttgacttagaagatttcgatgacctgtttagttctccaagttggaattgacagtcagaggcttcataataaggaatatgtccttaggctaatttccaggaggcaaatgcyatttaactgtatatctttcagatctaggttgcagccatttccaacaattaataaagtattttaatacatgaaagagaaatttctggttcagaagatacttctctgatcacacacgtcgtagggcattgtacatcagggcctttggccaccaaacttctaagtagcta

SEQ ID NO: 884013 - DNA, 541 bp, Homo sapiens
tccaggaacttccagtcgacatcctcatttcctctcacacaccccacattcagtccaccaggaaatcctactgacccagcttccaaataaagtctatccgggtttgactctttctctcatctccactgccagccttctggtttgtgccacccgactgatctcttggcagagtgatctgattacctctcctctgctcaaaaccctccaaggactcccatttcagagtgaaacattcagtcttttccaatggcmcacaaggctctaggtaattttaaattgtaaatggtgtgaagcaaaaacttcagagttagcctagtcatgcctttcaaaggtcaacacagactagcaaccactaagctaatgcctaatcaggaaatagtcctttgactagatgaagacctaggatgaaactccgtttcacaaatcatatacctaatctgttccagcttacacaggcactcctggcctcactaacaagacgcaactcagatgctcaccatcaactgtacacacgtttctgtgtctgtctccttcagagtga

SEQ ID NO: 884014 - DNA, 650 bp, Homo sapiens
aaagggtctgtttccttttgtttaacatgtcttccttattttgaagtaatcattataaagttccgacattgctgttacagactcagctgtgttcataaaacgaagactgcagaattgcaaaaaatcatctctaaagaccaaatcaattattttctaagtgaataaaatccattgcattgtcaatctaattaactgtacagaagcccaacattaagatggccctaaaacccttgaatcaaaaaaatggccaattcagaggcaatgtatagctatgatttaggattaaaggaaaatcattctgccagataatgtctcctttttttcatatttgtaaaggtagtgatattttktgctcctgtaatcctgacttcaaatttctgaaagtaactaaacattgcaatttttaaaagggtttccaagcaactatatgaattcttcccaatccacaggatgaaaatatttgtagtgaatccagttttaataacgtggtggccttgtttttgcacttagcaaagatggtttcatcaatcacaggaaatgacacttctgacagaaagaaaataagatgtaaattagctagaagagagaacagagcagtgacttttccatttggaataagaaaggctcagaaaagcaaattgtcatgcagg

SEQ ID NO: 884015 - DNA, 738 bp, Homo sapiens
caaacattttcaggactttgtctcatttttgttagtagcacggatcactcctacacctcaccagttcatcctccattaaagagactttagcaaggatatttttctaaaccaaagggacttaatctagagaacctttgaactgtaggcagtgaaatcaggagtgacaccaaagtggtgtgcattgccctgagctaagtggaactctcagagtggtttctgatgggaaaatgggctcgtgacagcctcactcaggaagagctgctgcaaagggtgtagcctgacttccagggaaagagagaaacaggagaatggatatgggcatggtgcaaagagtaagaatcatgtcacacagaggcaagaataatatcctactggtggcttgagatacaaataagcagcagcagaaagagggtgtgtagccatggccrgtaagcaaaacaggtggcacctccgtgactcatgttctgaggaatatcaggtaacctgggacaggaccagcatcaagtctcacccttgcagagtctatttacatggatataacttacaaatataatgaaggtcattgtggaagtttcatttttatggccctaaattctttgacaccctacctattcagtggtgcaatctatgtcctctctgcttgcaagcttgcaattcacttgtacccaacagaatacagtagaagtaatgttatgtgacttctaagggtaggtcagaaaaggaaaggtagcttccact

SEQ ID NO: 884016 - DNA, 607 bp, Homo sapiens
tcctatggagttatattcccagggggattatggctgcctctgctgagttatataggtcaccaaagaagtgagaaaaaagctggcagtcaccagtctcacccctctcccattcctaaagaccagtcttactcccaccatgcccccgcccccctcaacagcaccaagtctatttccaggcagctggtgaccagggctgagaacttgccccagaccacgagcctctccattgagaaagcaagcagactcacagtttttcagcatctcagggagcctgcagtggcgatccagttccttcagagggtctgtggattctctcagctttccttgtatgttcctgtggtagctcttgragcaaaagttcaaaatgagagtctccacacgctgatctatctgtccaagtggggctgcaggctggtcctgcctcctatctgtcatcctaatcccttcctagaaatttcgtttttatagctttactgagatataatttaaataataaaatttacttacttcagtgtgcaattgaatagtttttagtaaacttagagttctgcagccatcacctctatctaattccagaacatttttatcaccccagaaagaaacacct

SEQ ID NO: 884017 - DNA, 622 bp, Homo sapiens
ccagtttagattggttttgacctgcttagactggccatgaatggctgcagccaactttcacaagaattgactgttttttaccatcttacactgattttgactggcttagacttcccatgacaggccaggccataactggccacaactggctttgaccagcattcattttgaccagcttagacaaaacatgactggctgtgaccagctttgaacagaattgactagttttgactggcttagactgaatgtgaccagccttgactggtygtgatcaaatctatcagactgtgactggatttgagtggaattgactagtttttgatcgatttagactgactgtgaccatctatgaccagctgtgtttggcattgtccagaattcagtgttttttactggtttatattggctgtaactggctttggccatatgtgactggctttgattggaaccaactggttttgacaggcagtgactggctttgtccagaatcaaccggcttataccagctgtgaccagccatgactagttttaccaggatcaactggttttggctggcttacaccagttttgactggagtaggttggctacaaccagttttgaccagaattgactggttttgac

SEQ ID NO: 884018 - DNA, 714 bp, Homo sapiens
agatcattgggtcctgtttttcttttaaatccattcagcccctctatgttctttcttttctgagacagcgtcttgctctgccacccatgctagagtgcagtggcacaaatacagcttactgcagcctaacctcctgggctcaagcaatcttcccacctcagcctcctgagtagctgggaaaactctatgtctttatagagtttagaacatttatgttcagtgtcattattgataagtaaggacatactcttgccattttgtcatttgttttcttgttgttttgcagttttctcttcattctttctttcctgttttccttttagtgaaggtgattttctcttgtggtatgttttaatttattattttttattttgtgtgtgtgtgtatctgttgtaggttcttgatttgaggttaccatgaggcttgcaaataatatctcataacccattgttttaraccgatgacaatttaataaagattgtataaacaaacaaattaacaaataatcaaacaggaaactaataagaactccaactttgttcccccaattttaaaattcttgttgtttctatttagaccttattgtgttttctatgtcttgaaaagttgttgtagttaatattttggagaggtttatcttttagtctttctactcaagacaagggtagtttctacactacaattacagtgttgtaatactctgtgttttcctgt

SEQ ID NO: 884019 - DNA, 714 bp, Homo sapiens
agatcattgggtcctgtttttcttttaaatccattcagcccctctatgttctttcttttctgagacagcgtcttgctctgccacccatgctagagtgcagtggcacaaatacagcttactgcagcctaacctcctgggctcaagcaatcttcccacctcagcctcctgagtagctgggaaaactctatgtctttatagagtttagaacatttatgttcagtgtcattattgataagtaaggacatactcttgccattttgtcatttgttttcttgttgttttgcagttttctcttcattctttctttcctgttttccttttagtgaaggtgattttctcttgtggtatgttttaatttattattttttattttgtgtgtgtgtgtatctgttgtaggttcttgatttgaggttaccatgaggcttgcaaataatatctcataacccattgttttagaccgatgacaatttaataaagattgtataaacaaacaaattaacaaataatcaaayaggaaactaataagaactccaactttgttcccccaattttaaaattcttgttgtttctatttagaccttattgtgttttctatgtcttgaaaagttgttgtagttaatattttggagaggtttatcttttagtctttctactcaagacaagggtagtttctacactacaattacagtgttgtaatactctgtgttttcctgt

SEQ ID NO: 884020 - DNA, 675 bp, Homo sapiens
tctatcattgatgggcatttagcttgattccaggtctttgctattaggaatagtgccgcaatgaacatacacgtgcatgtgcctttatggaagaatgacttatattcctttgggtttatactcagtaaaaggattgcctgatcaaatggtcattctgtttttagctctttgaggaactgtcacacttctttccacaatggttgaactgatttacactcccatcaacagtgtataagtgttccctcttctccacagcctcactagcatctgttatttttggactttttagtagtagccattctgacaggtaagagagggtatctcatagtggtttggatttgcatttatctaatgctcagtggtgtgttttttgtcatatgcttctttgctacacatatgtctcctttcagaaagtgtctgttcatgtcctttgcccactttttcatggagtggtttgttattttcttgtaaatttgtgtaagctccttatagatactggatattagacatttgtcagatgcatagttcrcaaatattttctcccattctgtaagttgtctgcttactctgttgatagtttcttttgtggcacagaagctctttaattagatcccatttgttaggttttacttttgttgtgattccgtttgttgtctttgtcataaaatctttgct

SEQ ID NO: 884021 - DNA, 661 bp, Homo sapiens
ctaatttatttaacaaatttagtttagacattagagtatttcttatatttcactgttgcaaatagtgtccttgacattctcattgaaataccttgtattagttttctactgctgcatagtaaatcataacaaacttagcagcttaaaacaagaaggatttattatctcacaattttcatgtagccttgactaggggaggatctgcttccgtgcttcttcaggataatgatggaatcattattttgcrgttctatgactgagttccttgctttcttactggttgttggccaggcaccatgctcagctcctagaggccactcttaggttcctgctgcatagtgccttccataggtcctctcacactctgaagctctttgatttcaggaaaggctcagtctctttacagggttcacctaataatgtcagatctatctgtagaatcttcctttaggttaactctaaagtcagctgattaataatataaatatagtaaagggagtgattcccattatatgcacaggtcttgctcacattcaagggagagaattatggaagacatgtacaccaacaggtgggaacattggaggttatcttataattctacttattacatatccttagatcctgtgtgagtttatctgcaagatagattcaccgaagt

SEQ ID NO: 884022 - DNA, 661 bp, Homo sapiens
ctaatttatttaacaaatttagtttagacattagagtatttcttatatttcactgttgcaaatagtgtccttgacattctcattgaaataccttgtattagttttctactgctgcatagtaaatcataacaaacttagcagcttaaaacaagaaggatttattatctcacaattttcatgtagccttgactaggggaggatctgcttccgtgcttcttcaggataatgatggaatcattattttgcagttctatgactgagttccttgctttcttactggttgttggccaggcaccatgctcagctcctagaggccrctcttaggttcctgctgcatagtgccttccataggtcctctcacactctgaagctctttgatttcaggaaaggctcagtctctttacagggttcacctaataatgtcagatctatctgtagaatcttcctttaggttaactctaaagtcagctgattaataatataaatatagtaaagggagtgattcccattatatgcacaggtcttgctcacattcaagggagagaattatggaagacatgtacaccaacaggtgggaacattggaggttatcttataattctacttattacatatccttagatcctgtgtgagtttatctgcaagatagattcaccgaagt

SEQ ID NO: 884023 - DNA, 569 bp, Homo sapiens
actttatctgaagttgagtcaagttatagagctgagagaaatacaggggtagaggatgcagcagaaaggccctggaatctcactaggtttccaagcagcccattcctgcctggcaccacagggatccatctggagggtggccagaggagcaggggataaaactccgcaggcagaagtaattctctagctgaaatttgtaacaatttaaatggggcaagaagcctggccagaacttgggggaagggcattaatcaggtgtgcagacttcacaggcaggggaagaaccaaagtccttttcttttgcagctgggaggcagataacctccaggaaattttcaagcctgtctcactctctgcctggaaacagactcarggttgttgcagggggcacagtgggagtgagaccagcccttcggtttgtatggaagctgggtgaggccttgactgctgtgtttcccccacttccctccgacaacctgcatgacttagcagaggcaggcataatcctcgtaggtacacaactccagtgacctgggaatctcacctccatcccccacaccagccacagc

SEQ ID NO: 884024 - DNA, 596 bp, Homo sapiens
caatacagagaatactcaggtcagttgcaggcagggtgagcaaaacttctggagagccttcattgtggttttctcaagaatgaataggtgaggcagtataagtggattgaccaaatttaggattggttagtttcaacaatttcagtgtactccaggatgtaggggctgcccctagttatctcatgtctggccctacagcgattagggcagaaggttagtgtctcacgaatgtaaaaattagataaagcaggtaggtggacggcaaggctctggattggttagtttgtatatgaaaagcatactcactggagagttgcttgatatctctaagactctgctaattcttggaggggcagtccctctytagttatcaaggccctaatatgtcaaacatcggatacaaaaactagaaaacatggttagtacacatccctagcaaattcacttggtttttgtttttattgttatcttttttactacacacagtaagatacaatttgtgtatggctgaaaacaaaactaatcaatatatcatttaagtgcgtacacatatgctacaaaactaaaaaagctcattaattttgtacaattttttc

SEQ ID NO: 884025 - DNA, 649 bp, Homo sapiens
ttgtagggacatggatgaagctggaaaccatcattctcagcaaactatcgcaaggacaaaaaaccaaacatcgcatgttctcactcataggtgggaactgaacaatgagaacacttggacacaggaagggggacatcactcaccctgttgtggggtggggggagggggkagggataactttaggagatatacctaatgtaaatgacaagttaatgggtgcagcacaccaacatggcacatgtatacatatgtaactaacctgcacattgtgcacatgtaccctagaacttaaagtataataaaaaaaataataatagaattacttatcttggaaatattcaataaatgagattggccttaccctctgattaattcaagcttgagagactttacttaattgtatgtcaatattctacctgacattacttccatcctcgcttaccattttctcccaactaagcttttctaacgaggaaaaaagtaacttacataaagagaaacttctgctatctggtgttataacagatatgccaggcttccattctacctcatttctacatgagaaaattgttatccatttccatgatgccaaatgacaataatacttgaaaaccagtgatgcctacctgagtgatgtccattcctgagt

SEQ ID NO: 884026 - DNA, 620 bp, Homo sapiens
aaatcaaaatgaatatatacagaatatagaaggagaagtatatttatgcaataggaatgcccaaattttaaaaaaaatggaaagaaggacatatttactaaactagcaaataagattttctcaaatttgtgataaattattatccaattaaaagtgctcatagactgccactaaatgaatgaaaaaattaacaggaaactacaactaagtttatttcayagaatgttaaaaaacaagggtgaacagaaaattctgaaaccttccagagactgagaccagatcacctacaaaggactaaattagattgaaatcagtttttaaaagcaacttgagagataacgagacattaaattaatatatttatattcaaagtgctgagggataaaatcgtcaagcctagaattatataaagttaaattatctaagtgataaggtaaaataaggtattcaaggcctcagaggattcagcacatttctgaaaacaaaaagaaaactatgcctcacgtgaaaaataggttaaagtaaataacttagacatttgtatgcttactttgaaaaaaaagtgtattgatgtcctttgtccatattttaatcaggtcatttgtttttgttttttggct

SEQ ID NO: 884027 - DNA, 587 bp, Homo sapiens
catgtcacaggggcgctgtccttgggataaggggcagggaggataatcgatttgataccactttcctctttgtccactgcactccactacattggcctctccattgacctctctccatcaatatcataggtgttaagaaggcttaagctgacagacttgtgcagctgagttaggaaggtttgggataatctgggttttttttttcttgttgttttcttcttattatgcctcatcatttagtaattttcctgagtttagtactagaaaataataaatcctcaggaaaccaaatgccttatatcttgaaattaactaaaaacagatggccacacakccccaagatgcgaacatttatatgcaagacacagaatgtgaaatgactaaatcaggtagaatgtaaaatccttttccagattacatgtactttgtccacagtcttccttaaatgatctttcattataaattcattatcatagtctccaagttaccatttctataactcaagagctacaaaaaaaaacttgtatttttaaataaaagctgtgaattcattaaaataaatctaatttcaagtaatgtcaagtttg

SEQ ID NO: 884028 - DNA, 599 bp, Homo sapiens
atctgtgttttaacagaaactcttggtgactcaaatgcattttaaagtttaaaaagtactgatctaaattccactagagataacccaaaggaaaaacttatctactaaaatgtagtttaaagttgttctaatttgctttgtagacacaccaaagacacatctagtttatttgtaaatatcagcattgttctttcccaaagccagtaattaactagtttcaaattatactttcyatttcaagtaatgaacattttactcttgaattagaatactatcacatcaacagattctataggttcacctgggtatggcaccccctacagactgcagtgttctatagccttctatcatttaatgcaatattctatttccaaaggtaagtgttttatgaacgtcactcaatgctggtgcttactttcctcaaacctgcccctgtatatgtcacagacacattgcaggagagtaaataaaaggatttgggggcttcattttatacggtatgtagcagtagcaatgatagcagaaaatgggaaataacctaagggcccgagaaagatttcaacaagagaagacacacacacacacagaggcagtctttg

SEQ ID NO: 884029 - DNA, 619 bp, Homo sapiens
aaacccataacccgagtctaacaaccctagtcttgttccattacaagaacaatagacaaacccagattggatgacattccacaggatccctgtcaatgctcctgaagactctcaaggccatgaacaacaaagaaagactgaggaactgtcacaaactaaagaaaacaggggagacatgacaattaaatgcaatgtggtgccccagattggtcctggaacaaaaaagaaacactaattgaaaagctgatggaatccaagtgaagtctggaggtcgattaatagtaatgtactcatgttggtttcttggttgtaattgatgtatcatgataatgttaggtttcaacaatgggggaaattgggtgagaggtataccacccttgcaacttttctgtaactctaaaaatattycaaaataaaaagtttatttaaaaagtattcccagagattgtaattcagttggttcaggatacgacctgggcttctggatttttagaagatcccagggcattctgatgtgcaggcaaggtctggaaaccactgatctacattctaaagagctacacagctgaacggtaaagccagtgcccctaagcaaagctgtggccatcacagaagcagc

SEQ ID NO: 884030 - DNA, 600 bp, Homo sapiens
ctgcaccccagcctgggtgacagagcaagaccttgtctcaaaaatagtaaaaaacaaacctcaaaagaaaatgtttaaaccctttaaaaaagagagaagaaaatattcatcaactagatagaaaaaatgttaatttatgaaatgctcatatcattgtgttttgcatcaaagcacctatatgctttgattttaaaaagagatatcactattaaaactgtttaatctttctggagctcagttttctcatctgtaaaataggaacaataaagtctattcttcttatctcttggtgttgtaaaggctaaatgaaatgattagccattcctattgacttttgtgcttttcccactgctctctatgggtgcactggctgttggagtggctataatcctaaggagagaagaataagcctgccatttcccagcttccttcaggtarcaataccaatagaatatgcactgctggctgggcacagtggctcatgcctgtaatcccagcactttaggaggccgaggaaggcagatcacgaggtcaggaattcaagaccagcctagccaatatggtgaaaccccatctctcctaaaaatacaaaaattagcc

SEQ ID NO: 884031 - DNA, 631 bp, Homo sapiens
gaaatgattaagggaacttcgcctgcttcactgagaagccaactgtgatccattgggccaaaattgttaatagagttgggaggaaaaagcacataaaagagccacccatatgagtctcaagccctaaggtggaggactaatttccaattcaataatacacaaaaagctacacgcaggcaaacaaagttgaaaacaagcttaaagaaataaaaaggaaggaaaaccagacgcctgagatactaggacaagaagggaatagaacaagtcgagggagaacgtgatcttgaaactaaatttgctggtccagaggcacaatcttgcagcctaacagcatatttggcccagttcttccacctygagagagaagcagaagagggtctagttctcgggtctgtatgccttcctgcatcccattatccaattagatgccatcccttaatgcttaccttctcaatggaccagagacaactcagctttacactgggccttttttgtgattgatggaacgatgggttttggttagtaaatgcagaggaaggagattctccctttcccttccttcactgtgtccaagaaaatttgtgacaaggataaatgttacggttggctgggtcaaggaatcacattcata

SEQ ID NO: 884032 - DNA, 769 bp, Homo sapiens
ccagagaaccccagtagatactccaagagaagaacaaccccaagacacataatcatcagattctccaatgtcaaaatgaaggaaaatgagattaaggacagccagagagtaaggccaggtcacctacaaagggaaacccaccaaacagcgaacctctcagcagacaccctacaagccagaagagagtcggcactcaactaaaaacttctaaacagcaaaagaaaccaccatcagagtgaacagacaatgtacagaatgggagaaaattttttcaatctatccatctgacaaaggtctaatatcaagattctacaaggaacttaaataaatttacaagaagaaaacaacccyatcaaaaaactgtgcaaaggatatgaacagacacttcttaaaagaagacatttatgtggccaacaaatatgaaaaaacagctcaatgtcactgatcattagagaaatgcaaatcaaaatcacaatgagataccattacacaccagtcagaatgaagatttttaaaagtcaagaaacaacagatgctggaaaggctgtggagtaataggaatacttttacactgttgttaggaatgttatttagttcaaccattgtggaaggcagtgtgataattcctcaaagatctagaaacagaaataccatttgacccagcaatctcattactgggtacatacccaaagaaatataaatcattctattataaagatgcatgtacgtgcatgttcactgcagcactattcacaatagaaaagacttg

SEQ ID NO: 884033 - DNA, 659 bp, Homo sapiens
aaatttgacacacagaaaatggagaggggcgagacaggatgactgccaacctaagagtggcaaagagacatggttttcttaccatgaggaaatagtaaatgagtgagagtccctcaagactcatacatcttccatgraccttttcaaccttaggctcaggagatcccctaatgagcccactcccctggggccttcagactgacatgcagagctacatgtagtctgggcagagacactgttcaggtgcacacagagtccaggaagccttgaatctccaaacataccagcattagtggctgcagctctggcaatgggggagatcacgctccctcacgtgaccacaagacaggagccaaacccaggaggttgaacactgatggactgcaggttgaacattgatgggctgcaggcttaacttccactgcatttcacaagataaggcccactggcctgggactccatgcaccacccaccagagctgttgagccagtagccactctgcacttgtgggaatggagctctcacaggaagaggcaaactgccatttttgctgtcttgcagcctttgccactgttgccttcaggccccagagagtgtgcagttactacggactggcagggatacccagcacaatgcagccatcccacagaaaaagcagc

SEQ ID NO: 884034 - DNA, 659 bp, Homo sapiens
aaatttgacacacagaaaatggagaggggcgagacaggatgactgccaacctaagagtggcaaagagacatggttttcttaccatgaggaaatagtaaatgagtgagagtccctcaagactcatacatcttccatgaaccttttcaaccttaggctcaggagatcccctaatgagcccactcccctggggccttcagactgacatgcagagctacawgtagtctgggcagagacactgttcaggtgcacacagagtccaggaagccttgaatctccaaacataccagcattagtggctgcagctctggcaatgggggagatcacgctccctcacgtgaccacaagacaggagccaaacccaggaggttgaacactgatggactgcaggttgaacattgatgggctgcaggcttaacttccactgcatttcacaagataaggcccactggcctgggactccatgcaccacccaccagagctgttgagccagtagccactctgcacttgtgggaatggagctctcacaggaagaggcaaactgccatttttgctgtcttgcagcctttgccactgttgccttcaggccccagagagtgtgcagttactacggactggcagggatacccagcacaatgcagccatcccacagaaaaagcagc

SEQ ID NO: 884035 - DNA, 591 bp, Homo sapiens
tacatcaaaaagtctgaaagagcacagactacctaaggtcacatttcatggaactggagtaacaagaaaaatccaaatataaacccagcaggagaccagaaaaaacgaaggtcagagcacaactaaatgatatcaaaacaaaaaaatacaaaaaataaatgaaacaaaatctcgtttttgaaaagatgaataaacttgatagaccattagcaatattagcaaagaaaagaagatattraaataagctcaattagaaacaaaacaggagatattacaactaacaccccagaaatacaaaagataattcaagactaatatgaacactgttacacatgcataaactagaaaacttggaggaggtgaataaattcctggaaatatacaacctttctacattaaagcagaagatatggagtctttgaacagatcaataacaagcggcatgattaaaatgataataaaaaattgcagatgacaaaaagcccatatctagacagattcacagctgaattttatcagagattcaaataagaattggtaccaatgctattgacagtattctacaaaataaagaggtaatcgtccctaaat

SEQ ID NO: 884036 - DNA, 580 bp, Homo sapiens
ttattaagaatgtgtttactgcacacctactatgtgccaggctagttgaagggattaagaaagtgctatcaaatgtgatactcatgtttaaggagtttgtcaatttagtggagacagactgtatgcagaagcaaaacttccaaatctagaagatggggaatagagggctttgtgtagtgacatgtgaatgaggaattaaaaatgagtaaggtttggccagtgcacaatgaggaagtctttccatcagagggaatggctagagtgaaggcagatatcctgaaaaaagcaagcacsgtgggggagctgcaagggtctcctgtcctgggaaaacagagtgtgaggggaacagcgatgggaggggagacagaggaggcagcagcgggggtttcatttcagaaggctctccatgccctgtgaagccatgaagactcaaggaatcatgctgggctctgcagggcagcctaatacagtgtttcttttctgggacagtggaaaggtgctttattatgatgtaaccaaaattcatgcctacacagctaacttatgtcaagtgagataaacttttaatataagacgtgag

SEQ ID NO: 884037 - DNA, 669 bp, Homo sapiens
tagcgactgctcattgagaggagagagtctggaagaggagagaagttttgaggtgaagaggaggctgggtcacctgcacagagtggggatgcaactggaaccaacactgtggggactgtggcaacagcaggtatcagagtcaaagcacagactcactctgaagataaaacattggattcaaatgtgatcttcacagatttctagctataggacctcaaataagttacagctgacccttgaataacatggaggttaggggaaccaacccyctgtggagttgaaaatccatgtataacttatgacgccctcaaaacttaactactaatagcctactgttgagcagaagccttattgataacataaacagctgattaacacacatgttgtatgttatatgtgttatatattgtattcctacagtaaagtaagctagagaaaagaaaatgttattgagaaaatcataaggaagagaaaatatatttactatttattaagtggaagtggatcatcatacagttcttcatcctcattgtctacacattgagtagactgaggaggaggaggaggaggaggaggaagaagaaaggttggtcttgctgtctcaggagtgacagagtcagaagaaaattcatatattaagtagagctgtgcagttcaaacccatgttgt

SEQ ID NO: 884038 - DNA, 678 bp, Homo sapiens
tttaaggattaaatgatataacgtatgcacagcatctagcatagtccttggcacacagttagggctcaataaatattagtttcttgtactttcccatttaaatacaatatgatacatcccttaatacataagagtaaattgacttttcagattatgccagatattgggaaggctcacaagggcatgaaattggagaagagtaagctgtgactggggaagtgtaaaaggctagaagcctagagccctctggaggagagaggggagatcacaagggtaggggcagtaggggacacaaagtgggtctgaagagtgttccctctgttttccagggctacactgagtggtagagagtccaaggaagccagtatttggtgatggggcctttagaactgatgactaggacaaagatacmaggattaggactttctaagaaatggaggtgcaaagtgcaccatatatctctcccagactagtgcaatggtcccctcccttgtcctcctccctcaaccttcctctatgggattaaaatctaagagtaaccctagtcatcgctatgtctgcaggtcctcattgtcccagcaatgcataagatcagttgactgaatactgaatagtgaaagtgaaccattgtgatctatcctgacttaaaattagcataatgattcattcaacaaatac

SEQ ID NO: 884039 - DNA, 654 bp, Homo sapiens
ttctaaaagatctaaaattatattaaagttgagattgcctggagatcaaaatatttcttccaaaaatgaaacccatcatcattaaattatataaatattattttcattgttctgtattgtttttattcttcacaacataatccaatttggatgtataattaaagagaggtacattagatacaacctagctagttatgccctttcaaaagaaatagtaagttgaggctattcacttttgaaaaactgattaatgcatcttttcattgctatcrcttttattgttttttggttttctgtgttcttatctggagttgacacgtggaaaaataagtaacaaataaaggtaggctttgtggccttctctaagtgtcagataatatgagtcaactgttccaaaaattagtaatattgaacagtttgtttcatcttttgattcaatataatctttcttttctccattacttttgaaaattttcctgtacctttttattctaatgtacattgctcctaagttgcagtgcaaatggaattcaagacaaaaagcgtgatggtagaaagccatcaggtgtgcacactgaaagggaaggcaatacaaatagccagtaaatgcaacaatatttaaaccagcaattgtcacaattttctcaacttgct

SEQ ID NO: 884040 - DNA, 623 bp, Homo sapiens
actattataatatagatccttttgcagggaaaaagatatcattttcacacttgttccaatcccaatgatctgtaggcagcctttattatgtgaaagacagaaacttctagaaaactggacatgtgttattcagattttctttgcacagcttcacatgcacagcttacatgagtaagaaaaacaaaaatacacaagactctctttctaaagaaaaatgtaaaataacacgatatgagcttccccttttagggagggagctggctttgattgattaattgctttgctatctggaattgtcttgctaagaataacaagtttcaaatcagattgaatttctacttcatgctcgtctttctaactccttaaacttctcgacatccaaggaggagaacagtaacaaccagacaaccaaacagtccgtttggccttggactttgtctttctmtaagagagaattcacattaggacccctttgcttggtagtttcaggtttttgaaacattgttagataattatttaagtcataaacagtgacagtatgattataaatcttatcagcagtactaatcatgcttttttctatagaagcattttcttcagagccacaaaaagctcgttttaca

SEQ ID NO: 884041 - DNA, 562 bp, Homo sapiens
cagaggtttatggtcttgtcatctaagctggtattctagcagcataaaacaaaggattttttcctgtttgataaatcagagagatattgttctgcccacatatcagcttgtcattaggcaattgacttaccctttgagggtctcagttacttcatctataaaatgtaggccagtatacttactcccaaggggcttctgatgaatgataaaatacatgaaattgtccaacctcatgtccaatacatggcagatgctcaayaaatattagttacacattttatttgtaaaataaagaattctatttttattgaaaaccaaggagataaagtggcatgttctagcattggggaaaaagagaggtgaagataattaataatcctgttacctcttgcattttttcccacccagcccaactcacagaaggaaagaacatgtgagggggaaaggtggtcaacactagaccaggatccagacaatgggagagaggagaggtctatgtttgctcaacatatatccccagcatctagtataattcctgactcaaagcaggcgctctgtaaat

SEQ ID NO: 884042 - DNA, 647 bp, Homo sapiens
ttatggctctagtttctcatcttctgatatagcttcacctgagacattatttccttattaaatactaaatgcattatgattttattaaatatggctttacttttatttctttattatagttagggaacattttaaaaagtttttttggtgtgttgaggtaggtatattatctataaatttcatttaaagaaaacataatatctgtaatatttgtatcttaagcccggtttctcagtaaacaaactctgagatggaagtctataygcagaaagcatactggagggtgcccctgggatcaaccgtgggggaccaaggaggtaggatgggtctgagggagaggctgagctggaacagttacaacagagacagcccttcccacagggagctctggtcctgggatgatcattggataaaggacgcccctggggaaaggacataaacttaagtgaggacatgaacttctggtgagggcaatttttgaagagaaactcagctgagctctttcaacattcttggcagctggctaattgatggactcagtctcgaaaaaggccctgggcagcacaccacagtatccactacagtccacccttgctctggtcagatacaggtgcttagtaaaacaagttctggaaacagcttctgca

SEQ ID NO: 884043 - DNA, 647 bp, Homo sapiens
ttatggctctagtttctcatcttctgatatagcttcacctgagacattatttccttattaaatactaaatgcattatgattttattaaatatggctttacttttatttctttattatagttagggaacattttaaaaagtttttttggtgtgttgaggtaggtatattatctataaatttcatttaaagaaaacataatatctgtaatatttgtatcttaagcccggtttctcagtaaacaaactctgagatggaagtctatacgcagaaagcatactggagggtgcccctgggatcaaccgtgggggacsaaggaggtaggatgggtctgagggagaggctgagctggaacagttacaacagagacagcccttcccacagggagctctggtcctgggatgatcattggataaaggacgcccctggggaaaggacataaacttaagtgaggacatgaacttctggtgagggcaatttttgaagagaaactcagctgagctctttcaacattcttggcagctggctaattgatggactcagtctcgaaaaaggccctgggcagcacaccacagtatccactacagtccacccttgctctggtcagatacaggtgcttagtaaaacaagttctggaaacagcttctgca

SEQ ID NO: 884044 - DNA, 573 bp, Homo sapiens
aggcaaatgtagacaagtgtaaattctggtcaaagtgaatcacagcctttcacaggtgaaaggagtccaatgtaatcaactggccagaaagttgctagttgatctcctccaaaactggtgccatatcaggtagtcagcattgacctctattgctgatagagtgaacattcagtcatgacaagggctggatcgaccttgatattaaagtgggagcctgtttgtagcctccatcccagccatcatggcttytccatcactgtgttcactgtgccaatattgaaaggacaatgaccacctggccagtatctcctggccatgtcattctgtctacctggttgtgccatggctcttcagtggtaaatgctaacacaagactgttgtggactaacacaagactggcagggtttcactaaaacagtgttcccaggagtaaagcatattgcctccagaagccaaaaaaaaaaaaaaaaaaaaaaagcctatcaggcattatgcttgctccctaatagtgggaaagacaaaatgcaacagtttaacctttattttgaagaggtgtccttcacgcaccagatc

SEQ ID NO: 884045 - DNA, 676 bp, Homo sapiens
aaccctaaatgtgaaatatataaattctagaagaaaatatagacaaaacatctttgtgaccttgggttaaggaaagctttcttagctacaacaccaaaagcatgatccattttaaaaattgatcaattaaactttatcaaaattagtaawatttattttcaaaagacactcttaggagaatgaaaagacaagctacagactgggagaatatattttaaactgacataacaccatgatgggcaaatccacggagaacaaaagtaaattagtggctgccagaggttaaggggaagggagaatggggagtaacttttagcaaacatggagttttttgctgggggatgatgaaaatgttctggaatttgtggtgatggctgcacacattctgaaatgctaaaaccaattaatagtacatttttaaatagtaaagtttatgttgtatgaattatatctcaatttttaaggagacttagatcatcttctgctgtttaaacttatcaatggcttcctgtggcactcatacaaaaatctaatctccttaccttacaaggctctatttttttttccaaaaaaaggacagataaactcttgagtcccactctcaagccagtttctctcatattcattaaatatatatatgttcctctatgtattatgcattgttctaggcacttgg

SEQ ID NO: 884046 - DNA, 676 bp, Homo sapiens
aaccctaaatgtgaaatatataaattctagaagaaaatatagacaaaacatctttgtgaccttgggttaaggaaagctttcttagctacaacaccaaaagcatgatccattttaaaaattgatcaattaaactttatcaaaattagtaatatttattttcaaaagacactcttaggagaatgaaaagacaagctacagactgggagaatatattttaaactgacataacaccatgatgggcaaatccacggagaacaaaagtaaattagtggctgccagaggttaaggggaagggagaatggggagtaacttttagcaaacatggagttttttgctgggggatgatgaaaatgttctggaatttgtggtgatggctgcacacattctgaaatgctaaaaccaattaatagtacatttttaaatagtaaagtttatgttgtatgaattatatctcaatttttaagragacttagatcatcttctgctgtttaaacttatcaatggcttcctgtggcactcatacaaaaatctaatctccttaccttacaaggctctatttttttttccaaaaaaaggacagataaactcttgagtcccactctcaagccagtttctctcatattcattaaatatatatatgttcctctatgtattatgcattgttctaggcacttgg

SEQ ID NO: 884047 - DNA, 676 bp, Homo sapiens
aaccctaaatgtgaaatatataaattctagaagaaaatatagacaaaacatctttgtgaccttgggttaaggaaagctttcttagctacaacaccaaaagcatgatccattttaaaaattgatcaattaaactttatcaaaattagtaatatttattttcaaaagacactcttaggagaatgaaaagacaagctacagactgggagaatatattttaaactgacataacaccatgatgggcaaatccacggagaacaaaagtaaattagtggctgccagaggttaaggggaagggagaatggggagtaacttttagcaaacatggagttttttgctgggggatgatgaaaatgttctggaatttgtggtgatggctgcacacattctgaaatgctaaaaccaattaatagtacatttttaaatagtaaagtttatgttgtatgaattatatctcaatttttaaggagacttagrtcatcttctgctgtttaaacttatcaatggcttcctgtggcactcatacaaaaatctaatctccttaccttacaaggctctatttttttttccaaaaaaaggacagataaactcttgagtcccactctcaagccagtttctctcatattcattaaatatatatatgttcctctatgtattatgcattgttctaggcacttgg

SEQ ID NO: 884048 - DNA, 636 bp, Homo sapiens
gattatctgagaggcagcttggcagtcatagaaaatgcagactttgggcaagacatccctggtgaaaattccttgctagctatgggaccttaatcaaatgattcacctctcaggcttgcatttgactttcagaggcattttgggttttagaaacagtgcatgtggttgggagtatatagggtgtttctttcccacaccaggtgtctcctgcaagtagaagaaacttcctggcccctctcctccccttgtttgtctttcctagggaagaagagcgtgttttatctgatggtgcattaaaacataagtgtgtgtgtgtgtgtgtagatgatagagatggatgatagaaagataaataatatagagatgagagagagagagcgagagagagagcaagagatagtaaagctagatagacccttctactctttctaacatgtgagctaactaaaggaaattcatccttccyctgctacctggtgcttcagtttttatagggggcctaatcctgcaagtcacattgcccctataagaggtctgccattggttgagattcccaacaccttgtgcattgaggtatgaatgttgggagagagacaaaaagagaaatttaggggagcaaaaaaacatgtagagagc

SEQ ID NO: 884049 - DNA, 668 bp, Homo sapiens
ccactagctaagcaggctgattccctttgcatgctgacctgaatttagcatgatccagtgtgggcaccagcagaggtgagctggcgctggtcaaaataagagaggaaaagtccgcagacatgggaaggcatatatttagctaaaagatgaataaataggtagtgacattgtatcttatacttayttaattcacttttgtccacatactttatgattaatctttcaacaaatccaaccctcctgcaacatgcactgatgtatcctgtttctcttctttgtgcctatttccctggttttatttggggacaaggttttactaaatacgatttggcactgcatgttggcaattttttttcaaagaagccatattagggttttctttaggaaactgccattcgctttctacaggatggccaacttaccaaagaaaaggtccacattcttagcgaaattctgggctctacttagagtcttctcaaagtttttaagcaagccttccatagcatgcatgcaaaagaaacaattttagtagaagtccttgaaataaaaaacacatgtcacacttagaagttctaactcttattactgacaatgtaaacagccaactggataaaggcaacatgaaaatatgaggaaaaaaaatagcagctgaaaaaaatcagactctt

SEQ ID NO: 884050 - DNA, 609 bp, Homo sapiens
caaaatgcagaaccagtcaatgggaaatacttttcttgcccttgaactaaatacatcagattccatcaataataaagaaaaattccatagttataaacttgtttgctttttggccgtatgccagatctgaaaaggcaaaattaaacctaaaactgcattgactgaaggtctgaggtcatagaattctttaaagatccagacatgtgtgttgttacgattttggttgagagaataatatagttataagtagaattaattccttctttaaattcaacagacagtctaataaaatctgaaaatgatgtcaaactatatttcttgacctcagcaaccaatgaargcctgatgaaattgcagcattctgatagtgaatgtcagaattccatatgtgaatgtgtcacatccaaagtcacatactcagaatatctacctgcctgcatttaatatatttaataggaataaaatagctattttcaatactgattattctaataaggaaagtaaccatctgtgtttttcctgcagagaagctttctcgtgattatatggaaattggagcaaaagcaacattttacacaaagctccacgtagcatataccgtatctgagt

SEQ ID NO: 884051 - DNA, 641 bp, Homo sapiens
ggtactaatttacattcccacaaacggtgtatgagggttcccttttctgtacaacctcattggcattgcctgtcttttggatacaaaccattttaagtgtcttaagatgatatctcattgtagttttgagtttctctgatgatcaatgatgggaacaccttttcaygtacctgtttgccatgtgtatgtcttctgagaaatatctattcaaatttcttgaccggtttttattcagattattaaatattttcctattgagttgagctccttgtatgttccgcttattaatcccttgtataatggatagtttacaaatattttctcctattctgtggattatctcttcactttgttgactgtgttctttgctgtgcagaagctttttaacttgatgcctcccatttatccatttttgcttggttgcctgtgcttgtggggtactgctcaagaaatctttccctagtccaatgtcctggagagtgtccccaatgttttattgtagtagttttatagtttgagatcttatatttaagtctttagtccattttgatttgatttttgtatgtggcaagagataggggtctagtttcgttcttcttcacgtggatctccattatcccagcatcatttattgaagagac

SEQ ID NO: 884052 - DNA, 652 bp, Homo sapiens
aacaacaaaatgtaacccttctgtgagttgtaaagtatggtgagcagtaaggacctcaatttatttttttccctaagagctaatgaattttcccagtatcacccactgagccgtcctcccctctttgtgatgccacgtttgtttaccttgtgctgactcataygttctgcaacattcagctatttgtcaattcttatgccagtacttccactgttaccatcatcaatttaaagattactttaatatctgatggggcaagctgtccatccctatcaccgctctctaattccttattcttgttttaacatatcttgactatcctttcccatttgttcttccagatgacatttagaaaacattttctcaagattaattttaaaaaaagcaaaataaatttttgtaattttcacatggaatttatatttaaatgatgagaatacaataaagtttattattgcctttttattgaagccttgcagacaaaaacactgggtttaaaggccctagacttggaatacatctgtagatatgtcaggtgtagtcacaaaggaacaaagcctgggtgccacaatgctgccctcttgtggcagccagaggctgcacactccagtcccagcaagggatgatactgttgtataaagtgaaccagaat

SEQ ID NO: 884053 - DNA, 652 bp, Homo sapiens
aacaacaaaatgtaacccttctgtgagttgtaaagtatggtgagcagtaaggacctcaatttatttttttccctaagagctaatgaattttcccagtatcacccactgagccgtcctcccctctttgtgatgccacgtttgtttaccttgtgctgactcatatgttctgcaacattcagctatttgtcaattcttatgccagtacttccactgttaccatcatcaatttaaagattactttaatatctgatggggcaagctgtccatccctatcaccgctctctaattccttattcttgttttaacatrtcttgactatcctttcccatttgttcttccagatgacatttagaaaacattttctcaagattaattttaaaaaaagcaaaataaatttttgtaattttcacatggaatttatatttaaatgatgagaatacaataaagtttattattgcctttttattgaagccttgcagacaaaaacactgggtttaaaggccctagacttggaatacatctgtagatatgtcaggtgtagtcacaaaggaacaaagcctgggtgccacaatgctgccctcttgtggcagccagaggctgcacactccagtcccagcaagggatgatactgttgtataaagtgaaccagaat

SEQ ID NO: 884054 - DNA, 630 bp, Homo sapiens
aaaggttatctcgaaatatctgatgcaaatctttgcaatcaccagcacctcctctatgttcctcccttgtacctggcatatttgtatttccagttaaaatgtacttgatacagctttctgagaccttcaagttgtgtcaaacttaaggcaagattgcaaagcatcaggtatgcaaatacttacattttggacttcaaagttgtgtagtcttaacatttatgtgagagaatcaacagcataataaaatttattgtcagttatgtttaaaacaaattattaatctacaaatrcaaatatgagttcgagctgtataaacaactttagatgacaatatataggcaataaattacagagtgaaatttatttcttaaaaatgcaaatgaacccatctggaaaatatgataaaatgctagtaattcagcaagagaaaggaatctggaaagcagtaatgatggagagttttctagatgaataatcgttggtactggataaaaaattaaaaataagcatttgactttgggggttggtaaagtacatcttttgagttgcctataacagtacaaatctgttaaagcccacaggtacagatcattctcttatgattacagaggtatagtttcaattttggcc

SEQ ID NO: 884055 - DNA, 681 bp, Homo sapiens
acaatgaaatccaggctgaggtggtctcagatggagatgaagaacttgttggaaactggaggaaaggtgactcttgttgtgttttagcaaagagactggcagcattttgcccctgccctagagattcgtggaactttgaacttgagagagaagatttagggtatctggtggaagaaacttctaagcagcaaagcattcaagaagtgacttaggtgctgttaaaggcactcaattttataagggaagcagagcataaaaatctggaaaatttgcaggctatatgatagaaaagaaaaacccattttctggggagaaattcaagacagctatagaaatttacataagtagcaaggatccaaatgttaatccccgtgaccatggggataatatttccagggcatatcrgagatcttcatggcagcccctctcatcacaggcctggaggcctaggaggaaaacgtggttttgtgggctgggcccagggtccccgtgctgtgtgcagcctagggacttgatgccctgtgtcccagcagctccagccatggctgaaagggtccaacaaacagcttggacttcggcttcagagggtggaagccccaagccttggcagcttccatgtggtgttaagcctgcaggtgcacagaagtcaagaactgaggtttggaaaactctacctagatt

SEQ ID NO: 884056 - DNA, 586 bp, Homo sapiens
gagattcctctgcaattgttttgctggaaacagcctcacaaccttgtacctattccatgaatttaggtagtctttagcctgaaaatgtgtgttatttggctagaacaatgttggtcatcacaagttgactgccaatatttagaaatttagagatttcacaaaagcctggatttccagctttttttgcacaactgtctgctactgcttggtaggagcttccctctttggatggagcaggtactctccctttgtcacctacttaaacattccctaatgtctttctgactctgagacccattaccacttgcmatttatcatcatgtttgaactatgctttttctctagtagagttaagagggaataaaagatatctcttttcattatgaaggaaaatcttggtgttgtagactatcagcatgtctgagtgcctatggaaacccatctcctagatctcctctaacttttgctgtgtgatgcttgtacaaataaatatctgccttagtggaaaaaggatatgatacctttcaaggttacttcaccctcagcttattcttttctacacagtatccagaaaaaaagaattttc

SEQ ID NO: 884057 - DNA, 586 bp, Homo sapiens
gagattcctctgcaattgttttgctggaaacagcctcacaaccttgtacctattccatgaatttaggtagtctttagcctgaaaatgtgtgttatttggctagaacaatgttggtcatcacaagttgactgccaatatttagaaatttagagatttcacaaaagcctggatttccagctttttttgcacaactgtctgctactgcttggtaggagcttccctctttggatggagcaggtactctccctttgtcacctacttaaacattccctaatgtctttctgactctgagacccattaccacttgccattwatcatcatgtttgaactatgctttttctctagtagagttaagagggaataaaagatatctcttttcattatgaaggaaaatcttggtgttgtagactatcagcatgtctgagtgcctatggaaacccatctcctagatctcctctaacttttgctgtgtgatgcttgtacaaataaatatctgccttagtggaaaaaggatatgatacctttcaaggttacttcaccctcagcttattcttttctacacagtatccagaaaaaaagaattttc

SEQ ID NO: 884058 - DNA, 586 bp, Homo sapiens
gagattcctctgcaattgttttgctggaaacagcctcacaaccttgtacctattccatgaatttaggtagtctttagcctgaaaatgtgtgttatttggctagaacaatgttggtcatcacaagttgactgccaatatttagaaatttagagatttcacaaaagcctggatttccagctttttttgcacaactgtctgctactgcttggtaggagcttccctctttggatggagcaggtactctccctttgtcacctacttaaacattccctaatgtctttctgactctgagacccattaccacttgccatttatcatcatgtttsaactatgctttttctctagtagagttaagagggaataaaagatatctcttttcattatgaaggaaaatcttggtgttgtagactatcagcatgtctgagtgcctatggaaacccatctcctagatctcctctaacttttgctgtgtgatgcttgtacaaataaatatctgccttagtggaaaaaggatatgatacctttcaaggttacttcaccctcagcttattcttttctacacagtatccagaaaaaaagaattttc

SEQ ID NO: 884059 - DNA, 658 bp, Homo sapiens
taaatcattttatacatgctatgtaaataacaaacatgtttatgaaagtttttcccaaactcactttactctcaattcagtctgtgtgctgagtgagcaagggctgtgctatgtcatttgtgcccccaaatgggtggttccctagggtaccatgtcagcaatgagtattttggggatatctaataaacagaatttgcactgttttattctgttagctaataaaaacattcaatttccaaagctcctagaagagcagcttttagactttgagatcaagctgaaggtctttaaggtaaaacaaaaaatttggctgttgcgcttacttttatatagaggactttgatcagatctcataataaagaggctgtatagagtccaagactgctttgtcaacgtcagcagacaggatttcttcttgtcaccaagtgaaagcttatgatcaagaaagggggtcttttttttttttyccccgtaggtgtctttgtgaagcttcctatctttgcttttcaactaagatgaaacagcatttaaaagaaaatgccatgtgagatgagatcaggagaatggattctttctttcatctgaatagagagctgctgttcgaggtaactttcagcttttattttgtttggacacaattgtcaaaatgtttaactct

SEQ ID NO: 884060 - DNA, 640 bp, Homo sapiens
gctgtgtctggaaaagcaaactttcatgacatgggctacctgagaaagtagccttaggtggtggtgacagaagtgttcacttgtacccttggccttttcatttttgacaccagctgttttcactttcacgcacgattgagtctttgctgtcacacagttgccgaatgttttcttactgctctttcctttccatttgtctaacattccaaatgctttatctaatgcaagatttctcagccttggccctattgacattttgggccagaaaagtctttattatgtaagcctgttttgcaaattgtaggatgtttagcagcatctctgacctccatcttacaattcaccagtaactttccccacccagaggtaactaccgaaartttctccagaccttgccaaatatcgtctggggggcaaaattgccctgggtgagaatcaccggtctactttctacttattatgtaatctgaaaaagtttatgctaaaattacatgtaattccccagaaataatttgcacgtggttgcaaattggaagaaaatctaatctgcccattaattagcgattggtgaattgtcctgaaatagcaactggtgtcacatatcaaaacttgtaatgttttctttgtttcagtttttgaa

SEQ ID NO: 884061 - DNA, 663 bp, Homo sapiens
agcagtgccttcccagctccccagccagtgtaatagcatcttatagtggtataaaaagagacattgtataggttttgaaaacagcagaggtgttagaaattcatcaccaacatttacaagctgtatggtttttgattaggcactcaatctttctgaaccttagaatcatcttccatgaaatagggatattaacactatagtggaatagttattttttattgttacctcaaatattctccttccctcttccacagcccaggtataatgaaaagatttaattcatgctgaggaaagtggttacagtagaacctgcaaatgcagatgttcaatttttgacttctaagttmtagaaaactatccaggaataagataaaaacatatttaaaagagtgcttgaagagtttgaaccagtttaaaagagtgcttgaagaatttgaacgagaccttgtggaagggaatgggggtcaagtctttttgaagaggaaggcaagagggaagtcaatatggggtcttcatacaccattcttgtatcattaaccaactcctagatgacattcagtgattagtaagagttttttttgttttttttttgttttttttttcactgaacacctactctggagatgtccaggtgagcagaagaagacagagaccctgccttca

SEQ ID NO: 884062 - DNA, 479 bp, Homo sapiens
cagtgtttctgtaatactgtttgttgaagatttaataattagacttcaattatgatttattttctatttaaccaaataaaagcagactcactaagtgtcaagtgggtttacagttggttgaatttctttttagattttttctgatttattctaaacytaataacctaataccttaatatcacaaaactatattttttctgatactgttataatctgataatagatttttaaagttgtcaaatattatatcctgctctcatttaaatacttttcagtgacatatacactgtaattgaaggtggtcatttcttctcagtagagacagatttttacagttaaaaaaagagaaagaaatactgacttcaataaagggaatcactgcattacttgagtcttaatagtgtctctaaagatggagggcaaaggcagaaatttcataaagttgggggatctggtgtaagtggacttttcagcatgta

SEQ ID NO: 884063 - DNA, 479 bp, Homo sapiens
cagtgtttctgtaatactgtttgttgaagatttaataattagacttcaattatgatttattttctatttaaccaaataaaagcagactcactaagtgtcaagtgggtttacagttggttgaatttctttttagattttttctgatttattctaaacttaataacctaataccttaatatcacaaaactatattttttctgatacygttataatctgataatagatttttaaagttgtcaaatattatatcctgctctcatttaaatacttttcagtgacatatacactgtaattgaaggtggtcatttcttctcagtagagacagatttttacagttaaaaaaagagaaagaaatactgacttcaataaagggaatcactgcattacttgagtcttaatagtgtctctaaagatggagggcaaaggcagaaatttcataaagttgggggatctggtgtaagtggacttttcagcatgta

SEQ ID NO: 884064 - DNA, 519 bp, Homo sapiens
aaaatgtctcgggtttttcttccttaaagcagaaggcttctgttaagatatgactcagtgttcttgctcaagaatcacaattattttatgccatagaaatacattcataaatagtataacatacagaatcaaaatatcaaactgtattagaaatttaactacatttacatattgttaaatttacttgttttatttctgggatgaagtgtctgttctaaatgaatgagttgaatttagaattgtgtccataaaaaactatttctttrtaattgctgtggtcaaagaaaaccttttgtttaccaagatttcttccattatttctccccaaatttctgatgtctacatttaattcttctttctagttggaagttcatgaggctaagcctgtgccagaaaatcacccacagtgggatacagcaatagagggggatgaagaccaggaggacagtgagggctttgaagatagctttgaggaagaagaggaggaagaagaagatgatgactaagcagtactctgaa

SEQ ID NO: 884065 - DNA, 499 bp, Homo sapiens
tagatttccttggcatagtgattcttaaccctggctacacattagaatcacttcgggaactttttttttttttttttgagatggagtctcgctctgtcacccaagctggagtggagtggcgcggtctcagctcactgcaaggtctgcctcctgggttcaccccattctcctgcctcagcctcccgagtatctgggaccacaggcgcccaccaccacgcctggctaattttttgtatttttagtagagacggggttagccaggatggtcttgatctcctgacctcatgatccgccygcctcagcctcccaaagtgctgggattacaggcttgagccaccgcgcccggcccacttcgggaactttttaaaacacttgtacccatccccagatactctgatttatttggtctggagtgggtgttatgtactggtattttttaaatatccctatatgattctaaattgtagctatgtttgagaagtgctgcttggaggagagc

SEQ ID NO: 884066 - DNA, 639 bp, Homo sapiens
caatagcggactggataaagaaaatgtagtggccgggcgtggtggctcatgcctgtaatcccagcactttgggaggccgaggcaggtggatcacctgaggtcaggagttcgagaccagcctgaccaacatggagaaaccctatctctactaaaaattcaaaattagctagccgggtgtggtggcgcatgcccgtaatcccagctacttgagaggctgaggcaggagaatcacttgaacccgggaggtggaggttgcaatgagctgagattgcgccattgcactccagcctgggcaacaagagcaaaactctgtctcaaaaaaaaaaaaaaaatgtggtacatatacacygtagaatactacacagccattaaaaagaatgaaatgtcctttatagcacataaatgcagctggagggtattattctaagtgaattaatgcagaaacagaaaaccaaatactgcatgttctgacttataagtgggagctaaacattgggcacacatggacatagtgatggcaacaattgacactgaggtctagtagagggaggaaggagggaaggagacaagggttgaaaaactgttggatactatgtggtaagcaggcaaacaggtttgaagactttagatctggctaac

SEQ ID NO: 884067 - DNA, 622 bp, Homo sapiens
atataccctaagaggcaacaggtattttctactgccttaaaagaacctattacctacagggcttggaaatccaacagctctataatggctctgtaggcccatttgtggtaatctggggtttcagctctaaaaggctaaatttaacccctcttacacttgaaccttaktatccacaatgttagagtgatatagatggtgacatattaactacctactaactatgtgattgaagactattatgtatgaggtcccagcacttgtgaaattgatggaatacagctccctgatactgcaaccaaatgcctgagaacactgtgctaatatttataccaatttccagtgatatctgtaaacaggttagtttacttccggaaaattcttccatcttaaaagcttaggattgaaggactcagactatatcctcttcaatgcaaccacatacctgaaagcttaggttgtgtctttttctttttgcttgaaacttttaaaaactcatcaacaagcaagtcgttagcacaggctctcttgtcaggatctggttcaaaacatttcagtatgaatgccttggcctctgcagacatggactctgggatctcagggtggactttaaacattcccacct

SEQ ID NO: 884068 - DNA, 619 bp, Homo sapiens
agaaataatcgattttgtaatttattcggctccttattacttttccattcttgcagatccattgcccatatccttaagatgttttctttaagccttaccctagtcagagactattttctaaatagaactaaaagagaaatttgattgagcatctgaatctgaccttctccccaattaacccagttgggcagaccttcatttagagtgtcatttatttttcaagccacgtggtaargaagcagagggttctccttacttctaaagtcaatttccattaaaaccttcagtgttcagtgtgtagcttaatgccttttaaaatgattgctatttttgaaccagtgtttttgtcacaacgttttgagtgtagaatattccttatttgacaaccctgagcttgtaggagtttataaatggctaagaacaatctgattagaatgtattgcttttggttggaggccaagaatattggatcattggtttagggtatgacacttaaagagaccaaagagcagagtacataatgcccagataggccaattcatgtagctttgttccataatgtaagattgaaccccaaaccctggccacctatctttgagatatatgctgttggccacag

SEQ ID NO: 884069 - DNA, 619 bp, Homo sapiens
agaaataatcgattttgtaatttattcggctccttattacttttccattcttgcagatccattgcccatatccttaagatgttttctttaagccttaccctagtcagagactattttctaaatagaactaaaagagaaatttgattgagcatctgaatctgaccttctccccaattaacccagttgggcagaccttcatttagagtgtcatttatttttcaagccacgtggtaaggaagcagagggttctccttacttctaaagtcaatttccattaaaaccttcagtgttcagtgtgtagcttaatgccttttaaaatgattgctatttttgaaccagtgtttttgtcacaacgttttgagtrtagaatattccttatttgacaaccctgagcttgtaggagtttataaatggctaagaacaatctgattagaatgtattgcttttggttggaggccaagaatattggatcattggtttagggtatgacacttaaagagaccaaagagcagagtacataatgcccagataggccaattcatgtagctttgttccataatgtaagattgaaccccaaaccctggccacctatctttgagatatatgctgttggccacag

SEQ ID NO: 884070 - DNA, 634 bp, Homo sapiens
tggtgcatttttacagagtgctgattgatgcatttacaatcctttagctagacacagggcgctgattggtgcgtttacaattctctacctagacagaaaagttctccaagtccccactcgacccaggaagttcagctggcttcacctctcacaagtgatctgcctgcctgggcctcccaaagtgctgggattacaggcatgagccacaatgcctggccttatatttcttattatatcataaaatcacagtggagttggatgggggtgagggagggcagtctgtgaaagagagaggttctraagtccaaatgagggcagaatgtggacttctctggccctgaggagtgggttgggttgagtactatggggtgatttgattggacaggttctgatgagtctggtagtgggtacctcaggagccatgaggacatttaaatgtcacagtgtcacagaaaacatagaagattgttccctaacttgggtagtggcatgagaaagtgggtctgttgttgggaataaggtaggctcggatggtggtttttgagggtgccaagaaatgtctttataaggtttcaaatgtacatagatgtagaaggaagaatggtgccattctaaagtttttttgaagtgaaaa

SEQ ID NO: 884071 - DNA, 586 bp, Homo sapiens
tcttgcccacttccatttgcaagctgcatctgcctctctaaaaaaattgaggagttcggggaagggcagggggccataaatcagagttggacctgcaataacccccacacctacagggcaaccatgaccgaggagagctctgacgttcccagggagttgataggtaagattcacgcggttgttggttttccaccttcctctgcgtactcctcacctctctctsccttcccacctctgctttcccgcaggtctcgagaagtcttggcgccccttagggcagagtggtgttgggcagggtcactgggggtgccgggaagtttgttcccatccgaccgcctgtagagccaagtgcagagagggaaggcttcggggaggaatcgggagtcctcgggaggtgggtgggaggagggtctcgactgtgagccctgggcacctcctcttgcccggaagcggggatccaggttggcgaaagaagggggcgggccatcttagacttgggagttctgcaagcgaggggagccctttacagctcccagcccactgccccaaactcgggaaagtccgggaaagcctattggaaggacag

SEQ ID NO: 884072 - DNA, 647 bp, Homo sapiens
aaagactcagttcaacacacccctggtggctgttgtagctcagggttgagtagtgatcctggtattaaagatgagaaatttgttaggtagccgctatgagctgcaaggtttcctgaggcagaggtatccggaacagagtcagggaggccatggggccagaggccttcctgattctggacacacagagtaccttggtttccccaccctaccttaaaaatatattcggattcacttataccgattaattacttagagagagtgaatgtattatagttatgtgaacytgtactccctggctgtctctcttcttatgccttggtgatttgtctagaggataaattgctttttggcttttataaattctgttttcttctaccaactgctaaccattaacatctcaatcaaatgggggaatttgcagttatcagcttaactaatctccatgcccacatttcttgcttctctccctgttactgacccagatccttgatgataactcattgtagattttgttatcatttaaaaccttttcaactaggtacttgatataatagttcttattaatttttaattaattttatattatttagtcatttgctgagttggtagatatttatcttgtgatttcttttaaaaaagtcttagtt

SEQ ID NO: 884073 - DNA, 647 bp, Homo sapiens
aaagactcagttcaacacacccctggtggctgttgtagctcagggttgagtagtgatcctggtattaaagatgagaaatttgttaggtagccgctatgagctgcaaggtttcctgaggcagaggtatccggaacagagtcagggaggccatggggccagaggccttcctgattctggacacacagagtaccttggtttccccaccctaccttaaaaatatattcggattcacttataccgattaattacttagagagagtgaatgtattatagttatgtgaacttgtactccctggctgtctctcttctkatgccttggtgatttgtctagaggataaattgctttttggcttttataaattctgttttcttctaccaactgctaaccattaacatctcaatcaaatgggggaatttgcagttatcagcttaactaatctccatgcccacatttcttgcttctctccctgttactgacccagatccttgatgataactcattgtagattttgttatcatttaaaaccttttcaactaggtacttgatataatagttcttattaatttttaattaattttatattatttagtcatttgctgagttggtagatatttatcttgtgatttcttttaaaaaagtcttagtt

SEQ ID NO: 884074 - DNA, 638 bp, Homo sapiens
aatgtaattaactgtagccaacgtcttacaaatttctattattactgtgtgaaaatagctgccatttagtgagaagcatcatcatctttatctactatttattgagtagtttcacaactagactactgcaattgccttctaactagtcttcttgctttcaccattgccatgaaacagtctaytctcaataagtattaggggtgattctgtaacatgtcttaaagagtgtcagattacattattcatcttcttcaaaaccccataatgactgtccacctcagtcagagtaaaaaccaaagtttttacagccaacttcaagatgttttatgacgagatccaattaccttctttgacctaatcgcctgcttttcctccctttttctccctccactaaggtcagctgactacagccatggtggtccttgaactttctgaagaccttaagggtattcttgttttaaggtctttctggtccttacatttgctgtttcctcatcctgatatgctctacccagttcaacacgtggcttgtttcctcattttctttaaggtgtgtatccagttatcacagtatcaaagcagcctttcctcatcacttcacataaataggacaccctatctcatgcagcacttttgac

SEQ ID NO: 884075 - DNA, 638 bp, Homo sapiens
aatgtaattaactgtagccaacgtcttacaaatttctattattactgtgtgaaaatagctgccatttagtgagaagcatcatcatctttatctactatttattgagtagtttcacaactagactactgcaattgccttctaactagtcttcttgctttcaccattgccatgaaacagtctactctcaataagtattaggggtgattctgtaacatgtcttaaagagtgtcagattacattattcatcttcttcaaaaccccwtaatgactgtccacctcagtcagagtaaaaaccaaagtttttacagccaacttcaagatgttttatgacgagatccaattaccttctttgacctaatcgcctgcttttcctccctttttctccctccactaaggtcagctgactacagccatggtggtccttgaactttctgaagaccttaagggtattcttgttttaaggtctttctggtccttacatttgctgtttcctcatcctgatatgctctacccagttcaacacgtggcttgtttcctcattttctttaaggtgtgtatccagttatcacagtatcaaagcagcctttcctcatcacttcacataaataggacaccctatctcatgcagcacttttgac

SEQ ID NO: 884076 - DNA, 638 bp, Homo sapiens
aatgtaattaactgtagccaacgtcttacaaatttctattattactgtgtgaaaatagctgccatttagtgagaagcatcatcatctttatctactatttattgagtagtttcacaactagactactgcaattgccttctaactagtcttcttgctttcaccattgccatgaaacagtctactctcaataagtattaggggtgattctgtaacatgtcttaaagagtgtcagattacattattcatcttcttcaaaaccccataatgactgtccacctcagtcagagtaaaaaccaaagtttttacagscaacttcaagatgttttatgacgagatccaattaccttctttgacctaatcgcctgcttttcctccctttttctccctccactaaggtcagctgactacagccatggtggtccttgaactttctgaagaccttaagggtattcttgttttaaggtctttctggtccttacatttgctgtttcctcatcctgatatgctctacccagttcaacacgtggcttgtttcctcattttctttaaggtgtgtatccagttatcacagtatcaaagcagcctttcctcatcacttcacataaataggacaccctatctcatgcagcacttttgac

SEQ ID NO: 884077 - DNA, 643 bp, Homo sapiens
aatgaagcaatttacttttctttctggctcacgttgcacaacgaggcaattaaagcacaagtggttaaaagtccagacctctcagccagatgggcctggatttagacatcatttggctccttctttgctgtgtgatcttgatcaagtttctttacctttctaaaccatgatttctgcctctgtaaagaaggtatacaatacagtggctgtgaagattaaaggaagtcatgcatgttaagcagtaacaataaatgtatgtaaacacattataaatacacttacacrtgcattatataattatataatatgttatttacaaatacaaaaatgatgtaaaattaagtaacattgtttgcttatgtccaaacaacaaatgtataataatatacatgcacctagacattgctatggtttggatatggtttattttgccccatcaaatctcatattgaaatttaatccccagtgttgaaggtggggcccagtgggaggtttctgggtcatggggacagacctatcatggatgacttagtgccattctagcaggagtaagttcgtacttttagtggtcatgagaactggctgatgaacagagcctggcaccttttctgctctctattgattcctctcttgccatgtaatc

SEQ ID NO: 884078 - DNA, 626 bp, Homo sapiens
tgcattcattcattgcaacctgacttacaatattcaaaaatactgaaaaaaacctacatgtccaagcaatagaggaaaaagtaaataaatttcgacaaatccttgagataaagtgttttatagtcattaaaatgtttgtagcattttaatggcatagaaaaacaaacacaatacaatggtaactgagaatagtaggatgcaaaactgtacaaaccatatgatcacatatctctatatatagacttgtataagcacataaaaatatttaaaggtatatcaaaatttatatgacaatctataaatgatgcttatttactttgtaattgtctgcttttcagagttctataataaacttatttttaaaattaggatatatttaaatatatttaaaagaaattttctcttattattgaagcccagctctgttttactattatattattcattcattcaacaacatccacatatggcaamtaattctgcctacttcatcctctccatctcccatttatttgttttctagagacacatggtaccacctagagcccacatttactagaaaccctgttggctcaccatcattgtacacagtgccttcatagtctttctcataaaagaccccatgg

SEQ ID NO: 884079 - DNA, 584 bp, Homo sapiens
ggaattgaacaatgagaacacatggacacaggaatgggaacatcacacaccagggactgttgtggggtggggagaggggggagggatagcattaggagatatacctaatgctaaatgatgaggtaatgggtgcagcgcaccaacatggcacatgtatacatatgtaacaaacctgtacattgtgcacatgtaccctaaaacttaaagtatgataataataaaaagaaaaaaaggaaaactacagaccratatccctgatgaacataggtcctaaaatccttagcaaaatacaagctaatggaatccaacaacataacaaaaagatgatccactgtgatcaagtgggtttcatactcacttgatgcatatgaaaggaatgcaaggatggtttaacatatgcaagtcaatatgtgtgatgcaccacatgaacagaatttttaaaaaattacatgatcatcacaatagatgcagaaaatgcattcaacaaaatccaacattacattatgattaaaactctcagcaaaattggtatacaagggacatactccaatgtaataaaagccatatatgacaaacccacagcc

SEQ ID NO: 884080 - DNA, 584 bp, Homo sapiens
cttttgattacttttcttttcacatatagtgtttggaagtgccaaattcagttgataattaatggttttaattaaagcaaaacaaaacacttgctttggagaaaatctaaatgaaccaagtcaaaagggatgtaataaaagaagaatgaaactactataaataaaaargcaaattcagctcaatatgcagggaatacatcaatgacgcaaaaagcacctgccacttaaatgtaatgtgaaacagaggtaatgtacttgatttgctatctgctcgccctctttctattctctgagtgataattaatagtcagcaaggttatttttaaaaatgtctatgagctgattttataagaaattccaaaacagggttgtgaaaatatactagaataactggctgccacgtcagaattacccgagatacttgttaaaaatttgatgcctggacctcactcaaaggattcagactcagtcagtttaggcagcttgaatctgtatattagtgatcatctgtgtgctctgatttaggtgatccaaggatgagcataatgggatgttactcaagaaatgtctcaaatatactctca

SEQ ID NO: 884081 - DNA, 569 bp, Homo sapiens
gaaaaatgtggacagaaaatatgtttaaacttctctgtgagcctcattttctcagaagaggaggactgtgattttatagatgtgtttatttttaatgtacatgtaatgcaatattgccatctagtgaagtcagcaactgtgatcacataaaggatgtttaaaaagaaaaaaagactatgattgtgtcattcccagtcaaatttatgtcatattctgtataatatattaatatayactgcctcaattcatcactcttcaatttatttcagtaaaatattattttccttgaatgagaactcaacaaataaaaatttgatgtagctatacaggaaacattaataatataatattaagtactattttaaaagattgatattcctgtagacaggcatcctagaattctgatatgtaattatatgaacattatgatagtttaaaacatcttaaagcatatattagcaggaggccaagagtttaaactattttacttatatagactaaatatttcacatgagcttgtatctcgagctttatcaaaaacagaatgagcatatatttgtgttttacct

SEQ ID NO: 884082 - DNA, 569 bp, Homo sapiens
gaaaaatgtggacagaaaatatgtttaaacttctctgtgagcctcattttctcagaagaggaggactgtgattttatagatgtgtttatttttaatgtacatgtaatgcaatattgccatctagtgaagtcagcaactgtgatcacataaaggatgtttaaaaagaaaaaaagactatgattgtgtcattcccagtcaaatttatgtcatattctgtataatatattaatatacactgcctcaattcatcactcttcaatttatttcagtaaaatattattttccttgaatgagaactcaacaaataaaaatttgatgtagctatacaggaaacattaataatataatattaagtactattttaaaagattgatattcctgtagacaggcatcctagaattctgatatgtaattatatgaacattatgatastttaaaacatcttaaagcatatattagcaggaggccaagagtttaaactattttacttatatagactaaatatttcacatgagcttgtatctcgagctttatcaaaaacagaatgagcatatatttgtgttttacct

SEQ ID NO: 884083 - DNA, 667 bp, Homo sapiens
ttttgtgacaagttcattattactacaactggtatttgagaaagccaatgcactaaggctatttataaccaagaaatctcacagtctgtgtcactccgctgtcaccccaatcagagctggtactggtagccactgctgggaatgtagaggacaattaacatcactggaccacttgcagacattccacagcaccagcctgaagtgtagcaacctcacttggtggctagacttagaggggcgctagcattcatagtagtctgtccctaagggattattaaacctgagggaaggrgtgtgcaccacatcaaggaagtattccatgggacaaaattatccagatggcaggacttgagtcccagaacattccacatgtgggtcgtttctttcagcagaggcataggtacagtgctgggttaagtggggaaattctggctccaccctaatagtcaggcagtcctggtgttcatgaagtacattgtataagggtacttatttttcctctcatccatcactgaagacaaagatgggacttctttcctcagggatagacatgggtgcacctctagacagacttttaaaaacacatcagggtgaccgcatctccataggagaagtgcccttcaggttcaggcttaaatgaagagtagattcacaatacctttctata

SEQ ID NO: 884084 - DNA, 633 bp, Homo sapiens
tgagatggtatctcattgtggttttgatttgcatttctctgatggccagtgatgatgagcttcttttcatgtgtgttttggctgcataaatgtcttcttttgagaagtgtctgttcatatcctttgcccactttttgatggggttctttgtttttttcttgtaaatttgagttcattgtagattctggatattagccctttgtcagatgagtagattgcaaacattttctcccattctgtaggttgcctgttaactctgatggtagtttcttttgctgtgcagaagctcttkagtttaattagatgccatttgtcagttttggcttttgttgccactactttaggtgttttagacatgaagtccttgcccatgcctatgtcctgaatggtattgcctaggttttcttctagggtttttatggttttaggtctaacatgtaagtctttaatccatcttgaattgatttttgtacaaggtgtaaggaagggatccagtttcagctttctacatatggctagccagttttcccatcaccatttattaaatagagaatcctttccccatttctagtttttgtcaggtttgtcaaagatgagatggttgtagatgtgtggtattatttctgagggctc

SEQ ID NO: 884085 - DNA, 656 bp, Homo sapiens
atttttcacagaactagaaaaaatttccaaaatttatatggaaccagaaagtagcacaaacatccaaagcaatcctaagcagaaagaataaagctggagacatcccattacctgacttgaaactatgctataagactacattaatgatccattccaagatggccaaaatgaacagctcaagtctacagctctcagactgatcgacacagaagatgggtgatttctgcatttacaaatgaggtacatagttcatctcattgggactggtcagaaagtggaaggagcccactgagggcaagccgaaacaggtcagggcatcacctcacccgggaagtgcaaggggtaaggggatttccctttcctagccaagggaagccatgacagactgtaccaggaaaatcaggacactgccacctaaacactgtgcttttccaacggtcttagcaaatggcacaccaggagattatatcccgtgcctggctcagcragtcccacacccacggagccttgctcactgctagtctgagatggaactgcaaggtggcaagcctggctgggggaggggtgtcccccattgctgaggcttgagtagttaagcaaagcagctggcaagattgaaatgtgtggagcccaccacagctcaaggaggcccacct

SEQ ID NO: 884086 - DNA, 688 bp, Homo sapiens
catatttgaagggataattgagaaaagttctttggtcttcctagagatatagatatcaaaatgcaagaagctccaagaatactggtgaaattcatcactgaatgatcatcacctaggcacatagtcatcaggttatctaaaggcaaggcaaatgaaagaatcttgagagctgtgaggcaagagcttcaggtaatctataaatgaaaactcatcagattaacagcatatttctaagcaggaacccctcaagctagaagaaattggggtcctattttagcctccataaacaaaactgttatcagccaagaattttgtatccagcaaaagtcagcttcataaatgaaaaagagataatcattttctcatgaacaaatactgagaraattcaccactaccaagccagcgctaaaagaactgttgaaagcagatccaaatctttaaacctcaaaatacaccaaaatagaacctcattaaagcataaatctcacaggacctatgaaacaagaacccaatggaaaaataaagcattgtattcaggcaacaactagcatgatgaataaaatagtacctcacatcttaatattaatgctgaatgaaatagcctaaatgctccacttaaaagatacaggatggcagaatggataagaattaaccaaccaactatctgctgtcttctagagactcacct

SEQ ID NO: 884087 - DNA, 688 bp, Homo sapiens
catatttgaagggataattgagaaaagttctttggtcttcctagagatatagatatcaaaatgcaagaagctccaagaatactggtgaaattcatcactgaatgatcatcacctaggcacatagtcatcaggttatctaaaggcaaggcaaatgaaagaatcttgagagctgtgaggcaagagcttcaggtaatctataaatgaaaactcatcagattaacagcatatttctaagcaggaacccctcaagctagaagaaattggggtcctattttagcctccataaacaaaactgttatcagccaagaattttgtatccagcaaaagtcagcttcataaatgaaaaagagataatcattttctcatgaacaaatactgagagaattcaccactaccaagccagcgctaaaagaactgttgaaagcagatccaaatctttaaacctcaaaatacaccaaaatagaacctcattaaagcataaatctcacaggacctatgaaacaagaacccaatggaaaaataaarcattgtattcaggcaacaactagcatgatgaataaaatagtacctcacatcttaatattaatgctgaatgaaatagcctaaatgctccacttaaaagatacaggatggcagaatggataagaattaaccaaccaactatctgctgtcttctagagactcacct

SEQ ID NO: 884088 - DNA, 596 bp, Homo sapiens
tgagaaaccaatttgtagtgtcatgggctttggaggagctggcccgacctgccaaccaaatgactgggccaatgcactcaaaccccttcaagctaccctggcctggtgctgggtggccatgtcacaagctggtggcagggccctgattctgcaggtgcaggacattaaccctgatttgtgctggggcagcagctgagcctggcagtctttgaaatgacattttgagacaaagtgggggggcttattttgtctttcctacttcctccttctagtttaattgagtccttgccagatgacacttggcaggatgccaagccagcrcttgactcttactgctagaaatagtgtgtgtttgattaaaagctaaaaattgatgatatttgatccctaagtccaaatactgccccatggaggcatgccaaagcaggttttctattctgaggagccttgctggaagacggctgagtacacaggaccatttaggaatcttttcaaaatcacagtcctcatattgtttgccaagtgctgttctaagatccctaaatgtattaacttcataatccttacactgattccatgaagtagggactattgtg

SEQ ID NO: 884089 - DNA, 531 bp, Homo sapiens
cttccttctttgctttttaaatttaaggtggacatgatctcagggctttgtacagaaaacctctgagggtcagttgagtgacccacttaccctgccattccccaccctgctggggtcctcctgctacttcaactccatcaccacagagactcaattcctgcrctctgaggttcaaatctgcatctgctgaagaatcttccagaactgcaactcccatctgcactgggagcatgtctggcccacaccagctcaagcactgtgtgaagggtcccagttattcagtgtgaaattgtgtaagactttctcctggagacaggacctttgcaatcacagcttggggaattgtctttacaataaccacttcctcttagggagtcagcagcctgggctcaaatcctgcttggtcactaagatagttttgtgactctagacaagtcacagcacccctcttagcctacatttcttcatccattcaacaaatattcacatagcagctaccggcaccaggaatagagaggggagcatgattga

SEQ ID NO: 884090 - DNA, 653 bp, Homo sapiens
aaacaaacaaaaaaatcaaggttttaaagaattaaagtagttttattcagaagtcttgaggacagagactgaggccaatagcccaggagcattcctgttagactgcccagaacagtgtttcaacccactgcttacatagagatggcagggtgtcagagtgtgcaaaagcacatcagacttgctcagaagtcacattatcacagaactacatcaaagtctgggtgtaagagcatatctggttataaattacagaggtacaatcgctaactctgtcagactttttatctcctrtgtaggaagaggcaaggattagggttatttatcttttaaggaatacagtgagtcagggaagagatgtgggaggccgtgttctctatcttggtttgtcttcaaagctgcacatcatcacagaggcaggggttttgtgaaattatgtgagcaagcagaaatgaacaaataaggtttcttatgtttgctactttgtctcacacaagaaagtattgcaatgggggttttgctataggggagagagattgggctcaactccaaatacaacaaggacaagtggagatttacagccaaggagtagagcaaggggtcagtagatggaaaattactaagaggatacctcaaggctagggggattattgctg

SEQ ID NO: 884091 - DNA, 653 bp, Homo sapiens
aaacaaacaaaaaaatcaaggttttaaagaattaaagtagttttattcagaagtcttgaggacagagactgaggccaatagcccaggagcattcctgttagactgcccagaacagtgtttcaacccactgcttacatagagatggcagggtgtcagagtgtgcaaaagcacatcagacttgctcagaagtcacattatcacagaactacatcaaagtctgggtgtaagagcatatctggttataaattacagaggtacaatcgctaactctgtcagactttttatctcctatgtaggaagaggcaaggattagggttatttatcttttaaggaatacagtgagtcagggaagagatgtgggaggccgtgttctctatcttgktttgtcttcaaagctgcacatcatcacagaggcaggggttttgtgaaattatgtgagcaagcagaaatgaacaaataaggtttcttatgtttgctactttgtctcacacaagaaagtattgcaatgggggttttgctataggggagagagattgggctcaactccaaatacaacaaggacaagtggagatttacagccaaggagtagagcaaggggtcagtagatggaaaattactaagaggatacctcaaggctagggggattattgctg

SEQ ID NO: 884092 - DNA, 653 bp, Homo sapiens
aaacaaacaaaaaaatcaaggttttaaagaattaaagtagttttattcagaagtcttgaggacagagactgaggccaatagcccaggagcattcctgttagactgcccagaacagtgtttcaacccactgcttacatagagatggcagggtgtcagagtgtgcaaaagcacatcagacttgctcagaagtcacattatcacagaactacatcaaagtctgggtgtaagagcatatctggttataaattacagaggtacaatcgctaactctgtcagactttttatctcctatgtaggaagaggcaaggattagggttatttatcttttaaggaatacagtgagtcagggaagagatgtgggaggccgtgttctctatcttggtttgtcttcaaagctgcacatcatcacagaggcaggggttttgtgaaattatgtgagcaagcagaaatgaacaaataaggtttcttatgtttgctactttgtctcacacaagaaastattgcaatgggggttttgctataggggagagagattgggctcaactccaaatacaacaaggacaagtggagatttacagccaaggagtagagcaaggggtcagtagatggaaaattactaagaggatacctcaaggctagggggattattgctg

SEQ ID NO: 884093 - DNA, 670 bp, Homo sapiens
gatattggctgtgggtccttgtataagttgctttcttcttactactttcataattttctgttatttttataattttgttgtatctccttgggcatataacgtatgaaacgtttttggtttcatcttgtttgaggaccactgagcttcatgaatattatccatattcctccaaatatttgagaagttttcagccattgttttcttcaatacaatttcttccactttctcctawcattttctttggcagctataatatttatattgatgcatttgatggtttctcataggtcccatacgctttttaaaaatttattatcattcttcttttcctttttgttcctctagctggctgatttcaaatgacctatccttgagtttactaagttttgcttttgtatcattgagacttctgttgaagctctctattgatctttcatttctatcattgtacacttcagatctaagatttatatttggttgttttttacagtttatattaattaaacttctgaatgtattcaagcatttatctgatttctttagttgtctgtgttaccttccatctcattgagcttctttagggagatcatttgtattttgttaggaaatttatagatctcaatttcttgcagatcagttactggagatttattagtttcccttgatggtg

SEQ ID NO: 884094 - DNA, 670 bp, Homo sapiens
gatattggctgtgggtccttgtataagttgctttcttcttactactttcataattttctgttatttttataattttgttgtatctccttgggcatataacgtatgaaacgtttttggtttcatcttgtttgaggaccactgagcttcatgaatattatccatattcctccaaatatttgagaagttttcagccattgttttcttcaatacaatttcttccactttctcctaacattttctttggcagctataatatttatattgatgcatttgatggtttctcataggtcccatacgctttttaaaaatttattatcattcttcttttcctttttgttcctctagctggctgatttcaaatgacctatccttgagtttactaagttttgcttttgtatcattgagacttctrttgaagctctctattgatctttcatttctatcattgtacacttcagatctaagatttatatttggttgttttttacagtttatattaattaaacttctgaatgtattcaagcatttatctgatttctttagttgtctgtgttaccttccatctcattgagcttctttagggagatcatttgtattttgttaggaaatttatagatctcaatttcttgcagatcagttactggagatttattagtttcccttgatggtg

SEQ ID NO: 884095 - DNA, 631 bp, Homo sapiens
tctggattaaatataggaatatttctgccattagtcacataatctgtgaggtgacacaacagataatctccacataatcaagtaatatccatcatcaatttaattcaactatcaattattgaatacttaatgtccaccaagcatggtgcatatgagctggggttaccacaacagtgagtagggcaaaataaggctgatatggtttaatctacctccctgaaatcaaaaataataagggtcaatgtcaagattcaagataatgtctttcaacaatgaagcaatggatttgctcattatattcatatttagatattatatattaatgtatttttacattagagcggtcatcactgagttcgttcagtcacattaaccacaagtgcatggaatatacataatatatatggatatcaaatatgtatgcatttcatcaatatcctattaaaaattaatgtgatttctcaaacatatttaaaatgattgrtattctctacatagcacagtgtaatggttgagaccatagactttccagccagaaggccaagtttttaatcctggctttgctacttagtagctattctaccttgggcaatttatttaacttctctgtgccttggtttcctcaagtata

SEQ ID NO: 884096 - DNA, 626 bp, Homo sapiens
gattttatagatgagaaaactgaatcctaagttcatacagctggtaagtaaataagtcagtatctggactcatacattctgactctgaagcctgtatgctcagtcactttctcaagaataagctaaataagcttaggatcaaagttgaaaaaactctttgattcagatagggagactactcaaagtgcatttggttcagagctctgctactgactatccaaataggtttgtgcaagttatttaatatttgttgacctcatttttctcatctgtacgctagtacttgtgtgccatgtctgtggtaagaatttaaaaagcaatacagagcgtaaaatgtattatcaattttcttagatcaaatttgttgttatgttatgttatgttacgttatgttatgttatgttgtgttgttatgttatgttatgctttatgtcygggattcttagatgatcaattgagatcatttcagtgaagacattttgaaaattatgtcatagataaatggaaaaaaactatattggttaccactaccagtataattagctaaaatttgtaatgtaccaggcactgagccagataattttattcatgagctaaaaaaacattcaagaatttttaaaaactat

SEQ ID NO: 884097 - DNA, 564 bp, Homo sapiens
aatagtactccattgtttctccaggactggtccctggtaccttctttagttcatttagtgaggtcattttttcctggattgtcttgatactagtagtggttcatctgtgtatgggcattaaagagttagataattattctaatcttcacagtctaggcttgtttgtgcctgtctttgttaggatggatttccatgtatttgaagagacttgggccccaagcccaataacactgtgattcttgcagatgcatggaagtaccaccttggtcatcttggataagacctggaagtatttctctggattaccaggcagagactcttgttstcatcccttactttttcccaaacaaatggaatctctctctctgtctgtgctgagccccctaactctaggtgtggggtgacacaagtacccctgtggccactaccactatactgcgcttggtcagacctgaagcctacacagcatttgggttttgcccaagacactctataaccactatctggctactgcctctgttcactcaaggccccacgtctctactgtcagcagatggggaagcc

SEQ ID NO: 884098 - DNA, 555 bp, Homo sapiens
ccagcctttatggggctgcttgtgagagaaaccagaactaggagtgggttctcgggcgggggcacagctcagagggcagtcagtaccgaggaaatggagatgcggagatggccatgagcttggcggctgcactgagctggggcagcaaggtygccgttatatagatcagcctggggagagagagactgtgctttgatcgtgggcaaggttagttagatttgggaatagcagcctctgtaattagcccctggtaaagagctgagaggcaatatgagagcgtgtccaagagtccatctctgcgatattgagttcagatggaaccaaggaattagaaggctctggataaaatgaccacctctgccctcctctctgggctttcctctagagctctgggggcaggtaagcgtgagagcatgcccttgaccttctaatgagatgatgctgcaaatttcctcccaattggcttatcaagtttaccagctcccactcacccagtgcaagctttggcccagagagagctcccttcattgtcaacatgccaagaaagcattctga

SEQ ID NO: 884099 - DNA, 630 bp, Homo sapiens
agccagagctaaagagagactagtgaactacaagatatgaaacttaaggaaacttacagaaagaatgaaagaaatagaaaatataaagagagagtaagagatactgaaaaatgagttttaccatgtgtctaaataaagttccagaaaaagagaatgagacagagaatattcaaaatatcaaaggctaagaattttctagaagcaaagacaataaatcatcagatttagaaaggacaagaaaaggaacaataaaaaaaaaatcctaccaagattcactgtrtgagcagaacagagagacaaatagttcttaaaggcaattagaaagaaaagggaaaacatccacagttcaactgtaggtaaagacttgaaaactgctgaattctaccaaatatttaaaaaagaactaataccacttctcaaactaatttcagaaaatttaagaggaatactttcaaactcatcttataaggccaacattattcagattccaaaactgggaaagaacacaataagaaaagaaaactacaggccaatatccctgaggaaactagatgcaaaaattctcaaccagatactagcaaactgaatccaacagtacattaaaaagatcattcacattagtgggtgcag

SEQ ID NO: 884100 - DNA, 630 bp, Homo sapiens
agccagagctaaagagagactagtgaactacaagatatgaaacttaaggaaacttacagaaagaatgaaagaaatagaaaatataaagagagagtaagagatactgaaaaatgagttttaccatgtgtctaaataaagttccagaaaaagagaatgagacagagaatattcaaaatatcaaaggctaagaattttctagaagcaaagacaataaatcatcagatttagaaaggacaagaaaaggaacaataaaaaaaaaatcctaccaagattcactgtatgagcagaacagagagacaaatagttcttaaaggcaattagaaagaaaagggaaaacatccacagttcaactgtagrtaaagacttgaaaactgctgaattctaccaaatatttaaaaaagaactaataccacttctcaaactaatttcagaaaatttaagaggaatactttcaaactcatcttataaggccaacattattcagattccaaaactgggaaagaacacaataagaaaagaaaactacaggccaatatccctgaggaaactagatgcaaaaattctcaaccagatactagcaaactgaatccaacagtacattaaaaagatcattcacattagtgggtgcag

SEQ ID NO: 884101 - DNA, 630 bp, Homo sapiens
agccagagctaaagagagactagtgaactacaagatatgaaacttaaggaaacttacagaaagaatgaaagaaatagaaaatataaagagagagtaagagatactgaaaaatgagttttaccatgtgtctaaataaagttccagaaaaagagaatgagacagagaatattcaaaatatcaaaggctaagaattttctagaagcaaagacaataaatcatcagatttagaaaggacaagaaaaggaacaataaaaaaaaaatcctaccaagattcactgtatgagcagaacagagagacaaatagttcttaaaggcaattagaaagaaaagggaaaacatccacagttcaactgtaggtaaagacttgaaaactgctgaattctaccaaatatttaaaaaagaactaataccacttctcaaactaatttcagaaaatttaagaggaatactttcaaactcatcttataaggccaacattwttcagattccaaaactgggaaagaacacaataagaaaagaaaactacaggccaatatccctgaggaaactagatgcaaaaattctcaaccagatactagcaaactgaatccaacagtacattaaaaagatcattcacattagtgggtgcag

SEQ ID NO: 884102 - DNA, 627 bp, Homo sapiens
gatagaaatacaagcagcacctacaatgtgatctgcgatgctccttcatccatctcctgtgttcaggataattcaagtgctcagtttaatcccatttgcctgggtatgtattattggtcctagaagtcacagccattgccagatgagcatagcaatccacatgcttccttaggttcccatagccctacctggcactcaacctcctccttagagccccaccatgagctatgaaaagaacytgggtctgagcaagatcctctacttgcttctgcagtggattttgcatttcctaattaactgtgaggcttgagacagaggattcttggttggtaaccttctctcggttcatgaactgagaggactgagtaactagcaaatgctttgctttttactgagcacgtattaagtgtcaggtgacacggtacttgctgaacacatggcatttatctagtcttcatactaaatcttcaatgggcaagttaatattactacagattaaattgttttatgtgtaaaatgggcaaaaatttagtttgttgagaggctaaataactttctttttcctttgtcaccttttattttagattcaggaggtacctgtgcacaagtttgttacctgggcatatt

SEQ ID NO: 884103 - DNA, 621 bp, Homo sapiens
tttgttaaatgtccctcaaaataccatttggggatggggattttttttcactggaattccattaatctcccagctccactcccctacaccatgaatttgtttgccttattcagtactattccttcagaccttgaataggcctctttgctttgggggttggaggatactgataaaattcttgtgtgtttctgctgatggccctttctattttccaggcctatgttgtttcygataggcctccagcacccaaagagaaaggcaatgtgaattctctgagaaaactcctcctggcattctctcttgagcacagccaagcatctggtgcccgctttcaatagcgagaagcctggagagctgcccaagcctattcccaggtggggttgaaagagatcccaatttctgcagatagcgcccataaactagattataaaccaatgtaacatactataagtgcctcacaactacaggcttaaaccaaggcatcaaaatgggaatgaagggctatcacattaaatgattacaaaacaaatgcacttagctaggcattaggtacttagttttatcctatgtgaaaggaaatgaggagtttttccaacagcagagacagcaacagtgctgcac

SEQ ID NO: 884104 - DNA, 621 bp, Homo sapiens
tttgttaaatgtccctcaaaataccatttggggatggggattttttttcactggaattccattaatctcccagctccactcccctacaccatgaatttgtttgccttattcagtactattccttcagaccttgaataggcctctttgctttgggggttggaggatactgataaaattcttgtgtgtttctgctgatggccctttctattttccaggcctatgttgtttctgataggcctccagcacccaaagagaaaggcaatgtgaattctctgagaaaactcctcctggcattctctcttgarcacagccaagcatctggtgcccgctttcaatagcgagaagcctggagagctgcccaagcctattcccaggtggggttgaaagagatcccaatttctgcagatagcgcccataaactagattataaaccaatgtaacatactataagtgcctcacaactacaggcttaaaccaaggcatcaaaatgggaatgaagggctatcacattaaatgattacaaaacaaatgcacttagctaggcattaggtacttagttttatcctatgtgaaaggaaatgaggagtttttccaacagcagagacagcaacagtgctgcac

SEQ ID NO: 884105 - DNA, 636 bp, Homo sapiens
tgacagttccacctacatgcactcatactctcttctgccaccttgtgaagaaggtgcctgcttccccttcctacatgattgtaagtttcatgaggcttccccagccatatggaactgtgagtcaattaaacctcctttgtttataaattaccctgtatggggtactatctttatagcagtgtgagaatggactaatacaccccccttaggcccagcrtgtgcgtcttccctctatccactctcaatgccttccctctgaagatctgcaaggagtgtgccagtcttcccgatgtgccagtcccttggtggcatatgtttctcctagctacatctatttggccatcttgcccctgttttgctttctcatctttttgatatttctacaaatgtgtcaattatgccttctatgttcttatccaaccaattgaagaaaacagcaagcaaggtaaattccaacagaggtttgcagcataatactgtatacttttccccacgttgatatctgtagttaaattgcacaccttggatacacttgttaacacaggtactgatccacctaattgtcctagctttttgttcagtttccttgttgcctgcaggggtctcatgacagcccgtgtcagattctaggattgg

SEQ ID NO: 884106 - DNA, 565 bp, Homo sapiens
ccatgaggaacaggtgcagctttttaaattgttcacagtcccatttattaccctacattggaaaattaattgagtcatatttgaatacttactcactccagtttgcatgcagattgttgaaaattctctttacatctacaagaaactaacaccattcttgtgtttgccatctttccctctttctctctctcttctccttctgtctctcatacttttctggtgcctgtacttctgtgcccatttttctctgcactgaaataataaatgcttctgtagttttcaaagctctacaggtgattctgatactcagacaacgtgtataacccttagattaatctgttaaccaggcttagtgttaaccaggcttacggatgatatattctattagrtgtagtaagacatgtatgttcttttaatcacatatttaattgtatttttatctccaattgtatcttgttgaaatctattagctgtaagagcgatactcccttatgtattaattcataaattcagttgattgtgtatctactatttattaaacactatgatactatactccatgtcc

SEQ ID NO: 884107 - DNA, 666 bp, Homo sapiens
gtttgattattaaatgcactgaggtagtgtagtctttgggttaaatctgcttggtgatctataactttcttgtacttggatagtcacatctttctctaggttttggatgttctctgttactatctctttgaatactttttctacccttatctctttcttttacctcttctttattgctagtaactcttaggtttgtcctttttgtggctattttctggacttcgtaggtgtacttcgttgttttattctttttttgttttctcctctaactgtattttcaaatagcctttctttaagctcaccaattctttcttctgcttgatcaattctgcttataaaaaaacgatgccttattcagtatgtcagttgtgttattcaactccagaatttctgattaattgttttgaattatttcaattgcttcrttaaatgtatgtgatataattctgaatttcttctttttattatattaaatttctttgagttttctcagaactgctattttgaattctctgtctgaaagatcacatttctctgtttctctaggattggtccctgggtgtcttatttagtttatttgctgaggtcatgttttcatagatggttgtgatgcttatggatgttcatctgtgtctgggcactgaagagttagatatttattacagt

SEQ ID NO: 884108 - DNA, 627 bp, Homo sapiens
tctgtttctctaggattggtccctgggtgtcttatttagtttatttgctgaggtcatgttttcatagatggttgtgatgcttatggatgttcatctgtgtctgggcactgaagagttagatatttattacagtctttgcagtctaggcttgtctgtatccatcattcctgggaaggctttacagatatttgraagaactggggttttgtgatctaggccatatctgcattaggtgcaccccaaggccagtagcactggggtttttgcagactcttaggggtatcatctttctcccgaccaaatgaagtctctctgtgtggagctgcctggagctgggggtgggtgacacaagctcccctctggccaccatcactaggactgtgctgggtctgatctgaagctagcacagcactgggtcttgcccaaggcccactctaaccacaccaggctattgcctatattttctcaaagccctgtggtctacaatcagcaggtagcaaagccagccagacttgtgtccttccctttacggtggtgagttcccacaggaccagggcaggtccagacgtgccacctgggatccaggaactaaaagcaaataccttagaaatcttcctggtgttttat

SEQ ID NO: 884109 - DNA, 623 bp, Homo sapiens
cagctagcatttcaacttctgtccctcatggccagtttttctccttctcactggtcactcccacctactctcccactgaaacttccacctatcaatctcttcccacacaaggcaaatggttcttggaccaaggaaaatatctccttccagcctcacaggcccattctattctatcatcatttcatggcctcttccatgtaggttacaagctgctagcccgcctcttagaacctctcatttcctttccatcatggaaatctgtcctcaagaaaatcacttctcagtgttccatctgctattctattactcctcaagaatttctcaggccccctcccttccctacacatcaagctcgaggatttgcccccrcccaggactggcaaattgactttactcacatgccccgagtcaggaaactaaaatacctcttggtctgggtagacactttcactgggtgggtagaggcctttcccacagggtctgagaaggccactgcagtcatttcttcccttccgtcagacgtaattcctcggtttggcctccccacctctatacagtctgatagcggactggcctttattagtcaaatcagccaagcagtttctcaggtgcttggtattcag

SEQ ID NO: 884110 - DNA, 698 bp, Homo sapiens
agtatatgtccagaatgggtgaggcagctcaggtttctgaaccatacgagtgggtgctccaaatgcctagagatctgcctaggcatgaagcagaaaggacttccccataccaggatctctgcacagaatgggtggggcaagacaggytgtttatccaggtgaggaagtgcttgaatgcctggagatctgcctgggcatggagcagagagagccctgttgtactctgcaggaagggtggggtagctcaggctgctgaaccaggcgaatgggtgctctgaatacctagagatctgcctgggaatggagcagacaggacccctctgcaccacattctcaggggagcaggctggggtacccagcaatggcacatgcatatcagtttcaggtcatcaagctggtcctggctgcaagtctcaccaccttggagaaactgtagctgtagaagctctcctcctgccccaggcttgtgacagggaagagcacaattatagcacctaatgttaagacactttctacagttctggctgtggaggctcccaccccgctccagagccagcactccaatttctggcctgacactaaaatgcctgcatggccacactgctgggtcacctaacaatggctgactttgtatgtgaccagatttaaacggtgtcctgttctcagctctgtgcctggataatgtttgcagcttttcc

SEQ ID NO: 884111 - DNA, 628 bp, Homo sapiens
tcacacacagtgttggcatttgggtttgacgagatgacatttagatttatttatctaagccccaaacacataatatctctggtatgattaagtattttggcttaataaacatgtttaaaatctgatctaaggaaaactaatcatactacttctaaatgtcttaaatatcatcatgatcctttttgtcactaatgataacacaaaaattatgggtaggttggcatttattaaaggatagcaatatcattaagatcaaagcctttggagtcagaggggtctgaattaagtgttaaatcaattgcttctactaactagccttgtgacattgactaagttacttgacctcactgaacttcagttactttatctgaagagtgaaattaacaatattgcttctatgtggaggagtgagtattcaatgagattaagcacgtggagtgcctggyaaacaatattctttataattcatattattgtagttgaaatttaacatcaccttgttcagacttgatatttctgtttagaaataagatggaaggtgtatcaaggaatggattttccttccttcctaaaccaatcaaaaaatcagaaatatttattagacaatgttttcaagacattagacatc

SEQ ID NO: 884112 - DNA, 589 bp, Homo sapiens
attatttctgggtttgtctgtgaggttgttccaggggagaatggtgtgtgtgagtcagtgaactgagtgggggaagatctattctcaaggtgaacagggaccatccaatcagctaggggttgggataagacaaaaaggcagagggaaggaaaattctcactctcttttctggagacaacaactttttttctcctactcttgatcatcagaactccaggttctctggctttcggacttctggacttgcaccagcagcccctgggttctcaggccttgtaccttggactgagagttacaccattggctttcctggttctgaggattttggacttggactgagccatgctaccagcacgtctgggtcttctgcttgcagatggcctattgtgggtcttctcagccttcataaatgcatgaaccratttcttgaagagatcctctctccatatatatatatatatatatatatatatatatatacacacatacacacacatatatgtgtgtatatatatatatgtatacatatatatacatatacacatatatatgtgtatacatatatatgtatatatatgtgtatgtatac

SEQ ID NO: 884113 - DNA, 705 bp, Homo sapiens
atgttcttaggtgtttataatgagagatttgtgggaattcaattgtgaaataacctatcttacctatctatataactaaatttagttcagagacatgttagtaaacattgtgactcctccccaagcaccagttcacacgaatgcacttatcagtgctagataacacaacagattatacatgttaaacagcaggataatgatttatccttagcatgaggagttgtcaagcagtcatgcaacctggcacacctccagctgtcaaaagaggtgttttctagtattctagtttccactgaatagagtacaccaatcctctgttgaacactaaagttaaattagacataaacacaagccaaatagcaatctgtttaatgttayttatttcctcaggtacaataacatttttgctatggctattcatcaatcacagagaaaatgtggctgcagatgctttattattgatactctcctactgctctactagaacctttgtcaaaaaaattagatcaaaaattggaaggaaaattgtcaattccatatgaatagttaattttggaaacctgccctgcatctcactgtgagattattgttgaaagcaaaggaaaagaccaaatagttgcaccacaggagtaatcacatgtgcctgacctcaagccttgttaacctatgttcagtgacttctaagtgtgttagattgaattactg

SEQ ID NO: 884114 - DNA, 668 bp, Homo sapiens
cattttggaatctggaggatggtagccctcttcacacagctccactaggcagtgccctagcagggactctgtgtgggggctctgaccccacatttcccttcttcactgccctagcataggttctccatgagggctctatccctgaagcaaacttcagcctacacatccaggcatttacatacatcctctaaaatctaggtggaggctcccaaatctcaattcttgacttctgtgcatctgcaggcccaacaccatgtagaaattgctaaggcttggggcttgcatcctctgaaacaacggcctgagctgtatgttggccccttttagccatggctgggacacagggcaccaagtcccaagactgcacaaagcagcaaggccctgggcyggcccacaaaaccactctttcctcctaggcctccagggctgtgatgggaggggcttccatgaagacctctgacatgccctggagacatttttcccattgtcttagcaattaacatttggctcctcattactttctactaaatttttgcagcggcttgaatggcttgaatttctcctcagaaaattgatttttcttttctgtcacatcatcaggctgcaaattttctgaaaagctctgcttcccttttaaacaaaagttccaattccaaaccataactttg

SEQ ID NO: 884115 - DNA, 668 bp, Homo sapiens
cattttggaatctggaggatggtagccctcttcacacagctccactaggcagtgccctagcagggactctgtgtgggggctctgaccccacatttcccttcttcactgccctagcataggttctccatgagggctctatccctgaagcaaacttcagcctacacatccaggcatttacatacatcctctaaaatctaggtggaggctcccaaatctcaattcttgacttctgtgcatctgcaggcccaacaccatgtagaaattgctaaggcttggggcttgcatcctctgaaacaacggcctgagctgtatgttggccccttttagccatggctgggacacagggcaccaagtcccaagactgcacaaagcagcaaggccctgggctggcccacaaaaccactctttcctcctaggcctccagggctgtgatgggaggggcttccatgaagacctctgacatgccctggagacatttttcccattgtcttagcaattaacatttggctcctcrttactttctactaaatttttgcagcggcttgaatggcttgaatttctcctcagaaaattgatttttcttttctgtcacatcatcaggctgcaaattttctgaaaagctctgcttcccttttaaacaaaagttccaattccaaaccataactttg

SEQ ID NO: 884116 - DNA, 585 bp, Homo sapiens
tctcacaggaatgttttgcttagattgctacgtacagcaggactcaaagcatattctcaagtagggctaacctctaaccccaagagctggccactaactcttaggcattgtttcttctagaacattcactgggtcacctggatcatactttagatcaagccccaaagccaaatcccttggcagtgatttattcataatcctctgtcattgtttttgcttctaaggttcctaccacccttagcattttatctggacatgagggcagacacttgctcataatatacatttcagtatatctcyctccaccaccctcccacccccacctcattgccaccaccattaccctgctaccaccccatcaacaaaacagcactataccagctttgctcaggtttcattatttgtataattacttaaagcatggcttcccaatccatataaaccggacagtcaacagaaaattatctccaatgcagacagttaagtcctgagcaaaaggacttacccaggtgaataagataaggctctttgtttatttaggaaggcatgattccactcaaagtctcttaataaacagacctcagg

SEQ ID NO: 884117 - DNA, 656 bp, Homo sapiens
tgctgccttcaagagactcatgtaatgtgcaatgacacccacagactcaaaataaaggcatggagaaagatctatcaagcaaatggaaagaaaggaaaaaaaaaagagctgaggttgctattctaatttcagacaaaacaaactaaaccaacaatgatcaaaaaggacaaagaagggtattacataatgataaagggttcaatttgacaagaagactcaactatctgcatatatatgcacccaacacaggagcaacaagattcwtgaaacaagttcttacagacctacacagagacttagatcgataaccacatcataacagtgagagacttcaacaccccactgacagtatcagatagatcatcaacagatattcaaaagctaaacttgacacttgatcaactggaactaacaaacatttacagaacactcacatccaacaaaaaaatttacatttttcttacctgcacatggcacatgctctaaaattgaccacacaatcggccataaagcaattctcaaaaaattcaaaaaaatgaaatgataccaaccatactctctgaccaaagcactctaaaaatagaaattaataccaaaaaggtctctcaaaagcatacaattacataaaaattaaactggctcctgaatgacttttg

SEQ ID NO: 884118 - DNA, 658 bp, Homo sapiens
atatttcaacttctgagttgactctaattgcagaacctagacttttttagaattaacactttgtctcctgataaagtgcaaattacgtaacggagatataatacacttatctttgttatagccatttatacctcagtgtgagttattttattatgtggcttcaggcttagatatctacatagaaggaaggcagataatataaaagagtgaagagggtaggatgggtattcgatggactggagcgttcatggtcctatttagccccagttgatggttctcatactatttttgccacaacaaagactgaaataatacttgacacatagtaggtactcaataaatgcatggggaaatgggagaatgccgggccagggatgacagatctatttttaaagagaaacaagacattttatgtaaaacctcttgacctaagattcaattctgaattcaggttttgttaggaagtagaagacaggactaagttcctgatttggggagggaaacrcaaagggagattgagactatgggctttggtaatgaaacagaacagaactgaactgacagattgaaatagtaactgagcccatgacctcagcctcattagcgagaatgctactgaggcagtcagtgagtaatccaaatatttttatttctttcc

SEQ ID NO: 884119 - DNA, 663 bp, Homo sapiens
aggatgcttaagaaatagaatcagtcttaagttgtagtgtggtgtatggggatcactctctagggtccatatttagtcaatgacaaaatatttgctgactttcaaatggatcggtgatttcttgtttttgtttttgttgttttgagacagagtctggctctgtcacccaagccggagtgcagtggcacgatctcggctcactgcaacctccactgcctggattcaagcaattctcytgcctcagcctccccagtagctgggattacaggcgcccgccaccacgcccagctaattttttttttgtattttagcagagacagggtttcaccatgttggccaggttcgtctcaaactcctgacctcgggtgatccgcccgcctcggcctcccaaagtgctgggattacaggcatgagccactgcacctggccagatcagtgattcttgattttcttggccatgaagaaaatgatgcaatatgctcttcaagggcctttctgcagaatagagaagatgagatgcaaactattctcattgatgaacaccttggttataactatatctctttctcttacattcagaaaattgtattggaatgcaaatggttgtgagagataccactttttattgaaacagctggcacaggaatatacctggttacaatg

SEQ ID NO: 884120 - DNA, 658 bp, Homo sapiens
aggatgcttaagaaatagaatcagtcttaagttgtagtgtggtgtatggggatcactctctagggtccatatttagtcaatgacaaaatatttgctgactttcaaatggatcggtgatttcttgtttttgtttttgttgttttgagacagagtctggctctgtcacccaagccggagtgcagtggcacgatctcggctcactgcaacctccactgcctggattcaagcaattctcytgcctcagcctccccagtagctgggattacaggcgcccgccaccacgcccagctaattttttttttgtattttagcagagacagggtttcaccatgttggccaggttcgtctcaaactcctgacctcgggtgatccgcccgcctcggcctcccaaagtgctgggattacaggcatgagccactgcacctggccagatcagtgattcttgattttcttggccatgaagaaaatgatgcaatatgctcttcaagggcctttctgcagaatagagaagatgagatgcaaactattctcattgatgaacaccttggttataactatatctctttctcttacattcagaaaattgtattggaatgcaaatggttgtgagagataccactttttattgaaacagctggcacaggaatatacctggtta

SEQ ID NO: 884121 - DNA, 653 bp, Homo sapiens
cagtttcagctttctacatatggctagtcagttttcctagcactatttattaaatagggaatcctttccccatttcttgtttttatcagttttgtcaaagatcagattgttgtagatgtgtggtatttttttttttttgcccagcttttgtatcaaagtcataccagcctcataaaataaattagggagtgattcttcattttttccttcttgaaatatattctgtaagactggatttatttattccttatgtgttaagagaaagttctatattcactttcttttgctgtggcaaataattacaaaaaattttagcaacttaaaamagcaccaatttattatcccacagtactgtggataagtaagggggcagggctggtttcatctctttgaatctcataagaccaaaattaaggtgtcagtagggccatatttctttctttagcatcaagggtagaatccattttgaagctcatcaggttgtagtcaaaattcagttccatacagctataggaatgaggtttccttttctttgaataagataattagtaaccttaattccatctgcaaagtccctttgacatgcaacataacatgttaaaaagcataacaccatggaaaaagatcatgggggccaaaaattctgcctgcca

SEQ ID NO: 884122 - DNA, 542 bp, Homo sapiens
gcctatagcaaaattattcatgtgtgctactcataggtgatagaaatgaaacaatcattagctatatggaactgcagtagtcctgttgtactatcttctgattaaaaaagagaacaaacatgcaaaaacataaaccttgataggaatatgaatattgtactgataatgtcctagctatatgtaatatgtaaattacatatatccaggacaagattaatgagacatgaatatgtttggcagttaagtgttcagattctgaagtgatgatattagtaggagaacaattggttggatttctattggagaaagacacttcacatcccttataaatatcttagccatttcttggttactattatacaaagacatattgtcaggattgtgtcattattccaaccaaacyagataattccgttttaaaaaataccaaactaacctaataaacacaaaatgtctgtttgagtgactgatatgttacttttcggacatgtgtatggtgcatgaagatactaccttatcattcaatactagatactgtattt

SEQ ID NO: 884123 - DNA, 625 bp, Homo sapiens
ttgttttttaccctttgtgagtgttttacatcttgaaggttaaaaaattcttagcattaaagaaagctttattttgctattttgaaacagaattttccctaattgtcaaaaatgttaagctactattttttaccagaaatcaaaacacttacttgtttaccagaacctccacccctgagcactggtgaacttttaggttcctccatatttaactctaactttcagtcccaaatgttacatgaaattaattactagttcattccttccacctagtgtgtcaatataatacatttatcttygaaataatgtcattatttttccacagaattaaattttgcaataatgtcttataataagaagaaaagaaatttacacacaaagtgtaggcttaatacctttcctcattcataaaatgagggagataagtacacaatccccaggatcacttataggtataagattcatcaagccaaaagttgtaatctaaaaataaataaaaaacaaagtctgtttcataattgattttcatattttgctatagtttatcaaatctacttctcagaaacctgtcaaagttttagcttagaatacttttgttgcaatacttatactttaaacaaaattt

SEQ ID NO: 884124 - DNA, 515 bp, Homo sapiens
attatatacacatatataactgtgtattatatatatatacatatatataataagactatatatatacatatatacataaatatacacaacatttctttactcactcattggctgatggacaattaggctggttgcaaatttctgyaattgcaaattgtgcttctataaaaatgtatgtgtaagtgtctttttcatattgttggaaacaagttctcagcatagctaaaagaaacctgcacttggacagaaaattttctcagcaaggcacctttacttctgcagaagggtgctgctcatgcctgttacaatcacaagcgcacaccaaacaaaggagagaaggggtttttatccctaaagcagttcctgtttctgtgtccttccactattggctggggttggaccacacaatctaagctgatcctgatcggctaagacttaaacttcccaaatagggtaaacatgcaatttggctcaacctctccttttcccactggaggtttcttgcactcttgtga

SEQ ID NO: 884125 - DNA, 665 bp, Homo sapiens
aacttgttattggtctgttcacggattcgacttcttcctggtttagacttgggagggtgtatgtgtccaggaatgtatccatttcttctagatcttctagtttaattgtgtagaggtgtttatagtattctctggtagtagtttgtatttctgtgggatcagtggtgatatcccctttatcactttttattgcatctattggattcttttccttttcttctttattagtctggctagcggtctatctattttgttgatcttttcaaaaaaacagctcctaaattcattgatttctgaagggttttttgtctctgtctccttcagttctgctctgatcttagmtattacttgtcttctgctagcttttgaatttgtttgcccttgcttctctaattcttttaatcgtgaggttagggtgccgattttagatatttcctgctttctcttgtgggcatttagtgctataaacttccctctaaacactgctttagctgtgtcccagagattctggtttgttgtgactttgttctcattggtttcaaagaacttatttatttctgccttcatttcgttatttacccagtagtcattcaggagcaggttgttcagtttccatgtagttgtgcagttttagtgtttcttaatcttgggttctaatttgattg

SEQ ID NO: 884126 - DNA, 665 bp, Homo sapiens
aacttgttattggtctgttcacggattcgacttcttcctggtttagacttgggagggtgtatgtgtccaggaatgtatccatttcttctagatcttctagtttaattgtgtagaggtgtttatagtattctctggtagtagtttgtatttctgtgggatcagtggtgatatcccctttatcactttttattgcatctattggattcttttccttttcttctttattagtctggctagcggtctatctattttgttgatcttttcaaaaaaacagctcctaaattcattgatttctgaagggttttttgtctctgtctccttcagttctgctctgatcttagctattacttgtcttctgctagcttttgaatttgtttgcccttgcttctctaattcttttaatcgtgaggttagggtgccgattttagatatttcctgctttctcttgtgggcatttagtgctataaacttccctctaaacactgctttagctgtgtcccagagattctggkttgttgtgactttgttctcattggtttcaaagaacttatttatttctgccttcatttcgttatttacccagtagtcattcaggagcaggttgttcagtttccatgtagttgtgcagttttagtgtttcttaatcttgggttctaatttgattg

SEQ ID NO: 884127 - DNA, 645 bp, Homo sapiens
taagtatattgaaaaaaaagttcaacatcactaataatcaaagaaatggaaattgaactcacaatgagataccaactcatgccagtcagaataatgattattaaaaagtcaaaaaataatagatattgtcaagggtgcagggaacacataatgtgtctggaattgattccttctggttggttcttggtctcgctgacaagaacgaagctgcggaccctcgcagtgagtgttacagttcttaaagatggtgtgtccagagtgtgttccttcagatgttcagatgtgtccagagtttcttccttctggtgggttcatggtcttgctgactttaggagtgaagccgcagaccttcgcagtgagcgttacagctcataaaggtagtgtggacccacagagtgagcagcaccaagatttattgtgaagactgaaagaacaaagcttccacagcaggaagttsccactgctggcttaggtggccagcttttattcccttatttggccccacccatatcctgccgattggcccatattacagagtgttgattggcccgtttttacagagtgctgattggtgtgtttacaaacctttagctagacacagagcactgattggtgtgtttttacagagtgctgattggtgcattt

SEQ ID NO: 884128 - DNA, 579 bp, Homo sapiens
attaaacagaaagattagaggagcttttctggtaaattgaatattttaggaaactgagttaagcagaaagcccccttttgtttgtttcacttcttgttttggttggtgacctttagtgatcactgtccagagctgaagatacagaaggtataggaaattggacataacctgaggtttgtttagctattctatagtcattgcttcttcctaaagggaacacagcagaaatgccacctcttacagggttcttgtcacttgagttgtttataaagtctatattagcaaaattccctttgattttttttcacactttgcttctcctaaatgggaaatatgctctgaatgtatctttctatcagcatcacattctacccttgttgctgcgtgagctaattaacctttaatgtatacctggagcttggactcaaacmaagggagatgggaagacgattagatccttcttattattaacaaccctctgtaaacctgaatcacaaggcagacgaatggggcagcaagtctgatggtgtgaaaagggtttgacactaagaatactgtggaaaaatctctctaaattgg

SEQ ID NO: 884129 - DNA, 604 bp, Homo sapiens
tttattgtcattactattttaggcttgagaaaactgtgacccagagacaataagtaagttttccaggtggagagcaatgaagccaaataaacacagatctatctaacttcaaagcctgtccttttaaccacttggcaatacaaagcacttacatatagatcagtcactggggagacaaagatgaataagactcaggccatgacttcatggagctcacagtctgatgaggtgagatacatcgaaatagagcatttcaatttagtgtcatgagtactaggatgggattatytgttggtgctgtgagagctattgattaccatgtccaaatgaccctagtcactggttagcactgttagttcaataggcatcctgcatattgtcctagtagtggatccaatgacagaggctacatggttttgagcctagctgcagacctcctaccaatatcttggaccttggctcaataaaacacagagcccttaactctgatacaccaaatatctctgaactatttacctgccgccacatccttgaccctgaagatctctgccatatcttcctatttgaggctgcctttgaccctgactagctgactttatttttg

SEQ ID NO: 884130 - DNA, 599 bp, Homo sapiens
accttctgcacaggcaaaacatagagttatctattggtggaattcagggtgaagaggagggcagagagtgtctatgaggaggagtggccagagtggtaaagaagagggaaacaccgtggcaaggaacacaaaccacactgatttttcagtcttgccaacagtgtgccttgcctatcaagaatggcagggaaattttgcaaaatgagttaataaaatctcagtaaacataacagatgaggctttttytaaatgttactgctactcgtattttggaacatttcccacctaccagccctggaccagctccagtcagaggttgacacagagttggcttggtgaactgcagcaacctttcggaaacaatcctgacttttttttttttttttatcaaactcatgtttctggggttatcttgaagccttacttgggggctttttatgacaacatttttgcctgcgcaacaagttccttggttctgtagtgccttttttttttttttgcacagttctctttattcaatgccctgaacttccctaaaatctgtgctgaaataataacaatggcacttacatttgtatggtatttttactgtttttgaa

SEQ ID NO: 884131 - DNA, 583 bp, Homo sapiens
acactttcaaaagtgctacgtgcaatctagcagtagtgagggggtaggggtgtggacacctacaagtgaggtcaggcctgcagtaggtatattatgaataagtccagggtctaaatagtcccagaaagctcaggggctaatttgcacagaactgctattcargaactgagggttttgtgagctagtccaagtagtcgttatcttacttagaaaattgaaccatcccccagatggagcatttataggtggacttaggctcagggactaatgttgcaccagcctctcaagaagtccacttttcctactggggagtttcaattctgcatgaagattttattatcaataaaatagtctcttccttcctaacccatccaaggaaagctcaatatggagaatagaataggatcttaggcccaacctccacttccaaactgggccaccaaatcactgtgtaatcattttctcactttaaccttcaggattctgctaggagactcaaggcacagatcccgaactgcttttttgggaagaatttatatatctatgcaacggaatactgttcagcaataagatggaataaatt

SEQ ID NO: 884132 - DNA, 661 bp, Homo sapiens
tgctgtgcaacagttcacagatcacttcctctccaagctcccatttcctgtctgaaaacatgaggataaccccaccccattctgctggggtttggtgaggtttgttcaggagaaagtttgtgtgctgcctggcacaccacaggagaactcaactattggtaagtctttccactgggcctggacttttcagccagagcaaagcatgcccaaccaaagcccatcatgayaccagcccccagtgcatgacttgtctcttgttcttgtgtgcctctggtccagtctccacaaggttgcagcagaagtgatctatttacaacttttatctgcttatcacactctcctgcttaaaactctttaatgactctctgagtgctcttcagggggaaattcaaacttcttaatgtggctaaaagaccccacgtcgtcgcctctgtctgcctttctcatgtcacctctcaccacctctccaccataacactccatacttcagccacattggacttctttcagttgcttcaacaaatggtcctgttttattcagggccttcacatattcatttactctcatctggaacagctaacttttactcatctttaagttcagttaatatgtcacttcctctgggaaggctttcttaacatccctcaggttgaattaggt

SEQ ID NO: 884133 - DNA, 660 bp, Homo sapiens
actttaaaatggtaactttaatgttgtgcatagtttaccacagtttgaaagtgtttttaatttttaaaaataggaaatgataaaattagactttatctaattctttccagctttataatttggatcctgctcctttgtacttcatggctcatgctttatacttacttgatgtttctatggtacttgtgcacagctgtcatgtatcagacctgcagttttgcmcatgctttccactcttctagttcctcaactatttgtaaggttgccctcctttatgttttccattaaatcttccattagtcaaaccactccagtgtccctcgttccataagtttcccctgctctgaactcccagggcacattgtgcaacttcattaccttatattaaaattatctggaattttaaaaaatctactagattagggtagtgtcctgattttattcatttttttcttttggtgaaatttgagacatgtcttgcatttaacagtatttaagcaactagattgtgcaacggagccagtttctccagacaggctggagagaccacttgcatcagaatcatctggggtgccccttgaaaatgcaatgttccgggccaacgagtcaatctcggagtgtaaatcttgtgaagctgtattttaacaagctcacttggtg

SEQ ID NO: 884134 - DNA, 631 bp, Homo sapiens
tgttgtgaccacttaagagaataatgattttgtagggatacagtatccagagagcagtaaggtgactcaaataatgaaagtatgaggaagaaaggagaaaaggagaggcaactttccacattatggtggaggaatcccttggatggactctggataaaggtatagccctaacctcctagcatctctgaaatatgtttgggggctatccctgaaacttttgtcacatccgctagacttccttttcccatcttayatacatcctccaaagccaggaaaaagaatgcatctctccatgctctagagcagcagctgctgaagggagactcataaatcctctgacagcatctttccttaaacatacaccatcacagttttcaaattcattgatgtgagatgagcacagcaatagcatcatctcccttatactatatatgatattctttattgtaaatgttttgccatagtttaacttgcagtattgatgaaagttttgtaagaaaagacaagcacatgctagtaatggtgttttataatgtgggacgagatttttcagaaaagtgacttgaccaaggaagtgcagctgtaagcagtgtcatctgtcttctattttgaccctcaggaagaagtaagg

SEQ ID NO: 884135 - DNA, 631 bp, Homo sapiens
tgttgtgaccacttaagagaataatgattttgtagggatacagtatccagagagcagtaaggtgactcaaataatgaaagtatgaggaagaaaggagaaaaggagaggcaactttccacattatggtggaggaatcccttggatggactctggataaaggtatagccctaacctcctagcatctctgaaatatgtttgggggctatccctgaaacttttgtcacatccgctagacttccttttcccatcttacatacatcctccaaagccaggaaaaagaatgcatctctccatgctctagagcagcagctgctgaagggagmctcataaatcctctgacagcatctttccttaaacatacaccatcacagttttcaaattcattgatgtgagatgagcacagcaatagcatcatctcccttatactatatatgatattctttattgtaaatgttttgccatagtttaacttgcagtattgatgaaagttttgtaagaaaagacaagcacatgctagtaatggtgttttataatgtgggacgagatttttcagaaaagtgacttgaccaaggaagtgcagctgtaagcagtgtcatctgtcttctattttgaccctcaggaagaagtaagg

SEQ ID NO: 884136 - DNA, 600 bp, Homo sapiens
tcacattgctgtcagagttctcttcccccaaaacatctgatcatgaccctcttcaataaacaatataacccaagctctagcatgaaagcccagtttttcatctttctctccacttctaatctgtgtgggcaaagcagttatttccactgyctctttactctcttctggaaagggatgaagtcatgagaaataactggtcctactcaggatttactaggattcccatgtaaaaaatcaccatgcacacgtttattggaatctccctttcttccctacaaagatcaaggttcacctccttctgggacttaaagatggaccaaggacatagcatccagcgtcaatgaataaaggtcaagtctgggacacaagacatgtctgctgaatctctgtatctattctcatccgacccaaactccactggtaaatggaagacactctttcctaaaacctccctgactcaagagacatttgaggaaaccaaatgctaagtaacttactaattaggtatgtgaaactaaaatatgagtttcaccaactggcatggtctggaaaaaggccgcaggctcaggaaacccacgtttctagtttctgtggtactac

SEQ ID NO: 884137 - DNA, 696 bp, Homo sapiens
aggatttactaggattcccatgtaaaaaatcaccatgcacacgtttattggaatctccctttcttccctacaaagatcaaggttcacctccttctgggacttaaagatggaccaaggacatagcatccagcgtcaatgaataaaggtcaagtctgggacacaagacatgtctgctgaatctctgtatctattctcatccgacccaaactccactggtaaatggaagacactctttcctaaaacctccctgactcaagagacatttgaggaaaccaaatgctaagtaacttactaattaggtatgtgaaactaaaatatgagtttcaccaactggcatggtctggaaaaaggccgcaggctcaggaaacccacgtttctagtttctgtggtactactaaccagttataactagtgatacgatattacataatgagacctgagcctcagtttttctcatctgcagaattggagataatactccaagtcttcctgtgggaatatgagaaaatgaataaagttatgatatactgataaggmaaacactcccccaactttcatttaagtcataaaatctggctaagtgttggtgagtgagcaggctgtgtactccttcccgcctcagcagcagacacaaagggtctcttcttctcaaatttcaggaacttcctcacataagggagaacttgccgggaaagc

SEQ ID NO: 884138 - DNA, 661 bp, Homo sapiens
attaaattgacataagtcagatcaatggagaaaaacatacaagcttatttaatacaagttttttgtggcacagagccttcataaggaaataaagacccaaagaaacagttaaagttgaaaacttatatagtgaattggacaaagagtagtaacttgtgaaaatgtgacaaggcaaagggggttgggctagagaagttaattgggtggagaagtgactaggaagataagagttaatttaacagggtttgtttgtacagatttccctcagcctcaacttctcattcttgatgacaagaattaaattttccttcctgtatagggagggcatctttcacacggggattttatcttctgcatttaaggtcagagtgatcttatgcacctgctgtatttcaaatgcctttaactcaaaatagtcaatatcccagagtagcatattttaggatggtatgttctgaactgttttaactgcataggtgggacaagagacaagtcatggtattattccccacccacccacccccrggtctgcttacactaacccctggaacccgtgaatattatttgtcaaaaaaaggactttgcaggcatgattaagtcaaggatcttgagataaggaggttatcctggttagcagcgtggactctaaaagcaagcacat

SEQ ID NO: 884139 - DNA, 587 bp, Homo sapiens
ctctctagtactgatagaccacagaataaaagaacaggaagcataagtaacagtatgtcttgttccaatccagcaagtaggcatggttttaattttacactgtgctttcatagtagagccagaatttctatagggaaacaatttgattcctaacatctgtgtgtgaagatttccagttgaaataatgagttgtgcttaatcaaggactcacattggggtgctgggatggcaccccacaaaggcacgatggatgccccamaaccaccccaaatttggtttagatgtcaagactgatgactccacacacactaaaggagtaagaaggtttattattcacacaatgagactcacaggtaaagtatggcaggctcccaaactagtccgaaaatgtattgagagaaagcagggagaggtttctagcttggagttttatggtggttaggggatgggactgggataagggtttcccatgcaaggcagggcttacatagtttgaacaactcccacccccaccttgctaggacaccaagggagagagcatccaaactttcttatcagctgtccagatgtggtacagaaaggaagaa

SEQ ID NO: 884140 - DNA, 646 bp, Homo sapiens
aaacaagaagggataggtgacagagattaaacccaagccagtttgttttgttgattattattaacggtattgataaagagtttgctgaaagagggaagcatattgaaattattgcttaaaaagaagtgtgtagaattttcagttgttttcttttgataagagttgcctcatagctgttgtagtatgtgcaaatgaaggtcagcgataaatcacagaatgaatcacttccaactccttcacatctacagatataagtaagaatggaaaatattgtcacttagatgagtccttattttttttttctgtatgaatagtataaaccttacttttctggacacctagctttggcagctggtgaaggttgttaaagtaacaaatgggaccattctgcctctcccagatcgattttgctgcaagayagttgaaaataatataatccagaaatgaatttattttcttatggcaaaaacaaaacagaaagagagtactatgaggaagtatcatgctactggtaaatttttcaaactaaaaccgcattacatttcattaaatgagtttatgtccattaagcgtcaatgagcatgagtggttgaacccagaatccagtcaaagtacatattaactttctgtatgactttaaaaagag

SEQ ID NO: 884141 - DNA, 615 bp, Homo sapiens
ataggtatgttttagcattttatcattaagcttcatgctggcttaaaaaagaaatctgtcaattcttgccttaccactgatttttaacatcagaaatgaaggttgacatttgttaacatgcctcttctcctaccttctatgtaagttatataatttacctcctctaatatattactagtatatattaatttgacccatttgtaatttttttttatctacccatgtattcaggaaataaatgccactcagtcacggcattttttttttgtgcaatgtactgctaaatttctttggtaattatgtaaagatttttgtaatattcaagataatcatctattttagaactattctatcawctttcagtgtcagtggtatgctgtcattatttaaaagaattttggaggattctttctataatagtttaaataagcttaaatagagaaatatcattccatggaaagtggaattaatttgcttctaacgccatcttggcatggcatatttttatgttaatttagcaatagctttaatagcatgcattgttatattgttctgttttctgtctcttctggagtcaatttagtagattccattctccttgactaggttgatcct

SEQ ID NO: 884142 - DNA, 483 bp, Homo sapiens
tgctgccatcatttcaactatgacccactcatttcactcctggatatttatccaagagaaaggaaaacattcatacacaaaattacttgtgcaaaaatgttcaaacagcccaagtgtccgtcaataggagaaggaatgaagaaaccacagtatgttcccacaataaaggaataaaagtcagtgagctaggccaggggtgcmgtggctcacgcctataatcccagcactttgtgagaccaaggcactcgaataatttgaggtcaggagttcgagaccagcctaaccaacatggtgaaacatcacctctactaaaattacaaaattagccgtgtatggtggtacatgtctgtagtcccagccacttggaaggctgaggcaggagaattgcttgaacccaagagggagaggttgcagtgagccaagactgcaccatcgcactccagcctgggcaacaagagcgaaattccatctcaaaaaaaagaa

SEQ ID NO: 884143 - DNA, 670 bp, Homo sapiens
taccctcatgaaagggactagggcccttttaaacgggcttgaaagagtgggtttgctttcttccatcccttgcaccaagtgaggacacagcaagaaggcaccatcttggaagcagagagcaggccctcactagacaccaagtgccagcactttcctcttggacttcccagcctccagaactgtgagaaataagtttctgttctttgtcaattacccagtatgtggtatttttgtgtccagagttggttcttgctggtgggtttggggtctcgctgacttcaagaattaagccgtggaccttcgtggtgagtgttacagytcttaaagatggcacggacccaaagagtgagcagtagcaaggtttactgtgaagagcaaaaggataaagcttccacagcgtggaaggggaccccagcagcctgccaccgctgactgggggtggccagcttttattcccttattgtcccctcccgtgttccgtttctgtcctatcagagttaccttttttcaaacctccccacgattggctacttttagaatcctgttgattggtgcatttcatagagtgctgattggtgcgttttacaatcctcttgtaagacaggaaagttccccaagtcctcactcaacccagaagtccagctggctttacctctcattttgttataac

SEQ ID NO: 884144 - DNA, 670 bp, Homo sapiens
taccctcatgaaagggactagggcccttttaaacgggcttgaaagagtgggtttgctttcttccatcccttgcaccaagtgaggacacagcaagaaggcaccatcttggaagcagagagcaggccctcactagacaccaagtgccagcactttcctcttggacttcccagcctccagaactgtgagaaataagtttctgttctttgtcaattacccagtatgtggtatttttgtgtccagagttggttcttgctggtgggtttggggtctcgctgacttcaagaattaagccgtggaccttcgtggtgagtgttacagttcttaaagatggcacrgacccaaagagtgagcagtagcaaggtttactgtgaagagcaaaaggataaagcttccacagcgtggaaggggaccccagcagcctgccaccgctgactgggggtggccagcttttattcccttattgtcccctcccgtgttccgtttctgtcctatcagagttaccttttttcaaacctccccacgattggctacttttagaatcctgttgattggtgcatttcatagagtgctgattggtgcgttttacaatcctcttgtaagacaggaaagttccccaagtcctcactcaacccagaagtccagctggctttacctctcattttgttataac

SEQ ID NO: 884145 - DNA, 670 bp, Homo sapiens
taccctcatgaaagggactagggcccttttaaacgggcttgaaagagtgggtttgctttcttccatcccttgcaccaagtgaggacacagcaagaaggcaccatcttggaagcagagagcaggccctcactagacaccaagtgccagcactttcctcttggacttcccagcctccagaactgtgagaaataagtttctgttctttgtcaattacccagtatgtggtatttttgtgtccagagttggttcttgctggtgggtttggggtctcgctgacttcaagaattaagccgtggaccttcgtggtgagtgttacagttcttaaagatggcacggacccaaagagtgagcagtagcaaggtttactgtgaagagcaaaaggataaarcttccacagcgtggaaggggaccccagcagcctgccaccgctgactgggggtggccagcttttattcccttattgtcccctcccgtgttccgtttctgtcctatcagagttaccttttttcaaacctccccacgattggctacttttagaatcctgttgattggtgcatttcatagagtgctgattggtgcgttttacaatcctcttgtaagacaggaaagttccccaagtcctcactcaacccagaagtccagctggctttacctctcattttgttataac

SEQ ID NO: 884146 - DNA, 675 bp, Homo sapiens
aatctgcttaacattgtatatgccaaatagcctattctttttaaatgttagcaattattattataactggatatacaaatttgaattcacttcattatatgcttttcatcaaaaaaaaagtggagcaaaaaggtgggtaatgttaacataggttaaatgaagtagatatcagtatcaattgaattcaccaagatttcaactcacactgatatctacttcataaatttctgaaacagcaatataaaaagttaccatggctggtagaaaacaaacaaaaaccccactaattcaacataatccaatgtctttgaaggatggacattttacttttagaatcagatgatgtcaaatgccagtgactgctctttcattgacacttaggtttttttggaaactgtagaactggtgtttgatgtactaatatacttcattgtacttatcctgtggcctgaaatacaattgcaaaaatatcacgtaatacatgattaaggagtagcttaaatgaggggastttatgccttattatgcaaaaatgggtaggagttatcaacatttaacattcagatgaatgatttatatagcacacttcaggtataaaaattacaaattatggtgattctttgctctgcattcatattctaacatggtacccagtgaactcatctataaattgca

SEQ ID NO: 884147 - DNA, 556 bp, Homo sapiens
gactgtaacagaaaatggggttaaaagaacagggtaatatttcattactctcaaaagaaacccttttttctcccttttttttttctggcattttatacccatcacattgaggaggttctcggtatgaatgaaataatcagttccatgaattaatgatatccagtctttgtttttaaacttgaaaccaaatttcaacaagcactgccaattatctcaaaagtagaggtcatrggtcccttctcacttattcttactacgctgtaaaatatgataaatgcaaaaaaagtaagcaatgatttaatctttgtggcaatagatagtccaagataatggtgttgaagaactctatctgattggcttgcagtttcagtgtggtatgcaattgttggtatcagatttcttgactttactgtggaatttatttttataagcttttccctttccctccgttataaatttaaaatgacaggtaactttttgtatatacttaaaacgtataaaatttgagtttatcaacttgtataagtacttaagaacttcagcttacgaatgcaag

SEQ ID NO: 884148 - DNA, 591 bp, Homo sapiens
tcaacttggacagacatgattctgaaactgatatgcttctgatgcaagacaaataagtctttccaaaagagaggaatcagttttgttaatttagttataaaaactgtagaaaaatgattttttggtatttgatttagttactaaaaacttgtaagattattggaaaaacatggttatgtgaatttacgttttcaactttaaatttcatgaaatctaaatacagtttattgagaggtgaagaaaatggttaaagggtataaattttcagttataagatgaatgttctgaagatctaatgtacagcatggtgactagctaataattttgtattgttcacttgaaatttgctaagagggtatctcttaagcgatctcaccatatacacatamcacacacacacacacacacacacacacacacattggtagcaagtgtggtgatggatgtgttaattaatttcattgtggtaatcgttttgcagtgtatatgtacaagtcatcacattctacactttgaatatatataatttttgtcagttatatctcaatgaagctggaactaaataaatacagctcaatattttcaatgaaa

SEQ ID NO: 884149 - DNA, 648 bp, Homo sapiens
gtcaaacaaacattcaccacatctcattggtctgtgctgaaatgaccgtttcctatttatagactctgtcagcttatatagggaattcttacactctacagctgcaattgctcaaaaatcagttttcaattaaggtgaccttatcaactatatgtgcagtcctcaaatcaactgctgtcatttattgccttcagacaccagtcttgtttttttttttgtattacgttgcacctctgctccagcatttcttgtgatctgcctcacaagctactaaaaagattggtttgaaagcttgatttattytggcagataggatggcattcagatttagactgatcttcagaatgatcctccatggggaagaacaatgcatgttgtaatagttcccacgtaatactatgaaagatggttctggttacaaggtgaggcaatacggtgtaaggaacagaagcacagactctgaagtcaggctgtctgactacccgactgaggccagactgtctgaggttagagcctggtggctaaatactgcctatgtataattggaaaattcaattaagctgtctttctgagttttctcaatggaaaaatgggaataataatcagttacactatgtggtcatggtgaggtttaaataatgtgatata

SEQ ID NO: 884150 - DNA, 638 bp, Homo sapiens
tgtatccctggaagattagatttctcttaaacgtttccaatttttagtcagtgcctctattctgccctctccttgtagaaaacagcttaccagacggactctcatgccaacacagaggctgaaatccacgttaagagggtaaataggaacttggctgagccaggctcagtcccatgtgctcccagggccctcttagctctccaaaatcacatgtatggggatcctgcgggctgaaagagaagaggtgggatgtctaagcagctatatggccctgcacagacaaagggtcacagacaaggggaaaagaccatgttagaaggtggtcttcagagatggcttgcaagactgtggataaagagatagactatgcaaagcgctcagcacaacacgtcacatcacacatctacagcarataaatactcggcaatgggaactatcacatgacctgggacgtacttatattccaataagaatgtgtgttgggctcagcatttaacccaaaaatagcataccttaattaagcattttatgatccatgtacagacccagtggtctttcttcaccgagtttaggaaacgagaatcagaggagccagaatttgtgtatctgaaagatgggcccacaggagaattcccgtc

SEQ ID NO: 884151 - DNA, 607 bp, Homo sapiens
attggtccatttggaatatttctaaatgctagtgcgatccctgaattatgattcctttcatttccaggtcttttgattctcaagaatctgtacccctgtcttcagatgacactgtttctgcaataaagccaatgtttgtggccctgcccaaactcatatgttgaaatcctaagcctcaaggtgatggtattaggaggaaaggcctttgggaggtgattaggtcataagaatggagctctcatacatgggattagtgcctttataaaagaggcctaagagaaacccttcgccccttccaccatgtgagggcacagccagaaggcaccatttgtgaaccagaggcccctcaccagacactgaatcttctagcaccttaatctccractttggacctccaccctccaaaatggtgagaaataaatgcttgtcatttaagccacccagtctaaggtatttgttatggcagccagaacatactaagaccatttccctgccacagctgcccacagctctctgctaggttttctgctccctgccctgcactcctggactcctcctccagtgtcaatcatgacgcactttgcagggaaggaagttctcaccctca

SEQ ID NO: 884152 - DNA, 584 bp, Homo sapiens
gctgggattacaggcgtgagccaccatgccaggcctgcgactgtgagatttatgtgtgttcacaacattggagaacaatttatgtctctgtcatttctctcttctcattttagatgcttgtatgtgctcttcttaaagaaaagaagtttacccaaagtgttaggtgctaagacgtcttccctaaactccacctgattggccttcaaaccacaagctgactttcatgtctttmagggttagagcctctgttacccagagctgcaacctcagtataaaactcttcatagagtactaggaaggtgaaaagtgactttcctgacaactaggccatggtgttccttactgaacataaataatgctcacagctcaaacaagatgggataagaccacttggcacccaggaaaaatgattaaccatggccttctattgttcaacaagtgacagatgattctttacgaaatgtgcatccagccctgctttaaccttcccacaacctagagaaaattattcagatatcccagcttctagacaatgtccaatccagcatggcccctgttttattaaaccctccctagagtcatct

SEQ ID NO: 884153 - DNA, 584 bp, Homo sapiens
gctgggattacaggcgtgagccaccatgccaggcctgcgactgtgagatttatgtgtgttcacaacattggagaacaatttatgtctctgtcatttctctcttctcattttagatgcttgtatgtgctcttcttaaagaaaagaagtttacccaaagtgttaggtgctaagacgtcttccctaaactccacctgattggccttcaaaccacaagctgactttcatgtctttcrgggttagagcctctgttacccagagctgcaacctcagtataaaactcttcatagagtactaggaaggtgaaaagtgactttcctgacaactaggccatggtgttccttactgaacataaataatgctcacagctcaaacaagatgggataagaccacttggcacccaggaaaaatgattaaccatggccttctattgttcaacaagtgacagatgattctttacgaaatgtgcatccagccctgctttaaccttcccacaacctagagaaaattattcagatatcccagcttctagacaatgtccaatccagcatggcccctgttttattaaaccctccctagagtcatct

SEQ ID NO: 884154 - DNA, 609 bp, Homo sapiens
atgactttcaagtctctctcagggcatatgcttttggagttctgggctaccatataagaaacctggctacctgaagctgccattctagagagatcacgtagatatagagcccccgctgctccagcccacagctgcttgtgtcttcctagcccaggcaccaggcatgaaagtgaagaagtttccaagatgacccaactctgtcctgtgcctgattacacagccaccatcaagctgcaagtgcaggagaagctgcaaccaagagcctgccaatagagcccatttgactttcagaaccatgagaggtaatgataataaacggttgttgttttgtgacactraggtcaaattggtttgatatagagctatttgtaaataatcatattaatgagttacatggtagatggtcagtaaatggtaattttaaagcataaactttaaaccacaaactaccatctcagagtacaggatatatcacatatcaaacaagcaaatgaagtaaatgatgttaggactagctgtcacttgtaataatctcaactgctgtaaataaactagaactgacttagtacgctgcatatttgatttaaaaaataatgtgtgagacaatgt

SEQ ID NO: 884155 - DNA, 636 bp, Homo sapiens
gaaagaaatcagacacttaaatgatattcaagaacaggaaaaactcacctatgatgataaaaatcagaacaatggtttcctctgagggttgaggcaggggccgagtgactggtaggggcatgaggaaacttcgggggtgatagaaatgtcattstcttgagccacatgaagctttcaggtcttgagctaaatgtcaccaccaaactgtacacttaagatttgtccatttcaccgtatgtaaattttgctgctataaagtattgacttgagtctcctgtggcaaggaaggaaggaaggaaggatggaaggaaggaaggaaagaaggatggaaggaagggagaaacagaggaatgaaggcaggaaaggagaaggaaataaaggtgcacgtgttgcagatcccaggctgtcacccattgcacactttccacctgttttttccacaaaataagcacctagtttgtgagaggttgtgccaagcatctagtctgtgccaagtggccagagagaaaaaatatgtaaacaaagggtaagcatacaaagctcagacctgggcagtattagttctatccaagggtgaaggagacaagctctcagaaagatttaaaggggagagaaagggtcatgagggctggaggg

SEQ ID NO: 884156 - DNA, 637 bp, Homo sapiens
gggtgagagagatcaaagctgtggatcccacccagtcttcaaccaaagcaatgtggctttgacctgttttctgtcttggacttgaataatactttatttgaaagaagtgttaaattgtttattaaaaaaaaagacaagtttgaaaaccactgtttccaagtcgcttattttgccaataaagaatctggggtcaaagggtaaaygccttgctgattgtatctgtctcaggaccagggctatgagatttaaagtcaaccagatctggattttcaaacctagctctaccatgttttagcggagacactctggacatgttcactatcctttcatcatcacaggcaagggtctgtccagtgccctaagtcctagggctctccagttgctaaccacactgaagggatgaaatgtatgagtgggccctccactggtgtgatctgtaatcagaatgggaaagactctctttgctccaccatgtccgtgggatgagatggaaaagtgcaccattcctggtggtgatgcttctatttaaaatactgctaaactgagtttccttccttgctcttctctctccctttctttgacaaacctatgcatgactcgagtatacagctatctcccctagtggagcacaggcttt

SEQ ID NO: 884157 - DNA, 590 bp, Homo sapiens
tttttctcaattcttgtccaataggaagctggttattctcatatcattgaattccatattactcccttccactatatattcaatatttattttagcttatttacatgggtcttagtttcccatacaaactaaattattcctaactaaggcattgtaaaagatagcattcaaccttgacctaatgtattcattattggtatatacccataaattggggcttgattaattatgttctgagcagtagaaattctccctgcaagggctgcttatgaataaacccttrattaaagatcatttattctgcatcatattgtttgcaatgtaaaggtcaccaattttttagtcaaactactctaggttataatcccagctgtgcttagttagtaactaagtcaattttagaaagttatataacctcactctgctttatttaaaaaaaaatgttacttctactatggaaaatttcaaaaatgcccagaagtagagagaataatataagaaaaacctagatatacatcacccatccataataattattagcataatctcaatgtaatcatgaaaaaaaaaatcaagcaagtgcaaattga

SEQ ID NO: 884158 - DNA, 590 bp, Homo sapiens
tttttctcaattcttgtccaataggaagctggttattctcatatcattgaattccatattactcccttccactatatattcaatatttattttagcttatttacatgggtcttagtttcccatacaaactaaattattcctaactaaggcattgtaaaagatagcattcaaccttgacctaatgtattcattattggtatatacccataaattggggcttgattaattatgttctgagcagtagaaattctccctgcaagggctgcttatgaataaacccttgattaaagatcatttattctgcatcatattgtttgcaatgtaaaggtcaccaattttttagtcaaactactctaggttataatcccagctgtgcttagttagtaactaagtcaattttagaaagttayataacctcactctgctttatttaaaaaaaaatgttacttctactatggaaaatttcaaaaatgcccagaagtagagagaataatataagaaaaacctagatatacatcacccatccataataattattagcataatctcaatgtaatcatgaaaaaaaaaatcaagcaagtgcaaattga

SEQ ID NO: 884159 - DNA, 607 bp, Homo sapiens
gacagccggggaaaatgtcccttctcggctcactgagtatattgaaccagtctcggtcctctcaagggattttatcagaagcattgagcatagattgaggtaagctgtcacagcgcctgaattcgggagggagctctggcaagaggagacacttgttgattgctcttctgcggaaaagccaggcccaccgacagkccctgccggcaccttgaggagccctgggtgtaggacgcatctgccccgcgaggcgtcattccctgggaggatgttggcaggcggtcctggcggagtggggttggagggttcgtctccgcggcgtcggtgccgtccaaatgagagactgagctaagttgcagagcttgacagtgcagattccatgagactgttccatattggaatacgtagtctctgccctatgcctttctttggtttagaataaattgttcatctgagaaactaatctctggctggggcttaaagaatcagggatgcaataattccaaacgatttaatttatagtggactcaaatatttattgcataaatgaatggctgaatttatttttattaaattaatctggaggatagaaaaggcaattgcccctgcc

SEQ ID NO: 884160 - DNA, 635 bp, Homo sapiens
catgtcctttgcagggacaaggatgaagctggaaaccatcattctcagcagactaacacaagaacataaaaccaaacaccgcatgttctcagtcataagtgggagttgaacaatgagaacacatgggcacagggaggggaacatcacacaactggggcctgtcaggggtgggggcctgggggagggatagcattaggagaaatacctaatrtagatgacaggttgatgggtgcagcaaaccaccatggcacgtgtatacctatgtaacaagcctgcacattctgcacatgtatcccagaacttaaagtataataataaaaaataaataaataaataggtgctcttaagtttaatagaatctaaattattattgttttatgatgaatgctgtttggtttccttttcaaaaagtgttggctaatctaagtccactaagatagacttattttatatttcaagtacaatatatttggaattgatttttatgtttaatatgaggtagggatcaaaatattttttcttatatgaatatccaattgacccagtactatttattgaaaagttcttcatttgctcactgtgttctagtggaatttttgcataaatcagatgactatagatgtgggactgttgct

SEQ ID NO: 884161 - DNA, 611 bp, Homo sapiens
acaactttaagtggcttatactgagttagaaaagtaaatcaacctcgtattcttattttgcctatggctctctaaagaaaaaagacataggatcttttcttcatgtaataaagcaaatatgtcaaatattaaataatgcaactgacctaccatttcatcatattcataccacaccctctgaatcaattaaagtaactgggatgctacttaaatattttaagctgcacattttttaaaaagctgtacatttggggggacataaaatgtactcttctgtttccaaaaacagaaccatcaactttagtcattattctctttttcttattcctggagacaaccttgcacataaatattcacatttcactgacaaacrtatacaagctctgaaaccaaagcatcccacatctaagaaaatcttcagctctgttttgctaggcaagctaagttacaaatatttttattggactggctattaataacatttctgattggtcatctgttgggcatgttcccctgccagcccaaatgatgttgctaggatacagaaccctgagctaagtggttctagctttccatgaaaagggaggaggaactaaaacaaactgaaaaaa

SEQ ID NO: 884162 - DNA, 606 bp, Homo sapiens
tgcaattcataatgagaaaccaggggccatcagtcccctattttctatgtagattttaaagggggacacttaccaagatttttaaacacaaaagctccctcctattcatgtatgttccggaagagagtattttgaaaggctggatatgggggattttaaggactatctctgtgttgatggctacacawcttttttttttttaactttatctctgtcaccatagaacaaaaaagctagccaccgttgatgaccatttctaatattttctggtcattttacctaaaacctttggaaacttaaatacacctcagtttgtgctgcttgttattttaggtgttgtttgtatgcattttcaacggattccatgcaccattcctcttggctggagtctccattttatcaagtttttttcagatgttggaagcaacgtacgcacacgttcagacaaggttaattttgagccttttttgcagaggccaaggacattttatatttgcatctgttgtgtatgacttgtaagtggttttaatcatggagagtcaagaaagggccacccgaatctttgaaaaggtttaagcagaatgtcttcaaagagatagtgaaaaa

SEQ ID NO: 884163 - DNA, 585 bp, Homo sapiens
catgcttgagccctccactggctctctgttacatcaaaacttctcttaggactttaaagccacccagatgttttttcacgccttttacttggtgcattatttcttccatttcttattaaacagtcctcatcattgtacaccagttaygtatcaattcccatcgctatacttttcttactctgcctaaccttaatattacttgggaataagttcaagttttacgtttttcttaaatcaccctctcattactcaggtgctcattgatttctctgactacaagctggagtcaacagcatacagcttggtaattaatcatcactgtatgtttcacagcacagccatctccttgagcaagattaagacttctttgaggctcatcctcagtatatctcatggatgtctcttgcatgcttttgtgtatatgatgttctgtgtctatgctgctttatcaaatttcaatccacctaaatgaggcaagtaaaaggtattttttttaattttaggtttttaattattatgggcacatactaggtgtatatatgtatgtatggggtacatgtgatttttggtataggcattcaatga

SEQ ID NO: 884164 - DNA, 589 bp, Homo sapiens
tgcattgtcatctttgccttggattgagaaccaagtgtaccaagtcctcacactggctttgacgtcaggcacttcgtgatttggaggaagttatttagccttgtaaaatgacagtagtctaacaagaacatctgctaggttctttccaactctaagcttcaatttaagagtataacatctttatggtgttattaaaatcaaggacatggacacaggttatggaagttgaaaaaccacttcagggctgggcgcagtggctcatgcctgtaatcccagcactttgggaggccaaggcrggtagaccacaaggtcaggagtttgagaccagcctgagcaactggtgaaaccctgtctctactaaaaatacaaaaaaaaaattagccgggtgtggtggtgcatgcctgtaatcccagctactcaggaggctgaggcaggagaaccgcttgaacccaggaggcagaggcaagatcgtgctattgcattccagcctgggcaacagagggagactttgtctcaaaaaaaaaaaaaaaaagccacttcgttcaacaaagaactctaaaatcaattgaaggatattcaatataaaaaa

SEQ ID NO: 884165 - DNA, 589 bp, Homo sapiens
tgcattgtcatctttgccttggattgagaaccaagtgtaccaagtcctcacactggctttgacgtcaggcacttcgtgatttggaggaagttatttagccttgtaaaatgacagtagtctaacaagaacatctgctaggttctttccaactctaagcttcaatttaagagtataacatctttatggtgttattaaaatcaaggacatggacacaggttatggaagttgaaaaaccacttcagggctgggcgcagtggctcatgcctgtaatcccagcactttgggaggccaaggcaggtagaccacaaggtcargagtttgagaccagcctgagcaactggtgaaaccctgtctctactaaaaatacaaaaaaaaaattagccgggtgtggtggtgcatgcctgtaatcccagctactcaggaggctgaggcaggagaaccgcttgaacccaggaggcagaggcaagatcgtgctattgcattccagcctgggcaacagagggagactttgtctcaaaaaaaaaaaaaaaaagccacttcgttcaacaaagaactctaaaatcaattgaaggatattcaatataaaaaa

SEQ ID NO: 884166 - DNA, 642 bp, Homo sapiens
cattaatttttttaaatgtccatactaaaaccaatctatggattcagtgcaacccctaccaaaatttaaacagcattttcacacaaataggaaaaacaacactaaaattcattgggaaccatgaaagaccctaaatagccaaagcaatcttgagaaacaagaacaaagatgaaaatatcatgctactgatttcagattatattacaaagctatagtaatcaaaacagtatagtactggcataaaaacagacacatagaccaatggaacagaacgagtctagaaacaaaccctcatatatgtagtaagctaatctttgacaagatcttaatgaatacacaatgggaaaaggatggtctcttcaataaatggttctagaaaaactgagtatccacatgcaaaaaagtaaaattkgatccttatcttacaccatacaccatacacagaaatgaacttgaaattgattaaaaactgaaacataataaaagaccaaaactataaagctcctagaaggaaaaatatttttggcattggtcttggctttattttttggacatgacacctaaagcacaggcaacaaaaccaaaaatagggaaatgggattaggtcaaatgaaaaacacttctgcacagtaaaggcaacaa

SEQ ID NO: 884167 - DNA, 602 bp, Homo sapiens
ctctaaaacttttgaacgtaacctgcagtgctatctgcggttctgctggatttttacacaataaatggtagtattcccactaattatcgacgaactttcaagtgtcaaggaatttataagtcatcttatgcaagcttccccctttcctattgtattgtcaaatttgtctacatcgttttcctcattattttaatttgcattttaattgggctttttacaatttccagaagctttgaaatacattataccttaaaaaaaaaagacaataacactatgaggcagtacaaggatgatttacttactcatacacaagagaggatggggacactcatggtgatccttggtcccagaggtctccctggtacctctcaccaacgtgtgacctcatcttctgtcacattccccaaacatttatggkgttttgagattttaccctcatttattaaggcaaaatgagtgccttagaccaaattacatagcaaccaaagacatatttgcctgggatctacatttcctaaacatgtttttctccaagggatttctgcatattctggagaagttttccaagaactttcatcagtttcaatgacagccttatcact

SEQ ID NO: 884168 - DNA, 666 bp, Homo sapiens
actaatgaggtagaatttttttttatctgcctaaaagcccattagaaaatatattaagaaactaagccttcttctaggtgttgaaatttagaatatttagttcacaagactttctcacctcttttacaaaattcatctcttggaaacatctctcataattggggagatrgtgagcaaagagactagggtgcaggggaaggggctaatgaactcaccacaactttaagtggcttatactgagttagaaaagtaaatcaacctcgtattcttattttgcctatggctctctaaagaaaaaagacataggatcttttcttcatgtaataaagcaaatatgtcaaatattaaataatgcaactgacctaccatttcatcatattcataccacaccctctgaatcaattaaagtaactgggatgctacttaaatattttaagctgcacattttttaaaaagctgtacatttggggggacataaaatgtactcttctgtttccaaaaacagaaccatcaactttagtcattattctctttttcttattcctggagacaaccttgcacataaatattcacatttcactgacaaacatatacaagctctgaaaccaaagcatcccacatctaagaaaatcttcagctctgttttgctaggcaagctaagttaca

SEQ ID NO: 884169 - DNA, 559 bp, Homo sapiens
tgtacagccctcgggccttgagtgaacataggcagtagccaggtagtggttacaatggaccttgggtgagatctggtgctgtgctggcttcaagtctgacctagcccagccccagtggtggtggccacagggatatgtgtgtcagccccttccagttccaggtggctcagcacagagagaaagagacactgtttgtacaggagaaggtaagggaagagaagactttctacctgataatccagagaattcttttggatcttatycaagataatcaaggcagtacccctatgagtctgcaaacaccacagtgttactgggctttggggtgccccctaatgcagatacagcttagatcataacactcaagtctttccaaatatctagaaagcttccccaagaaggacagctacaaataagcccagatagtgaagactacaataaatacctaactcttcaatgcccagacactgataaacatctacaagcattagcatcatccaggaaaacatgacttcaccaaacaaaccaaataagacaacagggagcagtcctggagaaa

SEQ ID NO: 884170 - DNA, 587 bp, Homo sapiens
ataacttggggtgaactcagctgtatgacttgctggaaccagtgggatagcagaaacagagagaacgagagcctggtgaggctgatgcaacgagagaggccacaggccaagcactgtgtgcagaggtgctgacctggagttattttagcctaaggacattatccataactgcccagtgcaggccagaaggaacagagaatctaagccagagtcctggaagtgggagaccctcaatatcacgtacctagagtctaaagccagagtccatgctcagtgatttagacaaaaatcagtctctatttctctggtgtgcagtgtaccaagagytggaagtgtacctggaccccaaacagataagaggttcatctcagtggagaacttgcatgctgggcatggcatctgggacagtcccccagtcctaggaactgcaccatcatgaagatgagcaccactgatctcacaaaccaattcctcctactacaaattctcaccttagtaaacagggcctctccttacttaagagccataaccaaagtgcagggagtcatcaactccatttatatttgatacccaagttcagatgacac

SEQ ID NO: 884171 - DNA, 587 bp, Homo sapiens
ataacttggggtgaactcagctgtatgacttgctggaaccagtgggatagcagaaacagagagaacgagagcctggtgaggctgatgcaacgagagaggccacaggccaagcactgtgtgcagaggtgctgacctggagttattttagcctaaggacattatccataactgcccagtgcaggccagaaggaacagagaatctaagccagagtcctggaagtgggagaccctcaatatcacgtacctagagtctaaagccagagtccatgctcagtgatttagacaaaaatcagtctctatttctctggtgtgcagtgtaccaagagttggaagtgtacctggaccccaaacagataagaggttcatctcagtggagaacttgcatgctgggcatggcatctgggacagtcccccagtcctaggaactgcrccatcatgaagatgagcaccactgatctcacaaaccaattcctcctactacaaattctcaccttagtaaacagggcctctccttacttaagagccataaccaaagtgcagggagtcatcaactccatttatatttgatacccaagttcagatgacac

SEQ ID NO: 884172 - DNA, 653 bp, Homo sapiens
tcaccttgtcctcttcctctagccaggctgacaaaccatcacacctccagtaaaactcacaagcattgctgctgttcatttcttaccttctttttccccattcctatcaatgtctgactcaaatctccaatcttatctgtctcccattcctgcccctacttgtaaagctgaaggttgcttatactggatcccaggctcccttatctatccctagcctagtaggctcttacctggttctccctcttgagatactatttargagggttccttaacccaaactctgtcccctggaatcaaataatctttgtcctgtgatttgtactctagtcaggtctgctcaggtctgagagggggaatttgagggccagttcctgttaactattataactttgtatttagggagggagtatagcttactagttaaaatcatggtctcttaacccatgggtcatcctattaattcaaacctcagcaattccgcttaggtgcaacttcaaccaaagtgacttctcctttccaaatctcagtttccttatctattaagtgggtaccaaatagtctgttcctcctagggttgctataaagattaagtaagatgatgcaattgatcttccactcagccccttgaatttttaaaaagctcaagctgattt

SEQ ID NO: 884173 - DNA, 653 bp, Homo sapiens
tcaccttgtcctcttcctctagccaggctgacaaaccatcacacctccagtaaaactcacaagcattgctgctgttcatttcttaccttctttttccccattcctatcaatgtctgactcaaatctccaatcttatctgtctcccattcctgcccctacttgtaaagctgaaggttgcttatactggatcccaggctcccttatctatccctagcctagtaggctcttacctggttctccctcttgagatactatttaggagggttccttaacccaaactctgtcccctggaatcaaataatctttgtcctgtgatttgtactctagtcaggtctgctcargtctgagagggggaatttgagggccagttcctgttaactattataactttgtatttagggagggagtatagcttactagttaaaatcatggtctcttaacccatgggtcatcctattaattcaaacctcagcaattccgcttaggtgcaacttcaaccaaagtgacttctcctttccaaatctcagtttccttatctattaagtgggtaccaaatagtctgttcctcctagggttgctataaagattaagtaagatgatgcaattgatcttccactcagccccttgaatttttaaaaagctcaagctgattt

SEQ ID NO: 884174 - DNA, 653 bp, Homo sapiens
tcaccttgtcctcttcctctagccaggctgacaaaccatcacacctccagtaaaactcacaagcattgctgctgttcatttcttaccttctttttccccattcctatcaatgtctgactcaaatctccaatcttatctgtctcccattcctgcccctacttgtaaagctgaaggttgcttatactggatcccaggctcccttatctatccctagcctagtaggctcttacctggttctccctcttgagatactatttaggagggttccttaacccaaactctgtcccctggaatcaaataatctttgtcctgtgatttgtactctagtcaggtctgctcaggtctgagagggggaatttgagggccagttcctgttaactattataactttgtatttagggagggagtatagcttactagttaaaatcatggtctcttaacccatgggtcatcctattaattcaaacctcagcaattccgcttargtgcaacttcaaccaaagtgacttctcctttccaaatctcagtttccttatctattaagtgggtaccaaatagtctgttcctcctagggttgctataaagattaagtaagatgatgcaattgatcttccactcagccccttgaatttttaaaaagctcaagctgattt

SEQ ID NO: 884175 - DNA, 639 bp, Homo sapiens
gtgtgaataataaagcagtcctctatcttttttttccattgccctaagacagttttcagctcttttacctgtatttcctggtacttacctccattttccaaaactctgtatttgtactgcactcttttgagatatcttttggtgttttgttctggtagatgatggttcttagctcttttgtgtcctcttcctcattagcatcctcctttaacacattacacttttggtaacatagacctttaatgtttttattatgaccagatagatattgatctttgttgcgccaagtagcatgcattaatattttctttcttgtgtaactcgtttttatttttttcttaagttaactatctctaattggctcagatttctttaaactttttgtcagttccttgtacattctctgagtacaattcatctggttgtcagacctcacatactaggtggatcccttttcccyttgctccaggatggaccactgccatcctgagattcccccacatcctgtgttctcctctttcttgatttatttccttattttagaggcttacctcctaaaagatttctgaaaaaaacaaaacgggacctttttgagactttgcttttaggatcttttctttaccctggtgttctgaaatt

SEQ ID NO: 884176 - DNA, 587 bp, Homo sapiens
ttctctacagcactggctgtttgcgtggccaattccacccgctcaatttaacatagttggagttggtaaagcccctgaagtatatcaaagtagttatattttgcattgtgaaggcccgatggacaacctgggactattcaaccaattataacttctgtacctacaaatttatggggaagagatttattacaacaatggggagcacaagttctaattccagaacaattatatagccctcaaagtcaacatatgatgcatgaaatggggcatgtccctggtatgggactaggaaaaaaattgcaaggtttgaaggaaccgcttcaagcgtaaagacaaagttcccgccaaggtgtaggatatcatttttratggcggccactgttaagcctccagaacctacacctttaaaatgcttaacagataagccaatttggatagaacaatggccgctaagtaaagagaaactggaggctttagaggaattagttactgaacaattagaaaatgggcacatagcgccagcattttccccttggaattctccagttttcataattaagaaaaaatcgggtaaatggagaatgtta

SEQ ID NO: 884177 - DNA, 635 bp, Homo sapiens
ttgtgcatgagctcattaaaatcgtgacagcagaccaatgagtgagaaactgccccattttgaaggtgaggaaattgaggttctgggtataactttctttggtcacataatattaaattttacaatttgagccttgagcmatacacaaaaccaccacaaaattagatttatagactcaaaatgaaaacatcagcttactggtttgtagttcataccagtcatacattccaaaacatgttttgagtcttactctgtgcctgaccttgtgcttgataacagggatataatgggaagcaacactccagtggtcagatgctcacagtcttatggaggagcccaaataatatctggggaagttaaagtccatataatgactgataagagtacaatacaggtgccatgggaacacgtgacatcactgaagactgcctggaaggggccgcgcgtgtgttcatgcctatacgataaacatgatacataatgaaaatgcttatctttaggagaaaggagagcctagagtagcaggatcaaggatgaaagctggacttcaaatatgccttgttagtgtaaatgtgactgtggaactgtatgagtattttaagattatggagtaaagtaagttttaaaaagcagtc

SEQ ID NO: 884178 - DNA, 567 bp, Homo sapiens
cgctttgctcaagtttacttggtgattgcgatacagccttggtttttagggtttcccattacagtcatgtcatttgagtttttatgtggaccgccactccgtgctccttgctgctgtaagacagtaaagtagaaattgaaacatagcctctgctctgtggaagaccattaaaactggacctcatgtacacgtttyttatgccagccggcgagggtagagggttagcgtctgaaacttaaaagttagggttgtttggtctgtgttgttagatgcatagctgggttggtagccgagatgtctaattgtagccgcctgatttctgttatttctaattgtagcagtttaatcattttgttttatttcaaatagaaggtgggattggctgagcaaacttagtttcatagataagtgctttttttttttaacgtttagcttaagttcaggaaaacaaaatactcagaagatggaccttttagtatgtgtgttcttgtatgttatgttcaagttttggtttttattttaattaccagctttatcttgagtagtataattttccgtggtggcacg

SEQ ID NO: 884179 - DNA, 642 bp, Homo sapiens
acacacgacgcaattcctacctgcttgcataagttggcactgctgaccaaagacgtgggagaaggtgacggggcctgtggcagaattggatgtcgccagcgtggattccatggctcttttggggtctttggtgttggtcatgtggcagcgtccagacccttggagtgtcagagcaaaggatgccgtcgctggcccaggaactgcagatctgaggctacttgtcacttccaagaaaatgtccccgcccccaaagtttatagtgtttcttcctttcgccaccctttccttgcagtttttctcaaacaccagtcaagtaaaaaatgaaaccctataagccttggcaaatcttgcacagcagcagttccatgcaaaagaaaaatctaagtttccccctaaccaggagtcgtkgcttcttgacccggaagggtggctggaacttgccccccggcccggggctgcttctcctggggtcacctggaaggggcagggtccccgggagcagctcagccccggctgtgttccagcaccagctgccggcagagcgctgcccaggccccgcggcgtctcagtccagggaggcaggcagggcgcgaggctgccccagggtccccggggagctggccttgctggcgccgccccgct

SEQ ID NO: 884180 - DNA, 590 bp, Homo sapiens
aatgcttagataagcaacagcagtctcctcttgatttattcatttaactcacatacaaatttctaaatctcactgctttatccccagaacttgagttttaaaaagtaataacattttacttattctttagagtaagttctttcttaagtcccccaatttttctccacagagagatcaaaamcagccttgtttaacaaaggtaagaggttttgggaaggctttttgagggagaagttggttcatttctcaagtgggggcctcccaggacagttgggacatgagccctgagtcacctgtggcagagcacagaaggaagaggagctacctaacttgtatgtaagaaggcagctatgttgttgttgttgttgttgttgttatggagtttcactcttgttgcccaggctgcagtgcaatggtgtgacctcggctcactgcaacctccacctcctgagttcaagcagttctcctgccttagccttgtgagtagctgggattacaggcacccaccaccatgcctggctacttttttgtatttttagtagagatggggtttcaccatgttggccaggctggtcttgaactcctgacct

SEQ ID NO: 884181 - DNA, 606 bp, Homo sapiens
ggtttattgagaagggctggtgggtacaacatctgcgagtgggggaaattggacttggcagaagaagttaaactgtgctgcagttttgacgaaggcctcatctggcccttcagagagttctggacctggggatagcctttcagagttgtcctgagttgaggcaaggggcccaggcctttgtaccactgtattgaccagtcactgggttgcaactgaagaaggaaaaaaacattgcrcaaagaactttctttcaccaagggcaattcctaggaaggcaatcagctgtgaaccattggcagctgatgctcccagcagctgggggaaagcatgcctccatcctgaaggcaggacccgagcaatgcactgcagcctctcctagcccagggatacaccactgagcaaaatctaacacagttttctgtttcatggagcttacagtctagtggatagtcacagtgaaaaaaaaaagttgtaaaattatatattggctatgggtgattgggttgctgaaatctgctcctgtagactatccctagggaactcaatgtttcacagctatcaggtatattttgtaaagcttctgtgagaatgtgtaagacaggcagg

SEQ ID NO: 884182 - DNA, 606 bp, Homo sapiens
ggtttattgagaagggctggtgggtacaacatctgcgagtgggggaaattggacttggcagaagaagttaaactgtgctgcagttttgacgaaggcctcatctggcccttcagagagttctggacctggggatagcctttcagagttgtcctgagttgaggcaaggggcccaggcctttgtaccactgtattgaccagtcactgggttgcaactgaagaaggaaaaaaacattgcacaaagaactttctttcaccaagggcaattcctaggaaggcaatcagctgtgaaccattggcagctgatgctcccagcagctgggggaaagcatgcctccatcctgaaggcaggacccgagcaatgcactgcagcctctcctagmccagggatacaccactgagcaaaatctaacacagttttctgtttcatggagcttacagtctagtggatagtcacagtgaaaaaaaaaagttgtaaaattatatattggctatgggtgattgggttgctgaaatctgctcctgtagactatccctagggaactcaatgtttcacagctatcaggtatattttgtaaagcttctgtgagaatgtgtaagacaggcagg

SEQ ID NO: 884183 - DNA, 606 bp, Homo sapiens
ggtttattgagaagggctggtgggtacaacatctgcgagtgggggaaattggacttggcagaagaagttaaactgtgctgcagttttgacgaaggcctcatctggcccttcagagagttctggacctggggatagcctttcagagttgtcctgagttgaggcaaggggcccaggcctttgtaccactgtattgaccagtcactgggttgcaactgaagaaggaaaaaaacattgcacaaagaactttctttcaccaagggcaattcctaggaaggcaatcagctgtgaaccattggcagctgatgctcccagcagctgggggaaagcatgcctccatcctgaaggcaggacccgagcaatgcactgcagcctctcctagcccagggatacaccmctgagcaaaatctaacacagttttctgtttcatggagcttacagtctagtggatagtcacagtgaaaaaaaaaagttgtaaaattatatattggctatgggtgattgggttgctgaaatctgctcctgtagactatccctagggaactcaatgtttcacagctatcaggtatattttgtaaagcttctgtgagaatgtgtaagacaggcagg

SEQ ID NO: 884184 - DNA, 375 bp, Homo sapiens
tgcctgaattcagctgacttatttctgagccattcaatatcgcgggggcactctgagattagaatgggttagataacagaaaattaagaaatataattcaaattctcctcaaggtctaggtgtaaattagactcttggagacagaacctacactattttaggccacttgtgtrggaagttttacatgaattatttgacactgctgattaaacatacttacgcatattctacaggtacaagaaagagccaagtgtgctaagcatagtggtcttccttggctgaaaggataatatggacaaaagcctctctatgtaagttcactgtggcccgaaaaagttaagagtcttcccaaggagcctgatttgcaacaggagt

SEQ ID NO: 884185 - DNA, 636 bp, Homo sapiens
tcacatggaggcttatagtttatgaaatacttgtttgagtactatcacctttgagcctcctaagagtgcttgagaagtgcttattatgccctttgtattgtagttcagtcagagtaataccatggaatcaaagacatgaatcctgcagcaatcaagtttagtgagggagatgaaaaattatatacaacatgcttatayattttttaaaatttatattaaaatacattttaattatacacataatataaaataaactttatattataaaatgtatatatatttatatattttaaatatatgtaaatgtatatatttttattataaagtatatatattttaatgtattttaaatatataaatgtatgctttaaatatgtaaataaaacatatatatctgttttatatatatatatacacacatacatatatatacacacacatatatatctatatatataattaattctgtctagggcctggtagaaaagagaggccaggaaatattttatataagagattacagtagagcacaattatgaatgatattaaaatctagagagcagtgattactcaaggtcagaccactagaaaggactcaaactcatatcttatggctccaagcccaaatttctttct

SEQ ID NO: 884186 - DNA, 636 bp, Homo sapiens
tcacatggaggcttatagtttatgaaatacttgtttgagtactatcacctttgagcctcctaagagtgcttgagaagtgcttattatgccctttgtattgtagttcagtcagagtaataccatggaatcaaagacatgaatcctgcagcaatcaagtttagtgagggagatgaaaaattatatacaacatgcttatacattttttaaaatttatattaaaatacattttaattatacacataatataaaataaactttatattataaaatgtatatatatttatatattttaaatatatgtaaatgtatatatttttattataaagtatatatattttaatgtattttaaatatataaatgtatgctttaaatatgtaaataaaacatatatatctgttttatatatatatatayacacatacatatatatacacacacatatatatctatatatataattaattctgtctagggcctggtagaaaagagaggccaggaaatattttatataagagattacagtagagcacaattatgaatgatattaaaatctagagagcagtgattactcaaggtcagaccactagaaaggactcaaactcatatcttatggctccaagcccaaatttctttct

SEQ ID NO: 884187 - DNA, 642 bp, Homo sapiens
aagaaacactattatttggactatgagagctcaaaggcccttccaatgccagcactcagtgacttcataactatgaagggaaggggcagagtggtattggggagtttctgctgagggagccaaaagttttgccagcctttcctgtccccatgacacctcttttatttcctgtccttcccattgccacgggaatttgcatgggtagtcactatgcctactgtgtttattgctttattgcagcacttagcactgtgtctgacacataatagaaaattaataaatattgctgaatgatctttatgactatctatatatatttgaagtaaaatcccatgaactatttccttctttrtagtctattcagacttaatactttggttaacaaataaacaaattaaacttgtgcataggacaaaaggctagaaggaaattatcaaaatattaataactttctttgggaaatataaatatgtttatttctctctgttctattttggtttaactttctttttctacctttctataactaaaaaagtgtgttaacttttgtaatgaaaaaaatcttcagcaaactttattaaaaaatgtaaaatctttttgggggaactctattttctgaagaaataacaactactgacttcc

SEQ ID NO: 884188 - DNA, 642 bp, Homo sapiens
aagaaacactattatttggactatgagagctcaaaggcccttccaatgccagcactcagtgacttcataactatgaagggaaggggcagagtggtattggggagtttctgctgagggagccaaaagttttgccagcctttcctgtccccatgacacctcttttatttcctgtccttcccattgccacgggaatttgcatgggtagtcactatgcctactgtgtttattgctttattgcagcacttagcactgtgtctgacacataatagaaaattaataaatattgctgaatgatctttatgactatctatatatatttgaagtaaaatcccatgaactatttccttctttatagtctattcagacttaatactttggytaacaaataaacaaattaaacttgtgcataggacaaaaggctagaaggaaattatcaaaatattaataactttctttgggaaatataaatatgtttatttctctctgttctattttggtttaactttctttttctacctttctataactaaaaaagtgtgttaacttttgtaatgaaaaaaatcttcagcaaactttattaaaaaatgtaaaatctttttgggggaactctattttctgaagaaataacaactactgacttcc

SEQ ID NO: 884189 - DNA, 608 bp, Homo sapiens
acaccatttaaatttcaggggcttagcataacagaagtttatttctaacctatctaaagtccagtcaatagtgagtagggtataagctctgtgttccacacaatcattcagagacccaggctcctcccagcatggttctccattactgccttgaatggaaagcagcaaatgatggcccatgggccaaattggcctgttccagctttttttttttccttttttttacagcccatgagccaaaaatggtttttatctgtttaaatggctgtgtttttaaatggttataaaataacacataatatccttgattttgcttcttagtctacaaagcctaaaatatttaccatcttgcccttaagaaaargtttgccaagtcctttcctagggccctacagcagaattgtctgctaggttcttggctttgggctgtcaaatgaaggaaggcaagaagtagaggatcacacgggagatttttgtaggttcattctgtaaatggcatgcattattctcaccacatggctttggccagaaagcagccaaaggcatctttgcctaggaaggcaaggagatgtgatctagtgtatgctcaggagaaaacatagtggatt

SEQ ID NO: 884190 - DNA, 575 bp, Homo sapiens
acactacttatcctattcagaaacactgagagataaaatatataaaggcacttacgtatctgccttcaattccctttgaagactaagaaaatgttaaatacaataaacattgcttcatagaactttgatgcttaaacagaacttaagcaccatttattctaatccctttatcttatgtttgagaaacctgagccttgctccaatgactcacagctaatcgatggctgtgacgagagtagaagagaaaaggtttaactgctttttcaattccctttagttgttaaycagaaatgggcctaaacatggctcccttcaagtaaataacaaaaagaaaaaagaaaaaatttaagttaatgaaaaattttttaaagttaagattttctcagtatagttgatttattatttaatgcatattcaagtacactacagaaagctatatgatatggtttggctctgtgtccccactcacatctcatattgaattgtaatccccaggtgtcaagggaggaacctggtggggggtgattggattgtggaggtggtttcccccatgctggtcttgtaatactgaggga

SEQ ID NO: 884191 - DNA, 659 bp, Homo sapiens
catcaaatctttctttagtctgtaatggttttgtgcctggtacatctaccagaggtcaaacttctaaatacaatgtatcccctttcaatagcatggagggcctagagaaacaattttatttccttcttggctgtagtaaaaattgctgttctctgtaggtgggttgcatagccaatcaatctcctataataacttggggagtagaactaaaaattaaactttttaaagagaatggttttctcctgtcctatatcatgcctctacccttaccagaaatgggtgatgatagcattggcaattcaaatactatatctagttgcagaaygatttatgtaggtcgccataggcaagcagcaactaaacccaattctttatagtactgatagaattttttctgtcttattgttgttatataggcataccttggtgataattgtaagtttggtttcagaccacctcagtaaaatgagtggtgagagaaatttttcgacaaaatttaatactcttttcttataaaattctcagcactgtagtaggagaaaaaacctcctaaacctagtaactggcatctataataaccctacaatgaattcaataacagtaaaacactgaatgctttaactctaggatgagccacaaggcatggatgactgccatca

SEQ ID NO: 884192 - DNA, 659 bp, Homo sapiens
catcaaatctttctttagtctgtaatggttttgtgcctggtacatctaccagaggtcaaacttctaaatacaatgtatcccctttcaatagcatggagggcctagagaaacaattttatttccttcttggctgtagtaaaaattgctgttctctgtaggtgggttgcatagccaatcaatctcctataataacttggggagtagaactaaaaattaaactttttaaagagaatggttttctcctgtcctatatcatgcctctacccttaccagaaatgggtgatgatagcattggcaattcaaatactatatctagttgcagaatgatttatgtaggtcgccataggcaagcarcaactaaacccaattctttatagtactgatagaattttttctgtcttattgttgttatataggcataccttggtgataattgtaagtttggtttcagaccacctcagtaaaatgagtggtgagagaaatttttcgacaaaatttaatactcttttcttataaaattctcagcactgtagtaggagaaaaaacctcctaaacctagtaactggcatctataataaccctacaatgaattcaataacagtaaaacactgaatgctttaactctaggatgagccacaaggcatggatgactgccatca

SEQ ID NO: 884193 - DNA, 470 bp, Homo sapiens
caattatgttaagcgcactgtctaacttgctaacatcccccttgcttcccactgcactaaaaggaactagttatctgactgtgcgatgaaccaggagacctggtgtgtcccagcccaaaggctgaggaaaaatggcccacaaaccattccttacaatggaatagagtagaaagggtcagaagatactgtcataaggccctactcagccacctactggttctattacttttgggggggttatatgtttatattcatgcrgatttatatgacccttataataattattataaaacaagctcaatacgttattgtctagctttttctcctccttcacataactgcttggtccactcctgacctaaacaaacaaatctaaaaagagcttacaacatccccctcaatgggtacgagtgtgaatattttgtataggaacgagattcatggttaacgttaacccacatgaaagctct

SEQ ID NO: 884194 - DNA, 703 bp, Homo sapiens
gccagtgacactccaggcgcatcctcaactccctccatggtggttagctacaccccgagggtcctctaagagtcccaggacaaagtccttcagatctacagcctgacactttgatgattcagattggctgttgaaagatgttttctgaatggctggctgactgaatcacaacaggagaatgtgcctgaattcacaagtccaataatagcctggaaatagaagccatctgaaaatgttctaaactctagctgggttggcaaggattggatgcgattataaaaagcaagtgagaagagaatgttaccgcaaggaaaattgaatccatgagttttaaataacttcattccaataaaaaaaattaaagtatattttgggccaatgattaaatgctacgacaaattcaactgctgtacactgaaattgtttttaagttaaaaaattaaaatacccataactgtctcctaaggcctaaatgcccttttgttaacttacctgtgcmacaaattccaggttttttaaagtgagtcctattttaaatgtacatttagatttaatgctaagactcagtagatgtaggattccagattgtatcataggctcctgtttaaacatgaataaggaaatattcttagcttaaatatgttctgaatcagaacacaaacctgggctttaaaattcacctgtagctttctgtggttgctga

SEQ ID NO: 884195 - DNA, 601 bp, Homo sapiens
ctggcttgctctgtaggaccccagtcctatggagtggggattattgccccgcattttttttttttttttgagatggagttttgctcttgtcacccaggctggagtgcactggcacagtcttggctcactgcaacctccgcctccctggttcaagcaattctcctgcctcagccttccgagtaggtgggattacaggtacctgccaccacacccagctaatttttgtagttttagtagagacagggtttcaccatgttggtcaggctggtcttgaactcctgaccttaggtgatccacctgcctcagcctcccaaagtgttggaattacaggtgtgagccaccaygcccggcctgttgcccctcatttaacagcactggaagctgaggctcagagacaggggatggcttcccaaggtcacacagcaggtgagtggttgagtctgtaactcatgcatgtgaaatgcttaatacagtacaaacccaggcctgtctgtctttaaaacacacattcttcttctccatggttctctttccctgcctttatcttctccattaaggctctaagaaatgagtggcgggtttagagaggcttggggaaccc

SEQ ID NO: 884196 - DNA, 522 bp, Homo sapiens
ggacaggggtacagtttcttttggtgcatagttctcatgttgattggttccgactgtcatgttcttgcacctgtcctgagtatctcttgctgtagctctggccctttccccagtcagctactgcactgccctggcccatgtttcttagagacatggttatctctgtgctattagtgtctgtgtcctggccgaggcaagtcccttccctttctgagtctatattyttataaaatgtggctttgagaatagatgatgtttctggtcttaaaattctctttgactctggagttctggatctgtgcttctgtttgatgttgtttctcttgctgggtgaccttctctctgactccctgctgtaaagacctcctttttttttttttttttttttttttttaatcaaaacctaacttggtccgacctaccccatggctgaccacccaggcacttgcttttgacttaagggtagcaccatacgatgtcttctttttgtttttcattttaacaacctgtatttttcacatc

SEQ ID NO: 884197 - DNA, 524 bp, Homo sapiens
ggacaggggtacagtttcttttggtgcatagttctcatgttgattggttccgactgtcatgttcttgcacctgtcctgagtatctcttgctgtagctctggccctttccccagtcagctactgcactgccctggcccatgtttcttagagacatggttatctctgtgctattagtgtctgtgtcctggccgaggcaagtcccttccctttctgagtctatattcttataaaatgtggctttgagaatagatgatgtttctggtcttaaaattctctttgactctggagttytggatctgtgcttctgtttgatgttgtttctcttgctgggtgaccttctctctgactccctgctgtaaagacctcctttttttttttttttttttttttttttaatcaaaacctaacttggtccgacctaccccatggctgaccacccaggcacttgcttttgacttaagggtagcaccatacgatgtcttctttttgtttttcattttaacaacctgtatttttcacatcac

SEQ ID NO: 884198 - DNA, 522 bp, Homo sapiens
ggacaggggtacagtttcttttggtgcatagttctcatgttgattggttccgactgtcatgttcttgcacctgtcctgagtatctcttgctgtagctctggccctttccccagtcagctactgcactgccctggcccatgtttcttagagacatggttatctctgtgctattagtgtctgtgtcctggccgaggcaagtcccttccctttctgagtctatattcttataaaatgtggctttgagaatagatgatgtttctggtcttaaaattctctttgactctggagttctggatctgtgcttctgtttgatgttgtttctcttgctgggtgaccttctctytgactccctgctgtaaagacctcctttttttttttttttttttttttttttaatcaaaacctaacttggtccgacctaccccatggctgaccacccaggcacttgcttttgacttaagggtagcaccatacgatgtcttctttttgtttttcattttaacaacctgtatttttcacatc

SEQ ID NO: 884199 - DNA, 532 bp, Homo sapiens
gggtggagagaaaaggcaactttcaaaaaggagtatgttattaaatgaggcatttactatactccttcctaagagcaccagatggggaacatgttttctaaactagatctaggaagtggaatgtggaatcaatccgtcctcctccccttaagggctaaccactggttaatgaattaaaaaaacaagactaaaaaacaaaccccacacacactcccccccaaaaaaaagaggagggaaaaaaacaaaacaaaacactaagatgtcccagattactctccagagtggaaccagggagcagcttcaacaattccaattagtctgttacagagtcatccayaagcatgccttgcttttaaacaacaaaaaaaaaaaaaaaaaaaacacacacacacaaaaattttttttttgaaacaacaaaaaaaaatagtactaatcacttttctgacaatacaattactcaaaattaactagtactgggagggggaaggggggggccatacctatgggccttgtctcacacgagtgcatgtgg

SEQ ID NO: 884200 - DNA, 532 bp, Homo sapiens
gggtggagagaaaaggcaactttcaaaaaggagtatgttattaaatgaggcatttactatactccttcctaagagcaccagatggggaacatgttttctaaactagatctaggaagtggaatgtggaatcaatccgtcctcctccccttaagggctaaccactggttaatgaattaaaaaaacaagactaaaaaacaaaccccacacacactcccccccaaaaaaaagaggagggaaaaaaacaaaacaaaacactaagatgtcccagattactctccagagtggaaccagggagcagcttcaacaattccaattagtctgttacagagtcatccacaagcatgccttgcttttaaacaamaaaaaaaaaaaaaaaaaaaacacacacacacaaaaattttttttttgaaacaacaaaaaaaaatagtactaatcacttttctgacaatacaattactcaaaattaactagtactgggagggggaaggggggggccatacctatgggccttgtctcacacgagtgcatgtgg

SEQ ID NO: 884201 - DNA, 680 bp, Homo sapiens
tttcttcatagataaaagtatttttaatgataatcaaacctgggcaacatcccaaaacaaactttcacatgtactctgaatgagccagtgttataaaatataaagaatttttggccaggtgcagtggctcacgcttgttaatcccagcactttgggaggccgaggygggtggatcacgaggtcaggacattaagaccatcctggctaacacggagagaccccatctctactaaaaatacaaaaaattagcttggcatgttggtgagcccctgtagtcccagctactcaggaagctgaggtaggagaatggtgtgaacctggccctgggcgacagtgcgagattccgtctcaaaaacaaaaaaaaagctaacaaagtgagcacatgctattggaaaaatactcaaagcagagttgctacaaacctttaatttggaaaaatttcaatatctgtgaagcataataaagtgaagtgcaaggtatgcctgtactcactaacatcccaaatgatgctacaaatcttagcaaaagaggtactttgccaatgcctcttaccaaattactaaaaaggtttcctgagtacattaccatgcaaaccaagaaagacgtaaaatatttatattaatttcaaggcaagttcccactatattaaaaatacttagagatagtattatgaatatact

SEQ ID NO: 884202 - DNA, 680 bp, Homo sapiens
tttcttcatagataaaagtatttttaatgataatcaaacctgggcaacatcccaaaacaaactttcacatgtactctgaatgagccagtgttataaaatataaagaatttttggccaggtgcagtggctcacgcttgttaatcccagcactttgggaggccgaggcgggtggatcacgaggtcaggacattaagaccatcctggctaacacggagagaycccatctctactaaaaatacaaaaaattagcttggcatgttggtgagcccctgtagtcccagctactcaggaagctgaggtaggagaatggtgtgaacctggccctgggcgacagtgcgagattccgtctcaaaaacaaaaaaaaagctaacaaagtgagcacatgctattggaaaaatactcaaagcagagttgctacaaacctttaatttggaaaaatttcaatatctgtgaagcataataaagtgaagtgcaaggtatgcctgtactcactaacatcccaaatgatgctacaaatcttagcaaaagaggtactttgccaatgcctcttaccaaattactaaaaaggtttcctgagtacattaccatgcaaaccaagaaagacgtaaaatatttatattaatttcaaggcaagttcccactatattaaaaatacttagagatagtattatgaatatact

SEQ ID NO: 884203 - DNA, 680 bp, Homo sapiens
tttcttcatagataaaagtatttttaatgataatcaaacctgggcaacatcccaaaacaaactttcacatgtactctgaatgagccagtgttataaaatataaagaatttttggccaggtgcagtggctcacgcttgttaatcccagcactttgggaggccgaggcgggtggatcacgaggtcaggacattaagaccatcctggctaacacggagagaccccatctctactaaaaatacaaaaaattagcttggcatgttggtgagcccctgtagtcccagctactcaggaagctgaggtaggagaatggtgtgaacctggccctgggcgacagtgcgagattccgtctcaaaaacaaaaaaaaagctaacaaagtgagcacatgctattggaaaaatactcaaagcagagttgctacaaacctttaatttggaaaaatttcaatatctgtgaagcataataaagtgaagtgcaagrtatgcctgtactcactaacatcccaaatgatgctacaaatcttagcaaaagaggtactttgccaatgcctcttaccaaattactaaaaaggtttcctgagtacattaccatgcaaaccaagaaagacgtaaaatatttatattaatttcaaggcaagttcccactatattaaaaatacttagagatagtattatgaatatact

SEQ ID NO: 884204 - DNA, 579 bp, Homo sapiens
gatgatatagaacaagcataaagacgaggagcaggctagaattctagttagcatgaaagcattaaggagaagttcaagtgtaatcaaagtgactaagacaaggaaacaaacacacatattaaaaatctaggaaaggatcctaagaaaggttrtgaaaacaagactagttttatataatacttgggaataagaaaaaacagaatattaatatctaataatgttggaggttttgatttagagatcataatagaaatatcagggttggttataggaacagttagatggggacaaaggagagactttagggcactgtgccagaaagagttattctaaaaggaaattaaaagttccaaattctcccctgcaccaaaaaaatttaaaaaggctgtccaggcttcacattttcaagcaaaacctcaaattcctgactgactcacatgagcaccaagacctttcatccttcccatgagtaaatgtatataatggggtgaccatccgctagtggggctcagagcttcaacacaaagaatgaagaaggaagagaaaagagaacaatcatggccagagtagcagaattta

SEQ ID NO: 884205 - DNA, 579 bp, Homo sapiens
gatgatatagaacaagcataaagacgaggagcaggctagaattctagttagcatgaaagcattaaggagaagttcaagtgtaatcaaagtgactaagacaaggaaacaaacacacatattaaaaatctaggaaaggatcctaagaaaggttatgaaaacaagactagttttatataatacttgggaataagaaaaaacagaatattaatatctaataatgttggaggttttgatttagagatcataatagaaatatcagggttggttataggaacagttagatggggacaaaggagagactttagggcactgtgccagaaagagttattytaaaaggaaattaaaagttccaaattctcccctgcaccaaaaaaatttaaaaaggctgtccaggcttcacattttcaagcaaaacctcaaattcctgactgactcacatgagcaccaagacctttcatccttcccatgagtaaatgtatataatggggtgaccatccgctagtggggctcagagcttcaacacaaagaatgaagaaggaagagaaaagagaacaatcatggccagagtagcagaattta

SEQ ID NO: 884206 - DNA, 524 bp, Homo sapiens
tgctctgtcagctttctaatttaatattatttcttcagtgtttgagttttcatgtagttcttcaagtttcatatgttaatagtacttttgctctgatggtcttattgctttattagctactacatctctgcgataacacacttcaacctcaactatggttacaaaatcaatatatgggggatcacacttgtatgtcaaatcaatacaaactcttkggatcttcaattttttaaataacttctgttttcaacatttgcttttctacaactgccacattcataagagatgtgtcttttcttgacaaaaaaaatccagtgacacttatagtacaaactgaacatgagaattaaaaataaacaagacaaatattttctatcctattatacttgatactattcagctaaactgaaaaccaggcttgatttaaatttaagctgagtataaaaatgataagttataaaaatatatgcttatattttctcaaatttttgcatgcttttagtttccagatgattagccaactt

SEQ ID NO: 884207 - DNA, 656 bp, Homo sapiens
gatattgggaaacaaacacttttctataattattgttataacagtagcatatttttcctaatattttactataaaaactttcaacatatgaaaaagtggacagaattttatagtgaacacattcatattcatcactttgattctgccgttaatattttacwtttatacttatcatatgtctatccatacctctgtccatcaaatttacaaatcaatttgtgaaaatttttgaaatttttacaatgttgattcctgcaatctaggactggaagaaaatacaaaacacaaacaatttttttttccttttgtgatggaactccatgagttataaatcctaccatgtgggaggctgaggcaggcaaatcatctgaggtcaggagttcgagaccagcctggccaacatggtgaaaccccgtgtctactaaatatacaaaaattagccaggcatggtggtgggtgcctgtaatctcagctacttgggaggctgaggcaggagaatcgcttgaatctgggaggcggaggttgcagtgagccaagatcgtgccactgcattccagtctgggtgacagagcaagactctgtctcaaaaaaaaaaaaaatcctatcttgggtgatcagaatattttcttaagtatattcctggaaacagagctgaa

SEQ ID NO: 884208 - DNA, 656 bp, Homo sapiens
gatattgggaaacaaacacttttctataattattgttataacagtagcatatttttcctaatattttactataaaaactttcaacatatgaaaaagtggacagaattttatagtgaacacattcatattcatcactttgattctgccgttaatattttacatttatacttatcatatgtctatccatacctctgtccatcaaatttacaaatcaatttgtgaaaatttttgaaatttttacaatgttgattcctgcaatctaggactggaagaaaatacaaaacacaaacaatttttttttccttttgtgatggaactccatgagttataaatcctaccatgtgggaggctgaggcargcaaatcatctgaggtcaggagttcgagaccagcctggccaacatggtgaaaccccgtgtctactaaatatacaaaaattagccaggcatggtggtgggtgcctgtaatctcagctacttgggaggctgaggcaggagaatcgcttgaatctgggaggcggaggttgcagtgagccaagatcgtgccactgcattccagtctgggtgacagagcaagactctgtctcaaaaaaaaaaaaaatcctatcttgggtgatcagaatattttcttaagtatattcctggaaacagagctgaa

SEQ ID NO: 884209 - DNA, 656 bp, Homo sapiens
gatattgggaaacaaacacttttctataattattgttataacagtagcatatttttcctaatattttactataaaaactttcaacatatgaaaaagtggacagaattttatagtgaacacattcatattcatcactttgattctgccgttaatattttacatttatacttatcatatgtctatccatacctctgtccatcaaatttacaaatcaatttgtgaaaatttttgaaatttttacaatgttgattcctgcaatctaggactggaagaaaatacaaaacacaaacaatttttttttccttttgtgatggaactccatgagttataaatcctaccatgtgggaggctgaggcaggcaaatcatctgaggtcaggagttcgagaccagcctggccaacatggtgaaaccccgtgtctactaaawatacaaaaattagccaggcatggtggtgggtgcctgtaatctcagctacttgggaggctgaggcaggagaatcgcttgaatctgggaggcggaggttgcagtgagccaagatcgtgccactgcattccagtctgggtgacagagcaagactctgtctcaaaaaaaaaaaaaatcctatcttgggtgatcagaatattttcttaagtatattcctggaaacagagctgaa

SEQ ID NO: 884210 - DNA, 562 bp, Homo sapiens
ttttttgcatttagccacaggatggtgacagcaatttcagtgcatggtggaagtggttggccaggtgctaggattaacatgtctagtaactcttcagagggcctaacctgcatcttgaagtttttctaggggagctgaagcaagctgtttttcaccgtaacccactctaaactggacaattaaggaaaaattgttcagtagatgtccagtgagctacccacccttatgggcatgctttaagacagtggtccccaacctttytggcaccagggatcagtttcgtggaagacaatttttccacggatggcaggagggatagttttgggatgaaactgttccacctcagatcatcaggctttagattctcataaggaacaagcaactagatccctcccacgtgcagttcacaatagggtttctactcctatgagaatctaataccacgggtaatctgacaggaggtggagctccggcagtaatgctcgtccacagctcacctcctgctgtggggccgtttcctaacaggccatggttcagtaccggtctgctgcccgggggttgg

SEQ ID NO: 884211 - DNA, 602 bp, Homo sapiens
ggaaataaaccaagaccgaaaatttctggctagctccctttcccttaaaggggaacctaacaatatttactcaacaaataactaccaactacctaatatttgctaatgtggctttggaaactcagccatgacctgtatccttcctagagcagcaaatttcatatacaacatctcaaaactacttgtatggtcctgagactcaataatgtataactgttctattaatacacttcccaagtccgaaaatgtcccctaaaatgcttcctatatcagattttgtcactttaaatctgatactacttaatgctgtgcttcctaggctcggacagagcacacttctcaatagcattcctctctcggtttacttgctcctcacatcacatcccaggyccgttgactctggactccagggctccaccaaaacctcagtgtttgaatgcttgcactctccagcaaaatccctgatccgattctaccgttcagctatgcccctagccctgatgcctttcttcctacaccatacactcacaccgtggacttcagggccacttccaaactgggtcacattagcaaccctggatctcgaagactctcagcctgtc

SEQ ID NO: 884212 - DNA, 443 bp, Homo sapiens
ggctgtttcttatgattctcttctctttgtttcattctcactacattcacacctaatcagtaaattagaaaagtgaaacctggctatccttgaaaattttagaccaaagaattcaaaagaaaaaagaaaaaagaaaagaaaaagagacaaacggaaaacaggagataactctccaaaaatcagaatgtctaaacctaaagccagcagcctatgttccattctttcagaactttacattggccaccttaggttagaatagttagactaagggtccatcctgccccctccccagatyggaagcctctaggaaacagaaaccaatgaatgattataactatcatttgtgcagagatttataatttacaaggccctttttgatgctaacactttgatgaatggttatcatgatttacagtggagaagactgagagtcaaagagatga

SEQ ID NO: 884213 - DNA, 614 bp, Homo sapiens
cttgaaggcatctggcacaaaactctctgcacaagattctttccctagtatagctggagctaaaaatatacttattaatacatatttgattacattttaaattcttaattaaatacttaatatttgattacatatttattaataaatggattttgttccttcttcttcagtgaagtaccctacatcaccttattakcatttcataagtgctcaaaatctcaccacttgtttctagtttccattcatgccacacgttagacatgagttctcctctaagctagttaaggcttagggtatgatgaaatgggacagaagagttagtctggagaagggaacttaggtagcaagactcggtggtgaagtgaagttgagatttcagcagtatctgttttccaggctcttcagggggcctccagatctccttcctcattggcctcctggccagcagctgatctcactgttacactcttatcagagtttctaggaatctcctggctagtgaacgctttgttcaaccactgggctctgacacccgactctgccttgacctcaggcttttttgtactccctaaatccagttgcctgtgccatgccagccccagtccttccatgta

SEQ ID NO: 884214 - DNA, 614 bp, Homo sapiens
cttgaaggcatctggcacaaaactctctgcacaagattctttccctagtatagctggagctaaaaatatacttattaatacatatttgattacattttaaattcttaattaaatacttaatatttgattacatatttattaataaatggattttgttccttcttcttcagtgaagtaccctacatcaccttattagcatttcataagtgctcaaaatctcaccacttgtttctagtttccattcatgccacacrttagacatgagttctcctctaagctagttaaggcttagggtatgatgaaatgggacagaagagttagtctggagaagggaacttaggtagcaagactcggtggtgaagtgaagttgagatttcagcagtatctgttttccaggctcttcagggggcctccagatctccttcctcattggcctcctggccagcagctgatctcactgttacactcttatcagagtttctaggaatctcctggctagtgaacgctttgttcaaccactgggctctgacacccgactctgccttgacctcaggcttttttgtactccctaaatccagttgcctgtgccatgccagccccagtccttccatgta

SEQ ID NO: 884215 - DNA, 640 bp, Homo sapiens
attttcactagaacttcattagctagggtactatctccctcatccccagtttaccaataagtaaactgaggcacggggtgaagtaacctgttgaagatcaagcagttagatgggaggcaggcatttgaatttgggatgytgattccaggttctctgcaatgagttggtcaaccatgctgcctcccaggtgttagtgacctaacagtggacaaaaacagactgggatcctgctctcatggagctcactgtctagtgaggtagaaaggcattgaacatatcattataataataaatatgatgaatgttctgaagaataaaacatggtactgtgaggataccttattatggctcctggccctttctgccctgaggaaggaacacttgatctgagatttgcagaataagaggtgttcatcagttgacagggtaagagaattctaggtaatgggaccaatgtgtgcaaaggcctcatggtagaatgaaaacggttttggaagaactgaggaaggcagtgaggctggaatgcagaaattggctaagggagggggccgaagtgctggagaagtgggctggggccactccatttaggtcctaatttacctgtttaatatttttgtcacaagaggaatggcaatacatg

SEQ ID NO: 884216 - DNA, 602 bp, Homo sapiens
aagtgaatcccccagggcagcaactatgatatttagcaccttctacatggcataggctttcatctagctagaaactggattattcattagactttttcctataaatgtatggatttcaatgatagtctgtgccttctctgaaatgtaaaacctgatcatcagcaaaggcatactttgtgagcttctatttctattgcaaagtgccaatctccactgggtcctatttcaaccattatttaacatttattgagcaccaatratgcaccaagatcaccctctgtctctaatcttgtcattaatgatccatcaggctcctgtgggtgatgggaaggaggagaaaacaagtaattattagtgcgatattcaatctgaatcagttaaattgcccaaattattgaagtttagttacttaaataaaaggttgatcaaacttctgcaatgaaaacctaaagcatctatcttactgtctttaaaaagcttagaggagtaatggagagataggaggaggaaaacaaaacagtctgttctgtcagcttaaaaggaagtcagaggtgcttgcaataggaaatggccagacattcctcaagagaatatggaataca

SEQ ID NO: 884217 - DNA, 576 bp, Homo sapiens
ctttaaaaacctagaaattggctctggtagtgagtcccaggatggagctaacttacgatctggactccattacatgattgctaatcctgaagttcagcaaacgttggtactggctgacttttaatggagtacctgtttgagggttctcctcatcatgtatttaaggttaaattgtataaaggaattctgctgctcttttgaaattttctggttctgtttaaccrtacctaaaaatgccatgaggtagccagatgattgactaactgggatttatggaaattcttatctgcaaaaatctcaagacaaagagggcactaactagaaggttcccagtgctttatgtaacatgcagaaggaagtctggtctcagcttcttggatctgagcaatcctttggaaagggagcaatgaagagcagtaactgaagactcatttcctgccttctgtgtgactcactctcctttgtcaacttcaagtttgccctaggcctgcttgcttctctccaccccaaggaacttggtctttggaagacacaggcacctgccctctctgtctgccttttgcccccaggtccaga

SEQ ID NO: 884218 - DNA, 615 bp, Homo sapiens
ttacagattggagttgcaagcctatggctctcccagactggaatcactggccggtggctctactggtctggagtctcagggtcagccccacccccaaggttctgctgggctttgccctagtggcgattctcacaggcattgttctgcagcggtctctgctttgaccctgagcctttctagggcatcccttgaaatctaggaggaggtagccatgctgccacagcttgtgcactctgtgtggcagcagagacggcactatgtggacacttacaaggtttaccacctgagccctttgtagagagggaccaaggcacacctaaggcttccaaggagtactgcaccagaaggcagggagcagagtcctgaaatcattctgcccctagggccctagcattctgggcctgagataggtagtgcagccccagasatctccaaaatgtcttcagggtcattttttccacagtcttgatgaacagcacctggcttcttctgagccatactaatctcctatcaaatgacagccttcgccacacactccatgttctctcctgaacatggcttttcattctttacaatatggtaaggataagaattttccaaatctttaagttcagc

SEQ ID NO: 884219 - DNA, 547 bp, Homo sapiens
attttttattacaacctaagccagtgatagaattattttcttcatactgtcattgtttcatcatttgtaatgcatactttcccatcttgtagtcattgagccagttttctatatagtattctaaaagtgttgcaattttgattttcacatccagttcttttatccacctggatttagttttgatctgctgtgatgcacaatctaattttatttttttacacgaataaccaattttccggtatcatttatactttccccctcatatttgaattgccatctatttcatattttcagttttcacacataratataccagtttctaggatgtctgttctacttgtccgtttgtaatcatttcaacaagaccactctgtcttaattgccatttttggataaatgttgatatataataggacaagtccccatactttgttcttcaaaatagtattattggtctttgcagataaatggcagaaaatgacattgtggatattgatttgtaattttcctttgtttaaacgtatcagtttcatagtctttacatatt

SEQ ID NO: 884220 - DNA, 526 bp, Homo sapiens
tctttgcactcaagagattccacaaaatgtaatgcaataatggaaaggtttaccttctttagcttcaaagttggagggttttggtcattttaattttatatcaaactagtgcttttcagccacagtatcttcactctgagataagaagttttcttcacaatgtatttttaatatcctcatgttcagttttaagacaaarcaactttaatactaggtgcacaccacatgaccttcctgcaaactgcttttcttgacaagttatgaagtagttcaaggaggtatggttaaggctgtattactgaatggtgctggtaaatactacacaatttttttttgtcatgttgcaaccttttgtttccaatttagtgactgctactatgaaatcagataactacaatgacaacattattaggttttgaactatgatttagtagcaacttaggttcccagttttaaccccttggcagcaagatccaagttccctcatttgcacattagcacctaagtgtcaagggattaaataacc

SEQ ID NO: 884221 - DNA, 724 bp, Homo sapiens
aaaaatataaaaactgttttttgttgctcggggattcacttgaaattcatatttactttgagccaacattttctctgagttctaacatcttttccatgttaatatcaactaccatccagttcttagtatttttattaattaaaggccatagtttatttaggtttccttagtttttacttaatatccattttcagtttcccaatctcatccatgaagccacattatatttagttaaaatatctctttagattctccttagtcgtaatattttatttttaaaaatatgttattgagaaagaaatcacataacagaattaaccattttaaagtgtycaattgaaaaaaagggcaagatgaccaactagatgcagctaggaagtgccactctcactgacagagactgggatttggactaaaccactgtaatttgagaagatctttagagataaaatgccaaatgcaaatggagaaaagaggcatatgttgaggctgaagagggagaaattgaggaaccctatgtggggggcttgaatgctagggctgattcctggacctgaatgatcctggggaagggaacatagctggaaatattaggaaacacaaaagagccacgtggttgagtaagagcctatttagcaacaattgctcttaagtgctgtctacaggtaacacaggccaaactaacaacagcaaaaaacacttcgctacatcaccccccatgaga

SEQ ID NO: 884222 - DNA, 615 bp, Homo sapiens
gatgtttgctatgaaaagagcccttatctatgttctggttttagcaggatttctctgggttaggattgcatggtaaataaatttgtggtctatggatccatgagtcatggctctgtagagaaccagacagctatttgaagtattaaatggagatgtttcataacctacatccctgtccctatgtgaactaaaccaygtaccttacccagagactaagagggaagggaagacctggagacccacacacgatgtcttaacctcttcctgcttttcttgtgcctcttggtggctgtatccctctaatgattggaaaagctgggtcctaggtgagatttctggtttgtgtctgacttaacatctgatcacttttgtgagcccagctgcctaatcccagagcctagaaaacttcttggcttaaagagcatttggtgaatatttgttgtgtgagtgagcatgatcacacatttgtgcaagggttggcagagccatggttttcttttgtagtttttttgtttcatttataagcaatccgtgtcagaataagaccagtttcattagttctgcactttaagtgggagattcagacatctagaaataaacttaggattattacag

SEQ ID NO: 884223 - DNA, 626 bp, Homo sapiens
cttttaaaaatatttaattgaaaagtaaagattttatagatcaaggtgtacaacataatttgttatatgtatacacactgtgtattatcacaatcaaattatcacacccatcaccacccatgctctatataagatcctaagaacttgttcatcttataattgaaagtttgtatccttgctcagtatctcccaatttccctcacccctcagaccttggcaaccaccatacaactgtttctatgagtttaacttttttagacttcacataaaaagtgagatcatacagtatttgtctttctatgtttggcttatttcacttagcataatgtttwccaggttcactcatgttttgcaaatggcaggattcccttcttttatggctgattaatattccattgtgtatatttctttatccactttctgtcaatggacacttaggttgttatcttggctactgtgaataatgctgcaatgaacatgggggcacagatatctcttcaatatactattttcttcctttggatatatacccagaagtgagattgctggattgatcatatagtagttctatttccaattttctgaggaacctctatactgttttccataatggctatgccaattta

SEQ ID NO: 884224 - DNA, 617 bp, Homo sapiens
gtgctcagtgtggtgcaggccttcttcctggtttcctcacatggcaaaccccattacctcctaaccccagttgccctctcaaaggtctgacctccaaatactaccacattggagattagggcctcaacgtatgaattttgaggcaaacaaagttcagttcatttgtgtttttataccaaattcagctggtaaaagcagttgggcagraatttcaacctggatttatctggctcttaaacctgtgttgttattactgaacaacatagcctaattggaagtacataaatggagtttacgatggtgtcagggactgtttttagtatttttatactgttcttagtactttttgtatataataattcatttattcctcacaacaattctgagttaggtattattatcattatagttttatcatcttaatttttcaaaatgaggaaactgagatacatacacattacttgtcaaatgtgtaagaggcagagcaaggatttgaatgaacccaggcagtcttatcatacatgccactgcatctctagggatcatgtataagaaagtcctgtatgtgtctcccatttcgcattctcccatcaaggagattaaggaaaagatgacgt

SEQ ID NO: 884225 - DNA, 680 bp, Homo sapiens
atgaacagacaacttaaaaatgtcaagaattttaacccgaaacagctaaagccaactgaaaactgtaactgaaatctcggtacctgaaactgggcaaagcaggtacagttgtccctataaaagaatgataagacatgcagatatatatttgatttcctggataaggcatgtgttttaaaattgaacatagctgtgtttgaattgccagatataattctggatacattttctaaccgtcctaaatcttatatttaaattttgttttaaatttatgggtacgtagtaggtttatacattgggtacaggagatattttggcacaggcatgcaatgcatactaatcacatcagggaaaattgggtattcatctcttaggtattatttatcctttgtgttacaaataatccaattacgctttttaagttattttaaaatgtgcaattaaattattattgacgacagtcccctattgtgctatcaagtactaggtcttattcattctttttaactttttttgtagcaatsaaccatctccgctttccactcactccccgactactctacacagcctctggtaaccatccttccattctctagctccatgtgctcaattgttttgctgaatctcttttttaaaatctgtaaaatcaccaggttattgggagaaataatggaattaag

SEQ ID NO: 884226 - DNA, 535 bp, Homo sapiens
atgttttagacatttctgtttccatttacagagcaaatgctatagactgggcactgctcttttcattcagaaaataaagttgctgtaagagctaaagtctattggactatctacagaaacacaaaatggtattgtcacactagcaagtcagacatggtgcaatgggatcagaaaggaagataatacccaggttttggagcagggtcagtgaaggtttcagagaagggttattttagagatgaaccttgtaaaatgagtargattttataaaaaaaaaagaaatgtttttttggtggcggtaggaactccaataaaggtattatttctagagatgacctcaggctacttatcagccagtgttttttaaacagagcccttgaaggcccagattttctctgaagacttcagaggctaccaaaagggcaatgcctaaagggaaagagagttaaaaagagagtttgaaaactgaataaaggtgatatagaccaaccatttacatttcaaaaaaagtctactacatcttaagttccaaaga

SEQ ID NO: 884227 - DNA, 638 bp, Homo sapiens
gacttctaatatagactccacttaatcaagacatattctacttgtatagatttttggattagattttctaaaatttgtttagaatttttacatccatgcttatgagggatattattctgtggcttactttttaaataatgtcttcatttggtttatgtctcagggtaatgtaagcatcatagaatgaggtgggaaatataaatttcagtttttctgagagtttgtatgcaattggtagcatttcttcctttaatgtttgtttacccggaaagccatctggacctgcagcttctctgtggaaagaattttaaacacaaattaaaattctttagaatatatagatagggctattcaggttacytgtttcttcttgagtaagctttagtagtttctttctttcaaggaatttgtgcatttcatctaagatgtcaaattcataagtataaatttgttcatttttttattcttttaaatccatatactgtagagatgacacctctctcagttcttttttttttattatactttaagttttagggtacatgtgcacattgtgcaggttagttacatatgtatacatgtgccatgctggtgcgctgcacctctctcagttctgatattggtaatttgtctatttt

SEQ ID NO: 884228 - DNA, 548 bp, Homo sapiens
tttgtcactaggccactctcatatagccccatcctctttccccacaacactagaaactgtgacacgtggagttgtagaggaaactggacaggcaaagttagcaatcagtcatctgagttcacaacaacaatgatagtgatggtgacaaccacaatttaaaaagcaattttacatttaatatggttgaattttgtgagagattggcatattgttataataacgtcagyagttatttaatattaataagccttacattcaaattttgaaattgtgcaaatctctccagattaaaaattccataagcatcaggaaatctcaaagatttggaccaagtgaattttaaactacgttttatgcaatcacaacatgttagcaaatcagtagagtaacagaaatagagaacacatttgtcagtattagtcttacattacctgagatatgaaggaggcaaggtcctcagtaatgggtatcttgcatagaatgctataactttgttacactgtctcaactatctttgaatgctaagatgggttcatcttgcagataag

SEQ ID NO: 884229 - DNA, 644 bp, Homo sapiens
catgcaatttgcactcgagggtactggagagtgtcctgcctatctctgtacattaaataaccttattgtgttgctgagcctggctgtgtctctccctttctctgtggcaggtgtatttatcattttccccactctgacattcctagcttcagctgccagaccaggcctggtgcctttctctcagtagattagtttgcattctatgggattaaaaaggtttagagagctactgggagttggcaggaagagcctgagctgtttggaaatgtcagaaaattgtcaagactgccagttttctgggggataaaatgggatgaggaacagtagcacttttcaatyagattctagtagacaaaacgtcacaagaaagcagcagcaaggatctctaagataataagaaattcttgtattctgagaagggtaggaagagaaaagaggaggcagtggtgaaggagttaactctcttttttcatgagcaattgaaagttgacaaatgggacagcccagtacatcacactacggtgtcactctttggtcttagtcaaccttgtggaaaccagtcatgggagaagaagccacaggaaatgaggtgctctgaaaacaaacacgtgactaatgcatttagcatctcacattcccatttc

SEQ ID NO: 884230 - DNA, 624 bp, Homo sapiens
ttcatgagcaaatatgaagaatgttgctcaccccacatgtgaaaatgcttagtgcattatttatagacattgtttgaccggggagatcaaggtcatgtgtggactcctgggcaatgggtcaaatcttaagaggctgccctgataatccctgctgacagtttcttggattgtgttggtgtacttaagtagatgcattttccaacttggagggaacagtgaagaactttaaaaaaaaattagttagctattcatttatctgacttgatcacaactcattaattttgatcagaaacagtgtatacggtagggaggttgctatattcacatgctcttttcctaaactctctaaatcattccactaagagaaatacacaattaacctttcccggtgacaactgctccttgccttctacccctygccaataatgtttccatatattccaatgtccagagtaaagcagactcaataattagtgtgactcagaagaaaatactgaaatcttagaatgtttactgtagaaattctcatggaaaattatttctaaatgtttttaaaacttatatgttaaatattgtagaattccatatctttgtcacccatagtgggcccattgtttatgtgtc

SEQ ID NO: 884231 - DNA, 668 bp, Homo sapiens
tcacaggctaggctgcaaattggaggcacagcatgcagcagtaaagaaaagctcatagaaaagggggaaaaaagagctcaggtattttactctaaattgacaaatgggatgttcctgaactcaaaggaattctttagctcactattgaattgctattaaaaaatgtattaccgagaaaacagacccaaattgagaccctataggaaatagaatttcagtgtattttctattattcacagtaagaattagcaccagactgtgcatatcactgagttaaatgtaatgcaaaatgaattaartaaagggggaaaaaaagcctgtctgctctggaaacttacaatgaagaacattgaggcagaaagaaagaggaaagatagcatgtcacttgttatgtgcatactcaagggagagagcaagttgtagtaatgtgtttgactgaatggttcttgagagattgccaaatctcttcttgataagatttgattttgaagcaactcaggtgatacctagatgtataaggatatgaatttaatgcatggtggagagtagggcattgcaggattatggtggaagcagaagggaagctcgagatattttgcaaagactgaaaaatgagtgagagggaacagaatggatttgcacaaaaatataatggtacccagttttct

SEQ ID NO: 884232 - DNA, 668 bp, Homo sapiens
tcacaggctaggctgcaaattggaggcacagcatgcagcagtaaagaaaagctcatagaaaagggggaaaaaagagctcaggtattttactctaaattgacaaatgggatgttcctgaactcaaaggaattctttagctcactattgaattgctattaaaaaatgtattaccgagaaaacagacccaaattgagaccctataggaaatagaatttcagtgtattttctattattcacagtaagaattagcaccagactgtgcatatcactgagttaaatgtaatgcaaaatgaattaagtaaagggggaaaaaaagcctgtctgctctggaaacttacaatgaagaacattgaggcagaaagaaagaggaaagatagcatgtcacttgttatgtgsatactcaagggagagagcaagttgtagtaatgtgtttgactgaatggttcttgagagattgccaaatctcttcttgataagatttgattttgaagcaactcaggtgatacctagatgtataaggatatgaatttaatgcatggtggagagtagggcattgcaggattatggtggaagcagaagggaagctcgagatattttgcaaagactgaaaaatgagtgagagggaacagaatggatttgcacaaaaatataatggtacccagttttct

SEQ ID NO: 884233 - DNA, 615 bp, Homo sapiens
aatgtattaagaatgttgcccaagatatcatccattgtgagacagattgatttcaggacttttaaatgagaaatgggctatcttaggcgtgatgaaatagggtatggatgaaaagcaggctgggttgtgtgctgagggtggtggatggaagggtgtgctcagctctgcagatgttgagtttaggccatctggggagatcaaagcataagacctcattctggaccctgacgagrttcagaataagaaagacacagggtcaggagattcaaacatgtgatttatagctcaaaaggggatcagatgaccagaaggaagcccaagtggcaggcagacagaaatgaggtgtgttcccaaggattcagatgtatgaggggcttattatgtgaattaggtacagtgggatccagcatcatatacagacccctcagtatccataggggattggttccaggactcccatagataccaaaatttgtggatgctcaagtcccttacatgaagtggcacagtatttgcatataacctatgcacatcttcctgtatattataaatcatctctagattacttatgagactcagtgcaatgtaaatgctatgtaaacagttgctatgctg

SEQ ID NO: 884234 - DNA, 615 bp, Homo sapiens
aatgtattaagaatgttgcccaagatatcatccattgtgagacagattgatttcaggacttttaaatgagaaatgggctatcttaggcgtgatgaaatagggtatggatgaaaagcaggctgggttgtgtgctgagggtggtggatggaagggtgtgctcagctctgcagatgttgagtttaggccatctggggagatcaaagcataagacctcattctggaccctgacgagattcagaataagaaagacacagggtcaggagattcaaacatgtgatttatagctcaaaaggggatcagatgaccagaaggaagcccaagtggcaggcagacagaaatgaggtgtgttcccaaggattcagatgtatgaggggcttattatgtgaattaggtacartgggatccagcatcatatacagacccctcagtatccataggggattggttccaggactcccatagataccaaaatttgtggatgctcaagtcccttacatgaagtggcacagtatttgcatataacctatgcacatcttcctgtatattataaatcatctctagattacttatgagactcagtgcaatgtaaatgctatgtaaacagttgctatgctg

SEQ ID NO: 884235 - DNA, 598 bp, Homo sapiens
ttactttggatgctctaatgtagagaacaattccattctctatacaaaatgattaaacaataacacactttttaaaattcacttaaatttgaatttttgaatgacagctataaaaccacctatccaaatacgtttcttttagctaaatgtttagctctatattgaaataaaaatatctacaatttaaaatttctttagtgttaccctatttcagtatgtacrgacatcataaatggtatgacaagtgatcacattttcttggatgattaacctaattcatgagtttaacattgctaaataattcttgaatagcatgtctacagaaaactgttgattttcttgtaaacaatgagagagataacttcttctgaaacattcccttagggtttcagagtataagcatttcatcttgcttgtttatattacaattataagaaatactcacagtttcactttattttattccttaacgtattgattctgtttctaagcaacacttttaagtgagttgccttctaagtatttgattaagttatttcaagacaatgaggaattggaaacaaataagtatgtgtaataatgtttcttagcaatgagc

SEQ ID NO: 884236 - DNA, 641 bp, Homo sapiens
gaaaacagaggccatacttcttaaaaacttctctgtgaaaattttcaaaaaattaaacgatgcccagttacctggagagattccataagggatgccaaggtccaagctgaccaccaactccagagctgatgaaaggggaagagatccatattatagaagaagtagaagaatttgaagttgggtgaaatccaaattcagggttgagaagaagagactagcagcataatacaatcaatatgcttgtcctttagcctagtaagagttattatgattagtttgagatatttgtttccagttttttaacacaacttttggggtgtagattgtatgttggttggcacggcttcttatgacaaataatttttgtctggagtaatgtaaaccatgtatacattattaatttgcaggttcatattcctacatcagagctaattgaatgtttcccctagacacaaaataaycctgtattaatgcaattgaaatttacacaatgcatttctttataaaatatttagtggttggacaggcatagtacaatttagatactttaatatttaataatataaaaacattctattttattgtgatattaatctgatttattttatggtatttttcacctttgttccactttatattaa

SEQ ID NO: 884237 - DNA, 617 bp, Homo sapiens
ctccaattttgaaagaaattccactgtgagtaaattgtgacaaaacaatgtcatatgctacagagaaatttttcatgaaaggaagggtcagtagctgtatcaaactttattattttctattttaagaaatggtcatagccacccaactttcagcaaccaccaccctgatcggtcagcagccatcaacattaaggyaagactctccaccagcaaaaagattgacttgccaaaggctcaaattattgttagcattttttaatagtaaattatgtttaattaaggtatgtacgttgctctttagacataatgttattgcacatttaatggactatagtgtaaacataacttttacatgcactgggaaaccaaaaaatgtgtataacttgctttattgtgctatttgccttattttggtagtctggaactaaacctgtaacatctctgaagtgtacacacccacacacacatatacatatctgatgtcaattgatgagttttgaaaaaaaatcaggataagagaatttttaaaaagtaagtagttgactaggagaattaggggaaaggcttctattgctgtaagggagaaaggaagccatacaggcatctgtaatagcaaa

SEQ ID NO: 884238 - DNA, 770 bp, Homo sapiens
ctgattttagcagatttcccaaatggtatatctcttcatagtgttaggtaaggcagaaagctattctttaaagagcaaatctctgaaagctaatgatgcctgggttgcaatctaaatgatatttttttctttttctaaaatgccaagggcaagttgacttttagagttaatttctttcatttatataaaatggtaatgagagttaaattatatttaggcacctggtacattacctagcctgtaataaactctctgtaaatgctwgtttcctccctctgttgcattaaaacaactacaagatgaaaaacctatgtaaaccaaaaataaaagtctaagccccacaaccaacagaatggacccctcctttcggccaagagcattataaaggaaacctgaaatattagttcaggccttgatgaaatggatggttggatatgcctcattatactttcctccctttgatatttaggctaaccagcattagcattaaaacagagacctgaagactgacagaactagactctttaagcctgataagaaacatttacaactgattccctctaaagcctgctacctggaggcttcatctgcataataagaatttgggtctctataatcccttatcttaacccagacattccttctattgattccaagtcttagataaattctttccaccaattgctaatcacagaatctttgaatccacctactacctggaagcacccccacaacacacacacaatggcttcaagttgtcctgcctttct

SEQ ID NO: 884239 - DNA, 770 bp, Homo sapiens
ctgattttagcagatttcccaaatggtatatctcttcatagtgttaggtaaggcagaaagctattctttaaagagcaaatctctgaaagctaatgatgcctgggttgcaatctaaatgatatttttttctttttctaaaatgccaagggcaagttgacttttagagttaatttctttcatttatataaaatggtaatgagagttaaattatatttaggcacctggtacattacctagcctgtaataaactctctgtaaatgctagtttcctccctctgttgcattaaaacaactacaagatgaaaaacctatgtaaaccaaaaataaaaktctaagccccacaaccaacagaatggacccctcctttcggccaagagcattataaaggaaacctgaaatattagttcaggccttgatgaaatggatggttggatatgcctcattatactttcctccctttgatatttaggctaaccagcattagcattaaaacagagacctgaagactgacagaactagactctttaagcctgataagaaacatttacaactgattccctctaaagcctgctacctggaggcttcatctgcataataagaatttgggtctctataatcccttatcttaacccagacattccttctattgattccaagtcttagataaattctttccaccaattgctaatcacagaatctttgaatccacctactacctggaagcacccccacaacacacacacaatggcttcaagttgtcctgcctttct

SEQ ID NO: 884240 - DNA, 622 bp, Homo sapiens
ataagcattacctcacctacttatcacttttgtggtgagaacacataaagtctactctaagcaattctaaagaatctaatgcattgctattaactctagttatcgtgttgtacagtatgtctcttgaacttatttctcttatctaagtaaaattttgtatcttttgaccaacatattgccccccacagccctggtcgctaccattctattctctgcttctaagaattcaacctttttagattccacatataagtgaggtcatgargtatttgtctttctttggctgtaacatttaaggatgaacaactgggaacctaaattatttccaagctgtagtcccaccatatgcaccagtacttttaacggagcctgcctagttcctgtttctagaaaactattcagtaaaacagccgtcttctatgtattatgtatttttcctaagtcgttacctagggactagaaccctgcctagatccctgtgcccagtgcttcaagccgccttaactatcttgtaatattggcctctatgaatttttaagtagcagaatcagctcccctgagattagtttatatctccccacctggagtggactgcatcttgggtctttgctcaactatcact

SEQ ID NO: 884241 - DNA, 622 bp, Homo sapiens
ataagcattacctcacctacttatcacttttgtggtgagaacacataaagtctactctaagcaattctaaagaatctaatgcattgctattaactctagttatcgtgttgtacagtatgtctcttgaacttatttctcttatctaagtaaaattttgtatcttttgaccaacatattgccccccacagccctggtcgctaccattctattctctgcttctaagaattcaacctttttagattccacatataagtgaggtcatgaggtatttgtctttctttggctgtaacatttaaggatgaacaactgggaacctaaattatttccaagctgtagtcccaccatatgcaccartacttttaacggagcctgcctagttcctgtttctagaaaactattcagtaaaacagccgtcttctatgtattatgtatttttcctaagtcgttacctagggactagaaccctgcctagatccctgtgcccagtgcttcaagccgccttaactatcttgtaatattggcctctatgaatttttaagtagcagaatcagctcccctgagattagtttatatctccccacctggagtggactgcatcttgggtctttgctcaactatcact

SEQ ID NO: 884242 - DNA, 611 bp, Homo sapiens
gatgtatttgcttaagaataacttaattacccattctggataaaaatttaatggaatgtgttagaaggcttaagtgagatattaaaattaattgaaatcacgacccccacactctttgacacacctcccattatgaggtagattgtgagcggccttatagttactccacttaatagaataaagttgatgtgatgttatgtaacttccagactaagttagaaaaggtcatttagcttctacttggttctgtctagagacatactctgggggaaaccaacaccatgtaaaaagctgtcccgtgaccaccatgttgtggaggccccgtgtaggaatttcagccgacactaccgaccaacagttagcctccmcttccagccctgtgagtgagtcatcttggatatccagcccagtccagtctttatgtaactacaaacctacctgatatttaactccagtcccctgagaggtgccaagtgagaactcctcagccaattccttctcaaatatttgtctcacaaaatttttagaatatctttaatatatgtgtaatagtaaaactactgtcactcagtaattttgatattaactgtatgtttattttggatattcag

SEQ ID NO: 884243 - DNA, 574 bp, Homo sapiens
caggaatccaatttcattgtcattagtaccattgtgccaaatgacttgtaaaataaagtaaatgagatctacagcacctagcaagctaagacaacccccaattcatcattgccctgcaaaactgcactctgatggtctcaaaatgagggtgagagagaggattagttctgaccttccactgatcagaacaaagtgttattcttgatctcacttcactggtttctgactagcatagcatttttttgtattgtcttatttttctstcttcataaatcaaagttagcatccaaagagtcacaggatctgctgtcttgctggagttttacaccaaaaactcctttagtgattattagagtgatgtgtacctgaataaataggtatatattaggctccaggtggaaactgttaatttcataccaactccagagaaacacatagcaatgggtcttgggcagagtttgagaaatgtgtcacccactcatcactgtataacttcatattccatattcaccttgtatgactggcacattatgtcagaaaaatagcaagtttaagtaagtgaggagagaaattc

SEQ ID NO: 884244 - DNA, 577 bp, Homo sapiens
tagagctgtaggccatctgtatgtcactgttgagaaatattcacatcttttgcccattttttaattagattttttgttgttgtggttgctattaagttgtttgagctccttatctattctggttattaatcacttgtcaaatggatggttttccaatattttcttcctttctatgtgttgtcccttcaatgtcttgattgttcatttgcagaagaaactttttagcttgatataaacccagttctatatttttgctttggttgcctgtgctttcgaagtcgtatacaaaaaaaaaattgccaagaccaatgtcctggagcatttccccaatrttttcttctagcagtttcatgatgtcaggtcttagattcaagtctttaattcattttgatctgatttttttgtgtatggtgagagattcagggtctactttcattcttgtgtacatagctctctagtttttctagcactgtttcttgaaaaggctgtcttcaccccattgtatgtttttgcatctttgtcaaagatgagttggttgtaaattcatggatttatatcagaggtctctattctgttc

SEQ ID NO: 884245 - DNA, 557 bp, Homo sapiens
tttgtattcaaacctgggtctttctagaccctaaatgtgtcacaaggatcattaaagtcatcttttttcaccaaagtgcagctagatgagaaatgcagaatcaaaggaatattatctactccttcatgctcagaacaatgctggtgaaacacatacctttttcaatccattgctcaaaatcaactggctctttagacgtgcttttttcaatcttcaaggkctgtactaacattgtaaacaaagtaagtaaagtgttaatctggctgtatgtttttgtccctatatttctttttccctctgcctgagattatcatgcacagtggaactacacagagcactgggatcagaaacaacatggaagttactctgtatgtttccaaaaaaccctatggtaaaatatagtcttgtgtaactaatcttccaaatgttcgcaaccatacaacacagagcaagtagagcttttctgaatttggcattgttccgatttttttgtgtgtatggcgataatactactattggtggtcttggtcataaacatttatggagagcctatgatg

SEQ ID NO: 884246 - DNA, 662 bp, Homo sapiens
aaagctgatccaagaaaatgcaacaaaacacacccgtgttgttcttacagctttgcagttttgtgaaaaggaacacaggagattttgctctcatttagaactgtcattcatggcttttgcttgaaaatacctgctttcaaattcacactgtgtctctgtctaccaagcgtatgtctatgcatatgaagtccagagaaagtaactctgctagactgaactgggatgcattccaaggactcggagtcatgggataacagatcttatacaacctaataggacttgatttggcacaggtaaagttttttttatgaaaatttactttctcatatattggtgagactgaacagatctagctatatattgcttaaatttgcttcatgtcaagttaagaagaaaacactcataaarcagccattccttcttaacagagaaaagctgtttttatcttttgaaatactagtttaaggaagtgcatcaataaaacctttaactttttaaaaaatctcattttatgatgtaaattgaaagcatatttcttattttggagaaggcattactgatgtgcataaactcaatagggttcttcatactctaacctaaaatttttgcctagggctcatttttgtgatttcctcagaaaccagagaatgcaaaatagtatt

SEQ ID NO: 884247 - DNA, 623 bp, Homo sapiens
tatctagtttttcattgtttacattttttctttattctaaaaaaaacaggatgcatgcacaaaacgtgcaggtttgttacataagtgtacatgtgctatggtggtttgctgcacctattgacccatcctctaagttccctcccctcacccccgaccccccaacaggccctggtgtgtgttgtttccttctctgtgtccatgtgttctcaatgttcagctcccacttatgaatgagaacatgtggtgtttggttttctgttcctgtgttagtttgctgaggatggtggcttccagcttcattcatgtccctgcaaaggacatgatctcattcccttttatgactgcatagtattccatggtgtatatgaaccacattttctttatccagtctatcactgatgggcatttgtgttggttccatgtctttgctattttaaatagtgctgcaataaacatacatgttcatgtgtctttatagtagaatratttctattttgggggtatatacccagtaataggattactgggtcaaatggtatttctggttctagatccttgaggaatctctatactgtcttccacaatgattgaactaatttacattttttcttaacagcagtcat

SEQ ID NO: 884248 - DNA, 565 bp, Homo sapiens
aagctttgaagaataaaaaaaggaggctccccagactgattagaagcacagtagagagaggacagccacctagagaaacagatcagagagagcctgaagggaactgtggaaatgcaaaaccatagcccagagagagacctgtcaggtgacagccagaacctaatgactccctggaatcatcagagtgctcgagagggactgcatttcatgaagtcacccaggatgtgcttgagttttttaattaatctgaaaaaaaaaacaacggaactttctatggctagaattggggatatttggaaacatccagagtcagttattgaatatcagtaccacttgattatcagttccattgaggcagggttcaaatctaccttgtttctgctctatgcccacatatcacagtgcctctccyatagtatgaactcattaaatatttagcgaatgaatggataatattttcaacaagactcaagctctttgaaatcacagactgtatcataaatgttctgtaactctaaagaacccagcacaatgcctgacactgagtgacactagttatgatttg

SEQ ID NO: 884249 - DNA, 645 bp, Homo sapiens
ttgtgcctcccttcaatttatatgtgggagccccaaccctttatgtgatggtattaggaagtgaggcctttgggaggtaattaggtttagatgaggtcatgagggtggagctcctataatgggattattatccttataagaagagggagaagaacccacaggtctctccttcagccatgtggggcacagcaagaagacagcagtctacaagccaggaaaagggccttcaccagaaactgaatctgggggcaccttgatcttagaatcttcagcttcctgaatggtgagaaataaatgtctgctgtttaagccatcaagtttacacctttgttatggcagcccaagcagactaagacagtgtttacagatatctgcccatcacaggtgcagcttccaatcccagctgtgatcaaatcctctccaactagaaaatcatcaatgtcttcccattgtccatcgaacagaaatttaactctggtattcaaagccctctacartactgtccaaactattctttccagttttgtctcccactaattgcctatacagactccaaactctagctatagtccattggttttattctttcctccctcttggcctttattctttcttttttctacccctgcaacacttttaatcctc

SEQ ID NO: 884250 - DNA, 665 bp, Homo sapiens
ggggtatttttattaaaagaaatagcagattctggcaaacatactgaccaagagttaaagaacttccataagtctgactcaattctgcttctagtttggagactagttacctaattttggttcttaacttcttccttctctaaaacatgattcacacacacttactgtgtatcgtctccaactagcagagcagttgcaaaaattaaaatgtgataagaataattaataccttcaatttatatagcatacctcttcccatgcctcaggcactcacacyattgcagatgcttccaaaaaaaaatgtcttgacattcacaaacagaacaaaaaaatgcttaggggaatacgacaaagaaataaatgaattgtgtctatattgcttgaatttcttgctaataaagtagttttagaaaactcacctcaaatttgcactttaaaaatgtttagtaatgcagaatcattattcagttactggatatggaaaatcaaaattataaagaagccagcagcccgctaccacattatttgctacataaaaatttccctttcaagtagtataaattgtaaattctgtatgacttggctcagaatagctcaagacgtatgtctagataaatgtttatctttctattagaacagtcacacaatgtcaatatctaagtaag

SEQ ID NO: 884251 - DNA, 665 bp, Homo sapiens
ggggtatttttattaaaagaaatagcagattctggcaaacatactgaccaagagttaaagaacttccataagtctgactcaattctgcttctagtttggagactagttacctaattttggttcttaacttcttccttctctaaaacatgattcacacacacttactgtgtatcgtctccaactagcagagcagttgcaaaaattaaaatgtgataagaataattaataccttcaatttatatagcatacctcttcccatgcctcaggcactcacactattgcagatgcttccaaaaaaaaatgtcttgacattcacaaacagaacaaaaaaatgcttaggggaataygacaaagaaataaatgaattgtgtctatattgcttgaatttcttgctaataaagtagttttagaaaactcacctcaaatttgcactttaaaaatgtttagtaatgcagaatcattattcagttactggatatggaaaatcaaaattataaagaagccagcagcccgctaccacattatttgctacataaaaatttccctttcaagtagtataaattgtaaattctgtatgacttggctcagaatagctcaagacgtatgtctagataaatgtttatctttctattagaacagtcacacaatgtcaatatctaagtaag

SEQ ID NO: 884252 - DNA, 505 bp, Homo sapiens
gctaaaaaaattgcaaaaaaatcccataatgttttaagaaagtttacgaatgtgtattggggtgcatttaaagccatcctgggatgcatgcagtctgcaggttgcaggttggacacacttgagttgtaccgtcagcctcccttccctctgctttccccacccttaacaaagtagaaagacagaatgtttttctctgcagaaactgaattgccccagaaaaagacctccagacaatgatttattttattctatttttyattaaaaatacttatatatatttatggggtacaatgtggtgttttaatacatgtatactttgtggaatgatcatatcaagctaaccaacacatccatcacctaaaatagttatcatttctttgtggtaaaagcattcaaagtccactcttttagttatatgaactatgtggtacataattattaactatagtcaccatgctgtgcaatagagcatcagaacctattccacctctcaaactggaacttt

SEQ ID NO: 884253 - DNA, 505 bp, Homo sapiens
gctaaaaaaattgcaaaaaaatcccataatgttttaagaaagtttacgaatgtgtattggggtgcatttaaagccatcctgggatgcatgcagtctgcaggttgcaggttggacacacttgagttgtaccgtcagcctcccttccctctgctttccccacccttaacaaagtagaaagacagaatgtttttctctgcagaaactgaattgccccagaaaaagacctccagacaatgatttattttattctatttttcrttaaaaatacttatatatatttatggggtacaatgtggtgttttaatacatgtatactttgtggaatgatcatatcaagctaaccaacacatccatcacctaaaatagttatcatttctttgtggtaaaagcattcaaagtccactcttttagttatatgaactatgtggtacataattattaactatagtcaccatgctgtgcaatagagcatcagaacctattccacctctcaaactggaacttt

SEQ ID NO: 884254 - DNA, 619 bp, Homo sapiens
tgtgtccttagtggaaatgtggcactgataaggttatttttttttcctaattgattgtgccacctttgaaggacacttcacagaacacaatggagacagtctggaggagtaattatcatcaagaggctggaagtcaggcttagatgctaaaaataggactcatagtaacacccatctcatagtgttgtttgtggccctaagagaagggtgcacagaaagggcttagcacaccatgtgctccatcaataccrgcctttattatcatagtaactatcggggatcagaaaaccatacctgaaaaagaaagcctcagaagcaaaagttcctctctgaccttttcttgctctcctttctctggccccgcttctccaccaggctagccatagaatctacaatccctcttccccagggcaggtcatagaaaccacaacccctgcaggcactgaggtggctcatgcttgtaatcccagaactctggaaggccgaggcagcctttgagcccaggagttcgagaccagcctgggcaacatggtgaaacaccgtctctactaaaaatacaaaaattagctgggtgcaatggcatgcacctgtagtcccagctactcaggaggctgaggtg

SEQ ID NO: 884255 - DNA, 590 bp, Homo sapiens
taatataataatttaaatgtaatccatcacatcaacaggctaaagaagaaaaatcacatgatcatatcaatagatgcagaaaaagcattagacaaaatccaataccaattcatgatttaaaaaaataagtaaaaactctcagcaaactaggaatagagaggaactgcctcaacttcacaaaaagcatctaccaaataaacccacagrtaacatcatacttcacttgatcttagccaaaaggccgtgaggctatagataacatcatacttaatggtgagaaactagaagcttttctaagatcaggaaaaaggcaaggatgtcccttcacacaactccttttcaacatactggaagtcctagctaatgcaataagaaaagaaaagacatacaggttgggatggaagaaataaaactgtctttgttcacagatgacaggaatatctatgtagaaaatctgaaagaatcaagaaaaaagaaacttctggaatgaatagcaattacagcaatgccacagaatacaaggttaatatacaaaagtcaatcactttcctacgtaccagcaatgaacaagtggaatgtgacattagaaa

SEQ ID NO: 884256 - DNA, 655 bp, Homo sapiens
tccagcttttgcccattcagtattatgttggctgtgggtttgtcataaatagctcttattattttgagttatgttccttcaatatctagtttattgagagtttttaacatgaaggggatttgaatgttattgaaaggtttttctgcatctattgagataatcatggggtttttgtctttagttctgtttatgtgattaatygcatttattgatttgcatatgttgaaccaaacttgcatcccagagattaagcctatttgattgtggtggattagctttttgatgtgctgctggattcagcttgccagtattttgttgaggatttttgcatcaatgttcatcaaggatattggcctgaagttttttgttgttgtatctctgtcaggttttggtatcaggatgatgctggcctcaatgagttggggagcttctacacagcaaaagaaactatcaacagagtgaacagaaaacctacagaatgggagaaaatacttgcaaactatgcatctgacaaaggtctaatatccagcatccataaggtacttaaacaaatttacaagagaaaaacaaacaaccccattacaaggtgggcaaaggacatgaacagacacttttcaaaagaaaacatacatgtggccaacaagcatatgagaaa

SEQ ID NO: 884257 - DNA, 655 bp, Homo sapiens
tccagcttttgcccattcagtattatgttggctgtgggtttgtcataaatagctcttattattttgagttatgttccttcaatatctagtttattgagagtttttaacatgaaggggatttgaatgttattgaaaggtttttctgcatctattgagataatcatggggtttttgtctttagttctgtttatgtgattaatcgcatttattgatttgcatatgttgaaccaaacttgcatcccagagattaagcctatttgattgtggtggattagctttttgatgtgctgctggattcagcttgccagtattttgttgaggatttttgcatcaatgttcatcaaggatattggcctgaagttttttgttgttgtatctctgtcaggttttggtatcaggatgatgctggcctcaatgagttggggagcttctacacagcaaaagaaactatcaacagagtgaacagamaacctacagaatgggagaaaatacttgcaaactatgcatctgacaaaggtctaatatccagcatccataaggtacttaaacaaatttacaagagaaaaacaaacaaccccattacaaggtgggcaaaggacatgaacagacacttttcaaaagaaaacatacatgtggccaacaagcatatgagaaa

SEQ ID NO: 884258 - DNA, 618 bp, Homo sapiens
ttttccatgtaaaatgtttacaccattagaacaggttttgtttcagaatgataacctcccagactgattcagtagggactaaattaatatgcatctaattaaattgaaatgaaacaaagccccgagatacggacagaatttcagatggtaattttgagaacacctttagcatttagtaaggtggtactctttaaactcatgctatgttgtcagtattaacatttccaaagtcactaggtttaaattttagagacttactttctgactaccggctccaagcatttattttagcctatgtgtacaaacattcagactggctatgtgatggaaaagtaaaaaaaaaaagatgacttttgtcctggccctcaaaatcttatagcttaagatctaattctccaaaagtagacaaaagttgcttgagtattgggttgcacttgtttgtatagtttttattcagwtaagaataatgaagactcttgttctctctttctatctattcctttataataatagtaatcatcatcatcatctcaggcaacagcatcctcaatgcggtaaattttgcctatcatataaaaaatacatttgaatatatagttgtatcatgtttactttcac

SEQ ID NO: 884259 - DNA, 614 bp, Homo sapiens
gcttttcatgaatgaagtttttaatcctttcaaagcctaatctaaatttaagaattcaaacaaaaaatccctaatattttaatttgcaatcaggagaggttcaatcagactaagactttttaatttgacagtctcctttttaacacatagagctacttctttgatctgccttggttaatgaaatggatgagttccaataaatttggatgcaaagtaataatcaacagaattccatttcccattgattttcattgtaaacttgtatcacttttttgacataaaataagcactctctggaatgaataatttaatttgaaatatgaataaaaaataaattatggtgcagaatattgctaagtccttcatacatttgcagcactttgcatctaccactgcttacttcctagacagagaaccatttcctataataatagctaamacccatgaaggatttcctatctggaaatagtttctataacctttacatctattcatcttcatgattacattgtttaatgggtactatagagatcgtcagcatccccattttacataaattgtaagtgccagagttttggtttaaaccaggttgtctgactccaaactcttcactt

SEQ ID NO: 884260 - DNA, 641 bp, Homo sapiens
acatacagtaatcaagtaattttctctttaaatgttatgaaaacagatttctctcagctagcattttaacatttagatttaatttgatgctgaaggctagatataatatttatccttgtttatagggtctttctaacagtaacttttggaaacaacctcatgtcatagatgatggtttaagtacattatggtatatgaatgtggatggagtattatatttcaaatattttaatgtcattggaaaacgtttgctttacactattgagtaaacaatgctagacataaacattggttgatttttgacagagaaagtagagaaaatttctgttgcacagtgtatatttctgtattcctttagtttccaaakttcttctataagatattatctgcaaaatgttgcatttgtaagcaaagaaaaattttgaaagttttgccaaactgtttgttttaaatctatcatttctatttatatattaagatctatggaatcatactcctgtcactcaatgcattagaatgaggaaaacttcaagcatgataagaataacgtagtgccttcactaaaatgtttaatatggcagagtcaaaactagaatagaatatagtttgacctatattcaacaatctttgtatctagctaa

SEQ ID NO: 884261 - DNA, 641 bp, Homo sapiens
acatacagtaatcaagtaattttctctttaaatgttatgaaaacagatttctctcagctagcattttaacatttagatttaatttgatgctgaaggctagatataatatttatccttgtttatagggtctttctaacagtaacttttggaaacaacctcatgtcatagatgatggtttaagtacattatggtatatgaatgtggatggagtattatatttcaaatattttaatgtcattggaaaacgtttgctttacactattgagtaaacaatgctagacataaacattggttgatttttgacagagaaagtagagaaaatttctgttgcacagtgtatatttctgtattcctttagtttccaaagttcttctataagatattatctgcaaaatgttgcatttgtaagcaaagaaaaattttgaaagttttgccaaactgtttgttttaaatctatcatttctatttatatattaagatctatggaatyatactcctgtcactcaatgcattagaatgaggaaaacttcaagcatgataagaataacgtagtgccttcactaaaatgtttaatatggcagagtcaaaactagaatagaatatagtttgacctatattcaacaatctttgtatctagctaa

SEQ ID NO: 884262 - DNA, 518 bp, Homo sapiens
tcccctataatgtgacctatatcaacccaaaatttgtcaaatatctaagttttatagtttcatagtatcctatgcctatttggtggtacttaatttgtttttttactttacttttttaagtttatttcactttttcaaattgttcccctatgactgattatttagacaatatctagcatataactacactttgagctaggtgttttagtgtgagcatttgcccatgtcaaataattattttttcaaaaacaaaaattgtaatggcttytctagttcaacaatttccattattagttctacacattcatttctagttttccactcctgtaaattatgtttatctctatctacctacctatctaatccatccatccatccctcaatcaatcaatatcctatctatctccagttccatttacatctttgagtgtattctgattatttccatcagatacagatttcatggaaattatattaatgttgtatgttattaggatgcactgaagagttaacctcag

SEQ ID NO: 884263 - DNA, 619 bp, Homo sapiens
caatcctagaccatgttaaatggagctcaaatattagtcctgctggtttctgttactgtgggaatgaattttctttttctctttttttaattgttggagtatttcttatccttaaccaccctcacatctcaaaccaccctgtggtttgtctgacttccacaggcagattctgaggcaagccctgatgattgcttcaagggggagtggtattaggggaatttgacccaaagtctccaaayaaacccttttttttcttagtactcatgtgtgacatcagcttctaaatatgcagtgtctttgttgttcactaataagtttattttaagagttgtgtttcttttctcaccttttgcaaagagcatcttaaaatttgctgaaagatgagagactacacacacacagtgtaaaaagtggctggtcctttagtcctatttccaacattgccacaataattttgaccttaagctatgcagactagtgaagtggtgggtggggatgcagtatatgtggtatttaaaagtcataacatttcagattatttttccatagtcaaagattagcccctgtagtctaaatagcagagatttaagggctacttctatagtggaatactataaaa

SEQ ID NO: 884264 - DNA, 589 bp, Homo sapiens
ggatgtaaacaaaaatatagaaattcaaggacgtggattcaaaacagtaatgaagtgaattttcaggatgacagcaaaagaaactccataaaagctatgttgtggtccacattgtaacagagaacagagagtttcaggaggagtttyttgcagatttaaaaagaaaaaaaaaggaaaaaaaaaacccagactacttgctatggtggaatgtattgaaatgagatttacatggcttaaagagagtgtagttatggactacttataagttcagtgaaaatcagggtaataaaaaaatctaaaaggttatttttaattccaaggaaaggaaaacatcataaatatatgaataattaatgcttccttaattaaaaaaactgtgatacaagtataatggaagcagagaagaaagaattttttttctttattggaggttgagagcataaagctaaagcctcatattctatagtaggaagttaacaggtaatatgaaagtagaaaaaaatgaatactactagtataatcacactatttaggactgtggaaataatctataagagttgagaacctgttttagagaagaagaataagt

SEQ ID NO: 884265 - DNA, 589 bp, Homo sapiens
ggatgtaaacaaaaatatagaaattcaaggacgtggattcaaaacagtaatgaagtgaattttcaggatgacagcaaaagaaactccataaaagctatgttgtggtccacattgtaacagagaacagagagtttcaggaggagttttttgcagatttaaaaagaaaaaaaaaggaaaaaaaaaacccagactacttgctatggtggaatgtattgaaatgagatttacatggcttaaagagagtgtagttatggactacttataagttcagtgaaaatcarggtaataaaaaaatctaaaaggttatttttaattccaaggaaaggaaaacatcataaatatatgaataattaatgcttccttaattaaaaaaactgtgatacaagtataatggaagcagagaagaaagaattttttttctttattggaggttgagagcataaagctaaagcctcatattctatagtaggaagttaacaggtaatatgaaagtagaaaaaaatgaatactactagtataatcacactatttaggactgtggaaataatctataagagttgagaacctgttttagagaagaagaataagt

SEQ ID NO: 884266 - DNA, 593 bp, Homo sapiens
caggggagtgggacttgtggctttataagaagaggaagaatgacctgagctaaaatgcccatcatcatatgatgctctatgctgccttgggactctgcagagagtccccaccagagagaagaccctcaccagatgcagactcttgacgttggacttctcagcttccataactgtaagaaataaattccttttctttataaattaaccagtttcagatattctattataagcaatagaaagcagactaagatagaatctttgaaacaaaatggtaattcttgaactattaataaatactctttttgctacatgtccctattacttgatagtaatygtgttcttgagtttccttatgtatagattatgtgtcagaggacctaactcactggaagcgtggtgtgggcactaaaattattattacttttttgagacggagtctcactctgttgcccaggctgtagtgcaatggtgcgatctcagctcactgcagcctccgcctcctgggttcaagcaattctcctgcctcagcctcccgagtagctgggattacaggcgtgcaccaccacacccagctaatttttgtatttttagta

SEQ ID NO: 884267 - DNA, 638 bp, Homo sapiens
tcctttattaataatgaccaatcacttcaaccaatataattcacgctttctttgcttgttggttcagtggtatgaggagctccaaatgccaggtgagagccttaacttctagtttataatgaggctgggtggaaaaaaaatttattccttgggaacaaagacttctagactagtagagctgaagkttgtggacaggaagtgaaaattctgcaagtggattattagatataatagtaagaaaagccattcccattcctgccccttaattcctggacccatgcattctacataagggagagacgtaccatatattcatcaatggttcaaagcatatgctacatcctgggggatgtatacaagctccacagaatgtgacctcccagatgataccataagctatttctccatttaatcaggccagcagctcctgagtaatggggtgcatgctaagatcagcaaattttcatggcatggtttactactgtactttccttgtaataaaatatgtcccttggacagaagcattgttatgtgtgataacatgatggtgaattaggcattctataagtccataaatggtggttttgagaaggcatatccatatccataatagtaacaacaaatggtggctcctccat

SEQ ID NO: 884268 - DNA, 638 bp, Homo sapiens
tcctttattaataatgaccaatcacttcaaccaatataattcacgctttctttgcttgttggttcagtggtatgaggagctccaaatgccaggtgagagccttaacttctagtttataatgaggctgggtggaaaaaaaatttattccttgggaacaaagacttctagactagtagagctgaaggttgtggacaggaagtgaaaattctgcaagtggattattagatataatagtaagaaaagccattcccattcctgccccttaattsctggacccatgcattctacataagggagagacgtaccatatattcatcaatggttcaaagcatatgctacatcctgggggatgtatacaagctccacagaatgtgacctcccagatgataccataagctatttctccatttaatcaggccagcagctcctgagtaatggggtgcatgctaagatcagcaaattttcatggcatggtttactactgtactttccttgtaataaaatatgtcccttggacagaagcattgttatgtgtgataacatgatggtgaattaggcattctataagtccataaatggtggttttgagaaggcatatccatatccataatagtaacaacaaatggtggctcctccat

SEQ ID NO: 884269 - DNA, 586 bp, Homo sapiens
cctaggatttacacctaacttacttgaggaaataaagaccctgtcactccaaacaggcagctccactaggtagtatgttctctgggcagccaccaggggcccgaccacccctgacaggactcctaggctaggcttcacttctcaggtgctccaagcccttctaatagtactttggtggttgacttggagtcatctttcaaggcttgctttgtatctctggtgagtcaggactatrtcaatggcactgatcaggaagaaattcaaactggtgttaatcagtgtatccagaagtttccggatactgcaagagagacaatgtttgctttgttttgtttttcctaaaaaaagattgcaattatctgtccagaaaccagagcaagttatcaaagaggatatctcagaactatggaatgaattacaacattaagatgcactggtccagaagcatttgacaaagctgaggcattggcagcaggtgctaaaggacatcaacatgcagaacaaaagccagccgacatccctcagggctccttggcctaccttgagcaggcatctgccaatatccctccacctctgaagccaacct

SEQ ID NO: 884270 - DNA, 617 bp, Homo sapiens
acagctttaccatatggagtcttactaagcaagaacaaggcttttcttgccatttacttaagtatggtttatctccctaagtgaagtttcaaagttttctcctaaactgtcctgtacatttactgtaaagtcaatttctggttattccgtccctgtgcttgcttttataaattatatgtcattaatatgttatatataatttatgttaattttataatcagtcacatgctgggtttctttaatggcttttttgttcattgagattttcagctgcgacatcatatgatattcaaataatcctaatgcggatatgtctcatcatttctaaaactcgttatttctttgccttatgtaattgcattgtygacttctttcagaacaatgttaaatgatactcatgatagagacattcatactaataagaataatgatgactatttttcagaatgtgccatatgcaagacactattctaagtgctttcctaataagtttatttcatattcagaatgaccttataagaattctagctagaaaatgtgacctcagaaactgttctcttttctacaatacaatattgcctctcttagaaatccatgcctctaatgtagattctcaa

SEQ ID NO: 884271 - DNA, 675 bp, Homo sapiens
cttagacaccttgctaagagttctacacacattgtttaatttagtctttataacaccttttcctgcacagctttatggatgaaaatatcaggattagaaagttaaataacttgcccaagaccacacagctaataactgacaaagaagaacggttctacattttcaaagccacagctcattccagcataacacagtatcccagcaccatctggcatgtgatagaggcacagtaaatgtttattgaattgatatctattgcattttaaagaaaaagcactgtcattgattaattcagtcattcttacatagaaatttattgaatacatattaaatgccaggtacacagttttgagtagactgaatacagagattaacaagatatagcgtctggtatcaaggggttgacagtytaatccttatcacatagaggaatctatgtgagtaaataaatccaataaagtgttacagatcccataatagaattcaaacaagatccactggaggcactgaggaaggaatcattatttctgcctagagatggatcaggaaatagttcataaaagctgagccttgattggaaagtagggtctccccttgtggcaccagaggagggaaaggcagagggagtgatagcaacaaaaacatggaaacctgaaacagtctgccatattggca

SEQ ID NO: 884272 - DNA, 663 bp, Homo sapiens
ttaaatcacttaaaatgcattatgacttgttttatgtactggattatggtctatcttggtaaatattctgtatgcacttgaaaaagaatgtgtgctctgctgttgttggacaaaatgtttcataaatgtcaattaggtcaagtgggttgattatgttgttcagatcttctatatccttgctaattttctctctactacttctgtcaattaccaagacagaagtgttaaaatcttcaactgtaactgtacatttcactatttcccctttcagttctatcaatttttgtttcatacctcatataagattataatgtccttttgtctcatttatcccttgtaatatctcttactctgaaatctgctttgtctgatattaatatagccactcaaactttctgttagtattagcatggtatatstttttctatatttttaaactgcgtctgtttaaagtaggtttcttatagacacaaataattgtgtctttttgtacaatctggaaacctctgccttttaattagagggtttagtccacttacattttttattgtggcaaaatatacatagcacaaaattaaccgttttagccattttaagtgtacaattcagtggcattaagtacattcatactgttgtgcaaccatcacctccatccatctccag

SEQ ID NO: 884273 - DNA, 663 bp, Homo sapiens
ttaaatcacttaaaatgcattatgacttgttttatgtactggattatggtctatcttggtaaatattctgtatgcacttgaaaaagaatgtgtgctctgctgttgttggacaaaatgtttcataaatgtcaattaggtcaagtgggttgattatgttgttcagatcttctatatccttgctaattttctctctactacttctgtcaattaccaagacagaagtgttaaaatcttcaactgtaactgtacatttcactatttcccctttcagttctatcaatttttgtttcatacctcatataagattataatgtccttttgtctcatttatcccttgtaatatctcttactctgaaatctgctttgtctgatattaatatagccactcaaactttctgttagtattagcatggtatatgtttttctatatttttaaactgcgtctgtttaaagtaggtttcttatagacacaaataattgtgtctttttrtacaatctggaaacctctgccttttaattagagggtttagtccacttacattttttattgtggcaaaatatacatagcacaaaattaaccgttttagccattttaagtgtacaattcagtggcattaagtacattcatactgttgtgcaaccatcacctccatccatctccag

SEQ ID NO: 884274 - DNA, 540 bp, Homo sapiens
ctctccctgccttccccactgttggccttcagcacatcaccccctggggtgtcccgtgatgcccgctgcccccaggggagtgtggcattgtgggggtgttggcgctgtcagccccactgactgccctgagcttctcaagtcctgggatccacagctctctgagctttgggtgcctggcccgaagtcaaggcctagtcagygtttgttgaaggaatgaacgacagcgtgccaaagaagctcagcacagtcactatcgtgttatgaaatagagcagaaggaaagtctgctccacgccatgctctgttttggagcgatgctttgacacacgtgttggtcccggttgggatttaagggcctggccaggaggttgtggtgggggccctgggctgtggtgagcagccagctgtgtagactggaagagccgggggcacctgctttgcgtgtggttctcagggagtctccaggtgtgcccttgttgcatgtgctttttctctgtgtgaatcatatttctgtcccacctttggtgtccatcttctatgt

SEQ ID NO: 884275 - DNA, 648 bp, Homo sapiens
cccatgcccagccaaaacaggtgctgcagtgagtgggccaggtagctctcgtggtatgtgagcgcagctgccccttgccaggctgtcccgggctgcccccagctctaacttgaggcactaaccctatcaggggtcagtggcttaatatagcctctccctggtatttgcatttcaaaagaggtctctgtgaaattattctggaagggatttcagggcccctgagtggggacacrtttcaggcctaggaggggtggctcctccaagttcctggcagatgctgcagcctgcatttctgaggagggctgggcccgaggcagctgccaccatgggctgggctgggctggtggaaggagggactctgtcccctgcaggaccctcccagcggtcttgcttgggactgagcagctggggctggtgggccctgtggatgccaggtttactggtgcccagttcagacctcggacccgtccccaccgtcgtaacggctctccccagcagctccccttctcttgccctgtacccttggatttctgggcggaaggcctggggcgctcctccctacaggtgagtctgagagccagggcagagcgtgggagcccgtgggagcctgggaatgttctgtgctccgtgaaattgacagttgtgctc

SEQ ID NO: 884276 - DNA, 654 bp, Homo sapiens
cttttctgaatactcctttcatcttcttgctctaagaggaaagtagttcaccctgaggacacagcttgccctgcagcccactcaagtggggctattttattccgtgaagttttctaccaccaggtatgaaggtggagtatcctcatgtcgcctcagtgctactttcagatcattatttctcctcttctaaaatccttccctctctctcaccacatctctgtatctcttgtgtggtaattcraaaatatgttccccaaagcctttgatatttctttcattgagaggtgggggctgtgtcccttcccttgaatctgacttctgggactgaattcagtgatgtgatgctgtagctgtttctagatctaggcgtcatgaaaccatctgcttctacattttatctcttgagattctgacttttgaacccagctaaattatttgtgtcaattacgcaacatgtagatcagcctaagtggaaagaaacaaagatgtccagcctacagcccagctgagctcccagccaacagccagcatcaacttgccagccatgtgagacattaaaagaaaaacctgtttttcttttgcacacacatttcacttctgacctcagatatgtgtgggttttcccctacatattaggcaattctctaattctct

SEQ ID NO: 884277 - DNA, 654 bp, Homo sapiens
cttttctgaatactcctttcatcttcttgctctaagaggaaagtagttcaccctgaggacacagcttgccctgcagcccactcaagtggggctattttattccgtgaagttttctaccaccaggtatgaaggtggagtatcctcatgtcgcctcagtgctactttcagatcattatttctcctcttctaaaatccttccctctctctcaccacatctctgtatctcttgtgtggtaattcaaaaatatgktccccaaagcctttgatatttctttcattgagaggtgggggctgtgtcccttcccttgaatctgacttctgggactgaattcagtgatgtgatgctgtagctgtttctagatctaggcgtcatgaaaccatctgcttctacattttatctcttgagattctgacttttgaacccagctaaattatttgtgtcaattacgcaacatgtagatcagcctaagtggaaagaaacaaagatgtccagcctacagcccagctgagctcccagccaacagccagcatcaacttgccagccatgtgagacattaaaagaaaaacctgtttttcttttgcacacacatttcacttctgacctcagatatgtgtgggttttcccctacatattaggcaattctctaattctct

SEQ ID NO: 884278 - DNA, 654 bp, Homo sapiens
cttttctgaatactcctttcatcttcttgctctaagaggaaagtagttcaccctgaggacacagcttgccctgcagcccactcaagtggggctattttattccgtgaagttttctaccaccaggtatgaaggtggagtatcctcatgtcgcctcagtgctactttcagatcattatttctcctcttctaaaatccttccctctctctcaccacatctctgtatctcttgtgtggtaattcaaaaatatgttccccaaagcctttgatatttctttcattgagaggtgggggctgtgtcccttcccttgaatctgacttctgggactgaattcagtgatgtgatgctgtagctgtttctagatctaggcrtcatgaaaccatctgcttctacattttatctcttgagattctgacttttgaacccagctaaattatttgtgtcaattacgcaacatgtagatcagcctaagtggaaagaaacaaagatgtccagcctacagcccagctgagctcccagccaacagccagcatcaacttgccagccatgtgagacattaaaagaaaaacctgtttttcttttgcacacacatttcacttctgacctcagatatgtgtgggttttcccctacatattaggcaattctctaattctct

SEQ ID NO: 884279 - DNA, 653 bp, Homo sapiens
caatgcaacccagaaaacattgttgagcattgtctataagtaaggttagggctaggcaccctgtgggatgctggttcaaaaagaacatccagaattccttgctaatgctgcaacatagtacgggacagaagtggagtaggaccagatggaaagtcagagtgaataagttgtttgtggtctggtaaagggctttgaaatgaagttgagtttttggatgaccactttaaatmactccaggactttgtcaaagttctgggattaagaaaactgcattagctgcagtgttaagggtgatttggagaaagttattgctagaggtgagcaggaatgaaaagacttaggttttaacttgggccttgtgttagccaaatggccccaaactgctggtgagaaaatttgtctaagtttttgtcatttaacagcaataaaaatattgatctcagttgttaatggaaaagaccataatgtaaaaagctatgatgacttgaaactgttccattacttttcatttcatttagttatgctttatgagacatgtcaaaaaaggaagcaacattgctttctagagaaatatttatttcctgaactgatgtcaccaaatgaagtcatatgggagggcttttcctccaaaaggaggactaatggtgacataa

SEQ ID NO: 884280 - DNA, 633 bp, Homo sapiens
gcaaccagggacaaatgacattaactggaagaaaataataggtccacagaaacagacagtgagagattaagaataaaggagtggtcaacaatgttagaggctccaagaagtcaaatactaagaggattgaacattgctaattggattttgctggtagataatttttgacaacataaacaagatcattttctgtgacatctgggggcataatccagatatcaatgattaaagaacaaatgggaagtataattacyagataaggagaaatggaagatgagacaaaaaaattacactactctttgtagaaacttggttgtaggaaaaaaaaaaagaattgtggagtggtagagagcaggtaacctcaggggtaagggagaaaaaaggcatatgcctggaaagccaggtattaatgtttggtcagggcatcctcttcccagcagagtgctggagacacacagtgtgatccatgtccttgtgcaacaaaatgagctggacaaatctaattacttttcttggtaatttgatctagaacttaggaaaaaaacgtaccattttccagtgaagaagaagtgaaatgatgccatggaattgttgataggctggaaaaataaagctgatgtgaggggaaagcaa

SEQ ID NO: 884281 - DNA, 641 bp, Homo sapiens
ttcaaaataatcatcttagaaaagctcagtgagctacaagaggataaagatagataactaaacaaaattagaaatagtacatgaaaaaaatgagttcaacaaagagacagtaaccataaaaacaaccaaacataaatcatgacgcaaaataacataattactgagataaaaaattccatagagaacttcaacagcagayttgataaagctgaagaaagaatcaaggagactgaaggtagatcatttgaatgaccagtcagaggaacgaacagcacagaaacagaaagaggaggaaagattacttttaaaaatagtgacagaaaacttcccaaatctgtagaggaaagggaacatccagatccataaaccccattgaatcccaaataaattaaatataaacacatctttaccgagacacattataatctctcaaaagtaaaagtgaaagataattttcaaagcagcaagagaaaagcaactagtcacatacaagataacaccaaaaggaaatttgtggattcctcagtagaaagcttgcaggccaagggagagtggaatgaaatagtcaaaatactgaaaaaaaaaatcccatcatccaagagtactattctaggcaaggcttttagaaatgaaacagaggt

SEQ ID NO: 884282 - DNA, 641 bp, Homo sapiens
ttcaaaataatcatcttagaaaagctcagtgagctacaagaggataaagatagataactaaacaaaattagaaatagtacatgaaaaaaatgagttcaacaaagagacagtaaccataaaaacaaccaaacataaatcatgacgcaaaataacataattactgagataaaaaattccatagagaacttcaacagcagatttgataaagctgaagaaagaatcaaggagactraaggtagatcatttgaatgaccagtcagaggaacgaacagcacagaaacagaaagaggaggaaagattacttttaaaaatagtgacagaaaacttcccaaatctgtagaggaaagggaacatccagatccataaaccccattgaatcccaaataaattaaatataaacacatctttaccgagacacattataatctctcaaaagtaaaagtgaaagataattttcaaagcagcaagagaaaagcaactagtcacatacaagataacaccaaaaggaaatttgtggattcctcagtagaaagcttgcaggccaagggagagtggaatgaaatagtcaaaatactgaaaaaaaaaatcccatcatccaagagtactattctaggcaaggcttttagaaatgaaacagaggt

SEQ ID NO: 884283 - DNA, 641 bp, Homo sapiens
ttcaaaataatcatcttagaaaagctcagtgagctacaagaggataaagatagataactaaacaaaattagaaatagtacatgaaaaaaatgagttcaacaaagagacagtaaccataaaaacaaccaaacataaatcatgacgcaaaataacataattactgagataaaaaattccatagagaacttcaacagcagatttgataaagctgaagaaagaatcaaggagactgaaggtagatcatttgaatgaccagtcagaggaacraacagcacagaaacagaaagaggaggaaagattacttttaaaaatagtgacagaaaacttcccaaatctgtagaggaaagggaacatccagatccataaaccccattgaatcccaaataaattaaatataaacacatctttaccgagacacattataatctctcaaaagtaaaagtgaaagataattttcaaagcagcaagagaaaagcaactagtcacatacaagataacaccaaaaggaaatttgtggattcctcagtagaaagcttgcaggccaagggagagtggaatgaaatagtcaaaatactgaaaaaaaaaatcccatcatccaagagtactattctaggcaaggcttttagaaatgaaacagaggt

SEQ ID NO: 884284 - DNA, 641 bp, Homo sapiens
ttcaaaataatcatcttagaaaagctcagtgagctacaagaggataaagatagataactaaacaaaattagaaatagtacatgaaaaaaatgagttcaacaaagagacagtaaccataaaaacaaccaaacataaatcatgacgcaaaataacataattactgagataaaaaattccatagagaacttcaacagcagatttgataaagctgaagaaagaatcaaggagactgaaggtagatcatttgaatgaccagtcagaggaacgaacagcacagaaacagaaagaggaggaaagattacttttaaaaatagtgacagaaaacttcccaaatctgtagaggaaagggaacatccagatccataaaccccattgaatcccaaataaattaaatataaacacatctttaccgagacacattataatctctcaaaagtaaaagygaaagataattttcaaagcagcaagagaaaagcaactagtcacatacaagataacaccaaaaggaaatttgtggattcctcagtagaaagcttgcaggccaagggagagtggaatgaaatagtcaaaatactgaaaaaaaaaatcccatcatccaagagtactattctaggcaaggcttttagaaatgaaacagaggt

SEQ ID NO: 884285 - DNA, 643 bp, Homo sapiens
tggtcctcaatcaccaatgccacccatcccccatcccgagcagcagctgtgtggtatggataatctctgcattttggggagggagagcacagcaaattgggaactttatattgacttcagtattgccctgtcacagcagataataaagccatgctaggctaagccagcacccatgcatggaggagcatttggacaaaccctagccagaggaggattgcccatcccagtggttggaattgagtttctcggcaagcgtcaccattgtgagctgaagtgctctggggccctaggtaccagtttagccacagcaggatagagcaacagcaggctcttsgggtccctgagtgcaggactaggtttatggacagcatttctggtcctgctctgggccagaagggagcccactgccctgaaaggtgaatcctaggcctggcagcactcaccataagctgatgggagagcccttgggctttaagagaacattggtggtggcctaggaaaactcccccaccttccccccactaccatggactggtgttggtggcagccacagggagaggctcctctgcctgtggaacagggaaggaagagcaggaaagactttgtattgtggtatgagtgccaacttagctgcagtagaata

SEQ ID NO: 884286 - DNA, 643 bp, Homo sapiens
tggtcctcaatcaccaatgccacccatcccccatcccgagcagcagctgtgtggtatggataatctctgcattttggggagggagagcacagcaaattgggaactttatattgacttcagtattgccctgtcacagcagataataaagccatgctaggctaagccagcacccatgcatggaggagcatttggacaaaccctagccagaggaggattgcccatcccagtggttggaattgagtttctcggcaagcgtcaccattgtgagctgaagtgctctggggccctaggtaccagtttagccacagcaggatagagcaacagcaggctcttcgggtccctgagtgcaggactaggtttrtggacagcatttctggtcctgctctgggccagaagggagcccactgccctgaaaggtgaatcctaggcctggcagcactcaccataagctgatgggagagcccttgggctttaagagaacattggtggtggcctaggaaaactcccccaccttccccccactaccatggactggtgttggtggcagccacagggagaggctcctctgcctgtggaacagggaaggaagagcaggaaagactttgtattgtggtatgagtgccaacttagctgcagtagaata

SEQ ID NO: 884287 - DNA, 566 bp, Homo sapiens
ctaataaattcagtaaatttacaggatataaaagtgaaataccaaaatcagtagtatttctatatgccaacagtgaacactctgaaagagaaatttaaaaagtgatctcatttacagtagtcacaaataaaattaaatacctaggaattagccaaagaagtaaaacgtctctaaaatgaaaactataaaacattgatgaaaggaaatgaaggggacaccaaaacatgaaaaagtattccatattcatggattgaaaataatcaatattgttaaaatgtccatactacccaaaacaatctaaagattcattgcaatccctatcaaaataccaatgayattattcataaaatggaaaaaaatcctaaaatttatatggaatcaaaaaagatccataatagtgaaagctaccctgagcaaaaataatacaactggaggaatcacattacctgacttcaaattatactacagagctatagttaccaaaactgcatggtagtggcataaaaccagatgtatagaccaatgaaacagtataaagaagcccgaaacaaatccacacacctata

SEQ ID NO: 884288 - DNA, 634 bp, Homo sapiens
ccacattgttctgtcttcttctgagtcttccaaactattccaacctctgcctgttatccaattccaaagttgcttccacatgttcaagtatcctttcagtaatgccccattctgctggtaccaatttactgtattagtctgttctcatgctgctgatgaagaaatacctgagaccgggtaatttataaagaaaaaaaggtttaatggattcacagttccacatggctggggaggcctcaaaatcatggtggaaggtgaaaggcatgtcttacatggcaacagaaaagagagagaatgagggtcaagtgaagtggtttctccttataaaaccatcagatctcatgagacttattcactaccatgagaacagtatgagggaaaccatcccaatgattcagttatcaccaataggtccctcccacagcatgtgggaattatgggagctacaattcaagatgagatttgggtgggaacacagccaaaccatatcactactttaactgcttatggttttatttattgttattaataacaatagaactgttgcacatatgtacctttgtgtggatgtgttgaggagaaggttgaaggaatgaagggataagttgagcratgatcctgacatccaggaaaa

SEQ ID NO: 884289 - DNA, 628 bp, Homo sapiens
atgtgcttgctggattaaagattactttacaaaattaaagggcacattttttctttagtagtagtcaaatacaaaaatgaaatttaaaaagatatttctctcaataacaaaaaagttatccgaagttaagatgccaaagaatatacaagttttctagaagatgacctgaacaaatttagaygcattttatagtcttggatttgaggacttaatattacaaagataccaattcactccacatttatttataaattcaatataaacccaataaaacttgaatatgaatctttgaagaaactaaaatcaccttattctaacatctcagaaaaaggactatagacagaagtgccctaagaattaagtgccataagaaatgccctaccatttataagaaatactaaacatagtaataaaagtaatttcccagaccatagagctctgaaaacagacccatgtacaaacagcaaagacagccctgcaaaccaacgaggaaaggacagataatttagtgaatggtgtgaagaaaactggcttgcaacacatcaaataataaaactaaagcccttttaacagtaaatgcaaaaggaatattatgaatgaattcagaaccaaatgttaaaatgaaaac

SEQ ID NO: 884290 - DNA, 638 bp, Homo sapiens
aatggcaattagacctacatattattcaccagtcttagatatatttcagatttccaaattggcatgagaaaatcaattcatcaatttgctagcatttttaatttatggacaattattttcttaaaatggtatgtaatcaaaatactgagttaaaaattctgaaagagtcatttaagaacaacaacaaacaacaacagcaacaacattttatcagcatggcaaggaaatgacaactccatttcaattaaaggatcattgtccattctcccccagttcccattagtgaggaatggggttcataatgacagagtgaaagtgaggcattgagggagaaggcaaaagatcacaaaagaaagcaggaatacattgatttctaaaccaaatccagactactaagaacattggttttctcagggcttactrtcattacatatactacgcaaagtcaccttcagaggttgtaggcctccagaaaattgctctgtgtgttccgttgcctactgaaattcccaagtattttgaacgagtgatatcagattaaaataaagatcgagctcagagttgaatagaaattatcccttaaaatggcagcctaaacagaagatgtgagctataaaagagggagtactgatctttgt

SEQ ID NO: 884291 - DNA, 659 bp, Homo sapiens
tcgggataaatactaggtgaggagttgtattgggggaattaggattggtatgaggtagtctggagagggggtgaaatttatggccaaatgaatctggatatagggattaggcagggtgatgggctgaactggagctagtggtagtaaagttaggttgtggttgtcttggggttaaacatggatagaccttgggtaragtagggttggagtttggagttaagatggaaacagagtttaggctcaatttgaacaaaagtgtgagtgatcagaacttgggattggtctgtagttgtgtggaacttgaatctgtgttaggcttaaatggagccacgtaatcaggtagatcggggtctattaaaatttattctgttccctcctccaaatgaaaatatccagaggcctttctccataacttcccaaattccttgggtgagaacttcataggcactgaatggttcaaatgttagaatttggaagttggctagaggaagaaaaaggctggtatgatcagagagggcacctcttgaagctgagcatttccacaagaataccctgagagtagtttctcacatccctccactatttcaaagtcaacacaatcatctttctgtccttctcgtctccctcatccagactctcttttttcttgcgctgctcct

SEQ ID NO: 884292 - DNA, 606 bp, Homo sapiens
aagaaaatatttcaagctgaaaggaaaggatgttaataactaaaatgaaaacaggtgcaagtatgaaactcactggtaaaagtaagtacacagttaaattcagaatactctaatactgtaaagatgataagtcactaatatattgagtataaaacaaaatacaaaactattaataataagttacaataatctgataaggkatacacacaatataaacagtaaattgtgacatcagaaacataaattatcaggagagatacaataaaaatgtagaatcatattttgcaaccaaagttaagtggttatcagctttaaacagccggttataacaacatatgttttgtgtaacccttatagtaatcacaaagcaaaaactgacagtagatacacaaaggataagaagaaaggaatcaaagcattctaatatagaaaataatctaatcacaaaggaagatagcaaaagaggaagaaaggaacaaaggatgtataaaataaccagaaaagaatgaacaaaatggcaaaagtaaatccttacctatcaatacttactttgaatgtaaatggattcagtttgccaattgaaggagtggctgaattgattttttt

SEQ ID NO: 884293 - DNA, 646 bp, Homo sapiens
tattgcccaggctggagtgtagtagcataatcgcagatcactgcagccttgatctgctgggcctaagtgatcctcgcacctcagccatctgaacagctgagactacaagcacgtgccaccacacctggctaattttgtttatttatttattttaatagagatgagatctcactatgttctgcaggctggtcttgaactcctgagctcgagtaattttcctgctttggcctcccaaagtgctgggattacaggcatgaaccaccatgcctggactccttcagtgctttaaatatgttatgccactctctcctggcataagcctataaggtttctactgaaaagtctgctgccagacatattggagctccattgtgtgttatttgtttattttctcttattggttttagaatgttttctttagccttgatctwtggaagttttattattatatgccttgaggtagtcttctttggggtaaatctacttagtgttctataaccatcttgtacttgcacattgatatcttcctctgggtttgggaagttctctgttattttcccttttaataaactctctacccctatctctctttctctacctcctctttaagacaactcttaaatttgcccttttgaagctattttct

SEQ ID NO: 884294 - DNA, 420 bp, Homo sapiens
ccctcctgttctaattcactgcccacagccctgctgataaaagcaaagctcatctctgccgtgctgcagggaaccctatttccttcccctgcagctcagccacctcctcctctcaggtctgccagccatgaaacttctttacctgtttcttgccatccttctggccatagaagaaccagtgatatcaggtaacgtgarcctctctcgggggtctgggttcctggtcatgggcttcccgtctttcccttccctctcactgtgggcatcatctgaagcctttccttctctcctgcagcttcgggaggtttgcccaggatcatctcaagttaatatctctctctgattcttttttgccagagtggtgggatgatagatgtttggagcatctggtgcttgagggccagggtggtatcctggtgg

SEQ ID NO: 884295 - DNA, 660 bp, Homo sapiens
cgtcacaaactgtcactcttaagaagttatgacacgtattatgttattgtgtaattatttgaattattgtcccctttccatcaatcccccaaacacacacatattaggtggaaatccttaggggctgagatgatgttttatttacatctgcatgcctgatgttaagcccagtgctgggcacgaatgcgatttagtgagtgtttcttgaayatgaataatgaattcaccagtgaaagcatgagtggatctggtgggggcacaaaaggctgactccaggttccaggaatctgggtggagaaacttctgggctggagggagcagaggaccactgtgttaggtctacgtggttctggctggcagggttagcaaggatgcagaggagtttctgggtcttgctcaaatgataatttaaaacaacaataataattaacattcatttagttcttactatgtgtcagtcccttattgccttctatgtattcagccactaatcctcaaaattctaggggttagatatttttccggtctatactatacatatgagaaaaagggtagaacagggaggtgcagaaacttgccccaggatacacagcaagtaaaatgggaactgggattggtcacctagggattcttgttttttagattttgtttttttaatct

SEQ ID NO: 884296 - DNA, 627 bp, Homo sapiens
agcctaagcaacagagcaagacttgtctaaaaaaaaaaaaaaaagtgtccacttttcatctgccaggtatttgttccaaattacctattttattattgctagaagcaacagtatacaaaaatctttatttagtccattgtatttttaaatgttcctgtcattttattgaaaatttcacctattatcaggttgttcctcttcaatttataaacgatagggattttcaaaaacatttccttttggggagaagttgttaaataaagaaacacatggtcttaaagaaaaaaatccccaactcctaatagacctggaaacaaccaaaatggccctcagcagacacatggttaaatagactgtactacatttatactgtggaatattactcagaagtaaaaggaatgaactatagatacacacaacttgggtkgctctcagttctgttgattgtcttttttttcattaaagttaagattttcctggttctcagtatgatgagtaatttttgctggaacgcggatgtttttgatattattatgttatgagatgctggatcatatttcaatgatctttgttggcttgtctcctctgatacagctctggtgaggacagtgggatgctgcctggata

SEQ ID NO: 884297 - DNA, 617 bp, Homo sapiens
cccaggctagatggtgaccttctcttgatctcatgtacctatgctcctgtgttcaactggtagtgctcacagatattccccttgtccaatatcaggactcaaatttagaccttcagagagtgacaggcatctcttgcatgcagactagcgttggccttcacaagtagctgctcttttgcaccaaatatttgctgtcttactttgcttatgtaatctctggcacgacacacatacagaaagaaagacagcattttagtaataattagcctcgattagtatgctttagagtctttcagaattactctacaatattgtaaaagagatttcattttatggtgttcaggtaaagaaagtagcttatacttccatttggaggcctattgtaactatttagatagatttttatatgtgtgaaatgtggtctagataaatmtatttcaatgattctgtgcatgttgttaggaagggcagaaccatgcccacgtgtaaatatgtatgcaatgactgtctgcagaaggacttgtatataccttgcctcttgatggtatttgggccacactgtacaaaacaatgccttcacagccttcactgtgaaatattaatggttaaagctctgc

SEQ ID NO: 884298 - DNA, 609 bp, Homo sapiens
gtccgccaggacagtactttacagtttacaacaccccgtcgcgttccattgcctcacctgatccagggaggcaagggttaatggttatgcagtgtggatggggaaactgaggctccaagcagcattgagacgcctcctcacccagcccggtctgcctgttgctctccaartcaggacttagggattcagctcccaccgggtcctgacccccaatgccccggggcccctgagtggcggctgcggtgactctgatactcaccctcggccatggtcgggcgggggcggtggctccttccactggcggcgagaccctccaagtgcgaccactggcggctggcactgccgaggcggagagcggcgctaacttatagcccgctttggggcgggccgggggcggggccccgcgggaaggcggcgacctgggaggccacccattgcccagtcccgggcccacgccgccagcgctggggctcacccaggggaccggagcccgagggagggacggcggccggacgagggcgccccctgggggagcggacagggacacacaactagcccaggatacagacacacctggacccacagactcagaccttggagaacagacac

SEQ ID NO: 884299 - DNA, 608 bp, Homo sapiens
tctttccaccaagcatcttcgtgaggaggatatccttaagctccagggagggaagggtacctgaaggctgagccgtttaaggccagctgcttctgctgagtgtggagcaaggctgtctctcagtctgtttagcctctgaaaggggacccagctgtgctgtggcaggttcaggtcaaacacattcttttcatctcagcacccctgcagaggtagggcacaaggggagtcaaaacctctgcaatttgttcaagtcaagcaacaattcacgttgggcaattgtgggataaatgaattcatrtcatttattctctctccctcacaaaggaggttattaaattttatattctgtttattctacatggaaaaaaaatcagaaaaaattttgattgctttgtttatgcctttctttgggttggagacccccaggtgaatacaacaatgccaatgttcaggatattagagaatctccacctttgtcatctatgatcattttccaaggcatctagctttcataaaatgcagcttccactcaacctattccagaatagaatgcaccaccttccaccttgattattgagaaggcatttgagaagtcctaagataaattg

SEQ ID NO: 884300 - DNA, 638 bp, Homo sapiens
ttggagaaaggcacagaccacagacagtttctatgaatccatgtttttcatttcttcttcttctggacatgtccttaaccttggtaaaataaacttctaaattgattgacacctgtctcagatactgtttcgttttacaccagcatgtaaaatgtactccatggagacacggcgctatagtgtgggtggaagtgagcttgtggcaatgctactgtcttccatggcctgtgtgggatgtgcaggggttcggaagttcctccaaatctcagtgagggaatggggaagggtctggcacaagcctgtgrttgggacaaggaggcagcctgtagggcaccttttcacccgtgagtgaagaggctgcaactgtgatgtacagcagaggtgagcccctggacagcccagccaccagtaggaccagtcaatcttgctacctggtcaccagtccaggtagcaggagagtccaatgaaagcaaggcagggaggagaaaggaacaagaagatgcttcttatctccttcaccctgaggtcccacgagccatgcttgtctttcctcccacactccatcttgggaataagtgaaggtggagaggagaggagggagtaggtggtggttaaatctgaaagactgggtttataaa

SEQ ID NO: 884301 - DNA, 655 bp, Homo sapiens
aatgtcatgggcactaaaggcatccagctcagaggagctctaccttttcagagtggtcatggagacttttcaaaatggtagggctggaactggcctttggagaatgatctggagtctcttaggtagaaaagacacacagagagataaagaccaatcagttcagctcctagagtgaccaggttctgatcatttaatagctacctgtggagagagtctccatttcccttccttacagtgttaggacttctgtgaattttgaaaagatargcctgattaaaaaacagcaaagtatcagtttattttggcctgtgcccacttcagcaaagtgaatattgcatttgaaatactgcaagccatgagctggacttatccctgagcagaagaaggttggtgtttgttacatctttttatcatagctcggttgcagcttgcttggttctcacttagtgcctaccgtatgccacagttagggtctcttgagacacaacaagagtagaaaatagaagcattatacaaataaatcaaacaaaaaaatgtgtttaatgccaactgcataagttatctggctgcatgcccaaattcccaacattactttggagtgacagatactgccacaagaacaaagtgtttttgccctggtttcccattctcattt

SEQ ID NO: 884302 - DNA, 611 bp, Homo sapiens
aggtcttttcactcatgaaaaacactctacctcaccagtagtcagggaaatgcaagttaagacaataagctccattccataggagcatccaactgacagaaagtctgatagtactaagagtgggcaaagatatggggaaagggtaacacccagacactgcagatggaaatgcagttggggacaactggattggagtaaggaagagcctgttcgtaccctgccaagtgacaagtctgagtatacaccctacagcagcctttgcctgtgtgcacaagaagatatgcaccatacttcatccactcatctgyttattcaacagacacttattgtgtcaggtattacagggcccacgcacccgatcgttgtagcgttgtttgaaaataacctaatttttgttaatggcaatgaggaaatagtgtagtctgttcataaattgaaaagtccatacagcaaatgaaaataatgaagtggtctggaacataggtgtatctctaaaacataagactaagtggtaagctatgggaagaaacccagactatgttactctatgggtacatttagaaaacacaggaagcgatgccactgtgcctggccagcaacatcagcatcac

SEQ ID NO: 884303 - DNA, 708 bp, Homo sapiens
tcataccaaccgttatttgtgcccattgcttttaggcgagtcagggagttaaacagcagcaacactaaaaagtttctggaagaaagaaagagagtaagtattttattatatttttggcattcttcctttaaaaaactataaacaataacatgcttagccaccagayctctagctaatttgtttaatttgatttttctgtacattaaacattccagcttctctgctccctgaaagctaaaataatgtctcactaaaatctttaaggtaatgatttggcaccattttatacagaaaatgaagccaggtttagtcatgcgtaagtcctctattattttctaagattttagcaggaaagatcttcccagaaataattatgagtttaaactctccaaattttgagatgattttttaaaaaattattatctctttcacttaaattataaagttacaagtcatctctcatccctgttttaagattgtaacccaaagttcaatcagaattttttttttttttttttttgcagcttgccatgaagcagtccaaagaaatggatcagttgaaaaaagtccagcttgaacatctagaattcctagagaaacagaatgagcaggtattttacctaaaatacgtaaaaacatgcaggcagctagccagctttgggatacacatgccatggcccacagtgaccagtggcttgcatattgtaa

SEQ ID NO: 884304 - DNA, 577 bp, Homo sapiens
gctacacagtatatctcatctgtcttgacatgtaccatttcaaacattaacgactccattactgtcacacactcgagtctcaaaaattgatttttatcatcaatcctatcatttaataaagagaggtaaaaggttttgcttaaaggccaggttctccacttactgccacagaagagaggcacagtctgggaatgacaggcgttggttgtttgtttygtttcttttttttctgttgagatcaactaggggaaagtttgtcactgaggggtgtgtacatgttttatccttagctttttgcttttctgtatatggttttgcattcatttttcaaattcacttcaatattcatttattttcttcgttttgtatgtatgactcaattttgacattactatttttgtacaaacagcttttgaaatcctgtcatgcagtgtcccaaacgcaaggtaggaccgaaactctgataagcaagacgttgctttccttctcgactacgtccgtattctctgtgcagtctccatttatgagtcacatctggtcataactaatatctgaagggtttggatttaaaagcttg

SEQ ID NO: 884305 - DNA, 658 bp, Homo sapiens
cagggagccgagatcacgccactgcactccagccagggtgacagagtgaagctgtgtctcaaaacaaaagcctggatgcagtggatcgtgtctgtaattgcagcaatttgggaggctgaggtgggcagattacttgagatcaggagttcgagaccagcctggccaacatggtgaaacccccatgtctaccaaaaaatacaaaaattagccaggctttgtggcatgacctgcaatcccagcttcttggggaggctgagatgggagaatcgcttgaacctggaaggtggaggttgcagtgagtgsagaaccactgcactccagcctggacaacagagtgagaccttgtcaaataaaaccaaaaaacaaaaaaccaacaaacagaagaaatagagagaaaacaaattataaagcaaaataatagacttaagcttagcattaagtataagtggtcttaatataattatgaggtagagattggctgattagataaaaaacatgaaccagctatatgatgtttataagaaactctcttaaacttcaacaacataagtggacttaagataaaagcatgggaaagttatatcatgatgataactatttttaaaagagaaagtggctatattaatatcagataaggtagattttagaacaaagaaag

SEQ ID NO: 884306 - DNA, 658 bp, Homo sapiens
cagggagccgagatcacgccactgcactccagccagggtgacagagtgaagctgtgtctcaaaacaaaagcctggatgcagtggatcgtgtctgtaattgcagcaatttgggaggctgaggtgggcagattacttgagatcaggagttcgagaccagcctggccaacatggtgaaacccccatgtctaccaaaaaatacaaaaattagccaggctttgtggcatgacctgcaatcccagcttcttggggaggctgagatgggagaatcgcttgaacctggaaggtggaggttgcagtgagtggagaaccactgcactccagcctggacaacagagtgagaccttgtcaaataaaaccaaaaaacaraaaaccaacaaacagaagaaatagagagaaaacaaattataaagcaaaataatagacttaagcttagcattaagtataagtggtcttaatataattatgaggtagagattggctgattagataaaaaacatgaaccagctatatgatgtttataagaaactctcttaaacttcaacaacataagtggacttaagataaaagcatgggaaagttatatcatgatgataactatttttaaaagagaaagtggctatattaatatcagataaggtagattttagaacaaagaaag

SEQ ID NO: 884307 - DNA, 658 bp, Homo sapiens
cagggagccgagatcacgccactgcactccagccagggtgacagagtgaagctgtgtctcaaaacaaaagcctggatgcagtggatcgtgtctgtaattgcagcaatttgggaggctgaggtgggcagattacttgagatcaggagttcgagaccagcctggccaacatggtgaaacccccatgtctaccaaaaaatacaaaaattagccaggctttgtggcatgacctgcaatcccagcttcttggggaggctgagatgggagaatcgcttgaacctggaaggtggaggttgcagtgagtggagaaccactgcactccagcctggacaacagagtgagaccttgtcaaataaaaccaaaaaacaaaaaaccaacaaacagaagaaatagagagaaaacaaattataaagcaaaataatagacttaagcttagcattaagtataagtggtcttaatataattatgaggtagagattggctgattagataaaaaacatgaaccarctatatgatgtttataagaaactctcttaaacttcaacaacataagtggacttaagataaaagcatgggaaagttatatcatgatgataactatttttaaaagagaaagtggctatattaatatcagataaggtagattttagaacaaagaaag

SEQ ID NO: 884308 - DNA, 566 bp, Homo sapiens
acaaaaggctgtttgttttttaaaaaactataaaattggtaaacttcagcaacagtgacaaaagtaaaaagagggaacacataaaccaccaaaattaaaaataaaacggaggatgccactacagatcctgcagctagcagcaggatattacggmcttcacactcaaagtcaacagcgtggaataaacagacaaacttctcaaaaaccacaaactactaaagcctaattaagaagaaatggataatgggaatggttccataatgattcaagaaataaatttgtagtttaaaaggttctgaataaaatttcttggcctagatcatttcactggagaactagaccaaacacttaaagaagaattcatctaccaagtgtatacaatctcttccagaaaactgaatatactccacctgattttatgaagccaatattacttgaacatgaaaacaagaaaaaaatgatcaaatgaaaaaaagaaaactacagacaaatatctctcaatgaatttaaacaaaaattctcagtcgaattaatatttgattctacagggcagttctacagggcaa

SEQ ID NO: 884309 - DNA, 574 bp, Homo sapiens
agtcaaatgcttttggcgcttaatgagtgttaatcagcaatggtagtaatttccgtacattatttcatgtcacagagcttgtgcatggaatattggcttcttgccctcattgtctttggaatgtggaaactattagaaatcattgctcgtgcaaggaaaacctaccatgatgttttaggaatttcaggaggctatgaataatataggttgagtaaggaaatgaataatcatgtggctctttatagtttttgtttttctgagtttgaagttacaggcttggcatgttatcattctcatagcatwtttttgtgactaaaagctgtttacttagtagtcacaggcagctgggggatacttctagttgttttttcttgctgaaaggaaacataggaatgctataatatagtgatctcttaatgatagagaagttcaccaaacacttatctgatgcacacatcttttgaagtccagattcaaaaaatctggagaacatagactatcaatcagaactttttattgcagcttacttggctggcaatgtcttaatacctgaagtcacacaactgaggtctac

SEQ ID NO: 884310 - DNA, 638 bp, Homo sapiens
atgtatatctgaagtgcgtattaataaaattatgctaaaaataaaatctaaaatgtaaatgtctaaaataagtggtttacccctaaccagtcagttatcattctcaaattacgttaaaacttcacatatttcccttccaattgcagtggataaatgaaataaaacaattttatttcaatttagttttaaaagaaagttctaagcaaagtgaagtgaaaaaacacgttatctaaaatattaaaaattcattaattgyaatattttgataaaggcagacccttttattgatttattattcgcccactctctccaatatacaactatttggaagcataagttgtagataaacaatagcatatgcagttgctaaatgccagtaaaacagtcatgtcatactatttttttttttttttttttttttttgagacagagtctcactctgtcacccaggctggagtgcagtggcatgatcttggctcactgcaagctctgcctcccgggttcacgcatgtcatactatttttaatgcttgtatcttcttacatcatttataatattttcagtatttctttgggaggcatatagttatttacaggctatctaaaaagttaaaggcctgtggttctcagaatcccatg

SEQ ID NO: 884311 - DNA, 634 bp, Homo sapiens
acacaaaactcttaagaaaatgaccagtgaaaagaaaaagcacaagtcaacaaaattttgaattatacagcataaatgaaaagagaagagcaggaatgaatcaaaaatttcatcaaacttgctgaaaatttagaggacctgagtcaatttctatgaaaaatatacctttcagaaattgactcaaaaatcaagaaaaaaacccttgatctaaacctagtatagaaatgcaagccactaaaaaattctttgcccatgccaccctccgtagcccagcagtaaatgtgacgatatgtacacaaacatcagttttaaataattatgcaggtaataatacttatgcaggcatgatccaaaattgacaaattgaacctcataaaaataaaaaaattttgccrtgttgagaactctgttaagagaatgaaaagataagctatggactgtgagaaaatatttgcaaagcacgtatctgactaagagtttgaatcaacagtatataaatgactcataaaccgtatcaataagaaattcaaatatgaaatggacagaaaacatgagcagttatttcacaaagaggaaatacagaggaaatacagtgcatgaaaaatattcaaccctattgatcactagggaaata

SEQ ID NO: 884312 - DNA, 615 bp, Homo sapiens
agttacaaaacttcagttaaataagaagaatatttttaagagctctattctacaacatggaggtatagttcatcacaatgtattatattcttgaaaaatgctaagagagtagattttaaatatgcttattacaaaaataacaactatgtaaggtaatgtgcatattaattagcttaatttagctatcctacaatgtccatatattttaaaacatcctgttgtacatagtatgtatatacaattttatctgtcaaattttaaaaagaaaaaagtgttttaaaattttctaccaaattatcttggakgattgtatgtagacatcctttgaatagataaagtataaattccagcagttcatccttctagaggctttaataggacagcttcttattaactatgcaaatgagaggcaatgtctctcttattcacaatgtttctacatgtcaaatttgtacggggaaaaaaaatctactcaactattgggataatacagtttatcctctccatctcttgccccagaaatctccagatatctgaaacaaaatgacaaaaattgttttctatttttctattttgcttgaacaatggcctcattctcgactttgtgtgtgttga

SEQ ID NO: 884313 - DNA, 621 bp, Homo sapiens
agttattgaaaataaagatgtaatatttttcttaatccaactgcatggcactaggtgaggagcccctgattttttcacctgcgcttcctgaccccacaagtctagattaaactgtttctctgtcctcaaggcatgcagaaccactcctttcttaccacatagcaccctagattggaaccatttgtttatcatctaagaactgtcactagatgttaagctttatgaagrcagatttatctggtcatgatgtccttatgttcagcactactgaaattcaggagaaggttccccatgtagaactgtggcattacattgaacctttatttggtctgatcatgttttaaaagtatacataatcttagccctcagttccacacatcatggcattttaaaatagtttttcacatttaaatcacagattctgtttgtaaagacatgttgaaaatatcttagactgcctttagacgtttatgtaaataatgtaaatgatgtcagctcgacgacaatatttattatcaactcattgataacaacaatctggattatattcactaattcatttaatcaccatcaatttggaatatttgccccttggatgtgacattactgaaggtgagactt

SEQ ID NO: 884314 - DNA, 541 bp, Homo sapiens
ttgcaagagtgattctgacccttgggccatggagctctgaagctgcatggttagggaagcactggccttctcctggtgttatcagggaccaggatatgatagcaaaatgatgtggcagaaactgcgcccctcttctaccagcttagtagtgatgactggcagtggagggaggcacaagttcctgtcctgctttcatgattccagaagttgaaattgcaggtggattaygtggtgaactagcagagaggtgttcttgttagtaagctagcaacaacactggtgttcttggttcttgaagcataaacctctcctctggcatattgagggtgggaggaggaagagttggggttcaagcttcaatgttgctcagtattgattggcttaaagattgctcagagtgggtttcccacagaacattgcagaaggaaaattccctttctgagaagccaggctgcaggggtcagtcttggacaagttagcccctatctctcaactcttaacttatcacttcctaaattttgtctcctttaaagatagggat

SEQ ID NO: 884315 - DNA, 642 bp, Homo sapiens
aggctggcactacatgcttgtggctctacagtgctggggtttgggggcagctccacattcatagcttcatttggcattgccttagttgggattcttcatcatcccttgaaatctaagtggaaaaagtcatacctccaacactcttgctctctgtgctcctgcagaattagcaccatgtggatgctaccaaggctcaccacttgtaccctccagagtggcagcctgagctgcacctgggcttgcttgagccacatttggagtgcccaaaaggcatggtgctagaatgtggaaagctgagctccttggcrgcaattgcagtaagccctgaggtccctgggttccctggatccatgtgtttaaatcattccgcccttaagtccctaacactgtgggcctgtgatggaaaggacaacctgaagacctctaaaatgcccttggggccattctcccattgtcttgatgaataacactttgctttcttctatccattctaatctcaaatggtcacttgtccacactctttgttttctttcctaaacactctttttcactcttcacatatggctaggctgagaatttcccaaatctttacgtatggtttcccttttaattatagattccatctttaaactatttctctct

SEQ ID NO: 884316 - DNA, 678 bp, Homo sapiens
ttaaaaatatgattgttaaaggacttttccattgaaatccattacaattttttacaacagtagcaatgcagcatgagagctacatttgtgtgggtaactgaatgagtaaggtatagatcacagcctatacttcctatagtttatcaaatatatacaacattgattttaaaaaatacgattgttaaatgacttttccattgaaattcattatatttttttacgacaggaacaatgcaacatgagagctacatttgtgtgggtaactgtatgaaatgaacttacttttcccaccttattcctaagactaagaaagcaaaactaattccttccattgatcaccaggatgcccatgaaaattggaaacctcaaatgatctttggtaactattctgcctttctctaaataaacagccttcccagtagcccraaggccctaggttttatagagcatttgaagactcaagttaatacttgtgggtatgtcttactttgtttgtcattattcttatagtgagagttctgcagtgataatttggagggcagaggcagcttataaacaatggtttagggcctttttcatgtttgtggacctgttttcattgaccaaagaagattatctctggagttgaaccagatgagtttaaatccttattttttcatcccgctatgagatcaggtt

SEQ ID NO: 884317 - DNA, 604 bp, Homo sapiens
tcccatgagtatatttatgggaaaaaactctacatcaaggtgttgtctgctacccacatttcctcttctctaaccagctgcatctgaaaatttttctgtatttgcatctcctcacatggactgtgtaacaaatccttagtctctatcttccacgaagccacttgctgccttttttgctgatttctcatgggcgagaattaggttgaatcaatacctagctgcaagggggtctgattgagtcactaaaagtgagtattccatttcatgacatgaacatctagttgcaaggttgtctagaaaatggaktattaaacattgccttctagcttaagtggtctagcaatataattcttattaaagagctatatacagaaatttcttaatcacagcagtgtttgtcctctaagatcctgtctccattttcagaaagaaagtgcttctcttcaaatgtgctacagcaatattaagagcttgtgaggcacacagtgaagagaaagtctctagtaatttttctgatctcttctcatgataggtgggattttaatggctcaaagtttctaaaattattcttctccctgtgttaaaaaatgcataataaccaaat

SEQ ID NO: 884318 - DNA, 646 bp, Homo sapiens
cagagtccagggatgctgctcaacaccacacacacaggacagctgcccacaataaaggttagcttgtacaaaatatcaatagtgataaggctgagaaatcttttcctgcataatttttaaacatattttgttaaattcaacatatctactgccacacacaacttcactaacttatttttttctttcatctacatttttaagtgattagcattctcagcaaaaccagaagtaacagttttagaagaaacaattatttttcattaagataatgcaagtagctaggcacggtggctcacgcctgtaatcccagcactttgggaggacaaggcaggyggatcacgaggtcaggggatcgaggccatcctggctaacacggagaaaccctgtctctactaaaaatacaaaaaattagctgggtgtggtggcacgcgcctgtagtcccagctactcaggaggctgaggcaagagaatcacttgaacctgggaggcagaggttgcagtgagctgagattgtgccattgcactccaggctgggtgacagagtgagactctgccaaaaaaaaaaaaaaaaagataatgcaagtaaagttgatctgaattcttagctgaactcaaagtgggtagcattggaattgatgtgatggat

SEQ ID NO: 884319 - DNA, 681 bp, Homo sapiens
tggaacatttgagcttattctggatctttcagttaccatttattgacttcctcctggcatattatcgtcttaaaggattatacagtggagaaggcaccattctagcccaggacttctgttttgttgtgtcaatctttctaatcttgggcaaatcataggggctgagtttacacagctgttgattagacatagagtcacctactctgctgagttcacaggatgattgtgagaattaaatgttataaactatwtgctttgggaaaaagtgcaaagtgcttcagagtacaatgattttactccattggaaagtctccccacaggtctttaaaagctttcattttttcaggccatatgttgtatggagagtaccaacagaaatgacaacattcacttccacttaagagtctatttactccattcaaagttgcccaaaggagctctacttccatcagaaattaatgagccagatatatgaagaggtttgttgcttattttgtgaaaattaatagggctatggttagtgtagggctatggttagtgtagggctatggttagtgtagggctatggtttgtgtagggctatggtagctattagaacaacagctgcagtggaaaaaaatctttgtatcgcaacagtcaattatgttttgatttaaaagcaaagcaggcataagtctgggt

SEQ ID NO: 884320 - DNA, 644 bp, Homo sapiens
gcagaaatttcacaggtaggaattctagtgaaattgatagtgtggaaatgttctattttcttctatcttattttcattttcagtctcctatcctacttcccacctcccaatttctggttccaatacacttcttattttacctcctagttctgtaatatcatcttcctcacctccataaatactgttcccattctttttgctgaatgaaaaatgagtattaatggcaycaaccattagctgacaacatcgatgatttcaaaataaactcatcaggtgtgagatttcattatttaaaataattatttattttgaaaacttttaaatctacagaaaggttgcacaagtggtgaaatgcaccaacttttgccacatttgatttacacctttctctctctctctatttctttctctctttctttctgtctctttctgttagagtctatttctcacgttaaaaatattcagtgcatcctgatcagagagaaactgtgattttatttttattcattcatgttaatgatgattatactccctgcaatagatttaggaatgaagcatacccctcaccttctccctcaacactccaatttcctgtgactcccaggttctcagaaagagaagcttaaatctcattgaaatacttc

SEQ ID NO: 884321 - DNA, 648 bp, Homo sapiens
gtcatccgactcctttctggatttgtcatggttcttgacaagtcactacttcaaccttctattaaatgtgtgcttcgtcattcgtttggtgtcctttttacatggattctttaaattttcatggaatcttacctgactttcgaggaaataatttgtgactctcaactcaaagcttccctttctccatcttccycaacctatgttctttcaacatatatctatttagtgcttatcatttgccagatactgggctaggtgcaggaaatacagagctcccaaatttttaccttccaaaaatgacctacaaatcttcatcatcaattattgtttctcccactagaagacgagcaaataatcttgatgacaggaggcatcttgtttttgttcacttatttgtttccacttctcctgtgactggcatatagtaggtattcagtaactttgaatgaatgaatgagtaaacctggacattggtatttgtattaatcatagataaattatagctgttttcttgagaaaaggacaatttattagaatcatcagcctgtatgaaacatggaaaatacctgggcaaaagatagactcaatttacagtagtcgatgctgttctcttccttctcttaagtaactgactttcttctaagtgaa

SEQ ID NO: 884322 - DNA, 596 bp, Homo sapiens
ggagcacaattgtttttgaaatcaagagagcccaagaaatcttagggaagtgctggctgatgatgataatactggagtgtctgatgggcaggtggaggtcccactcagcttcgtaataggtgaagacagccagaggggtgaggaagaaagaagggtctgctgcttgccctttcccaggaagcccagttgaaaacctgagggatggagctgctacacttgtttcctaacatcatctgttttttttttcttgctgctgtgaattgctttctagttctcaagagcataatgyaatatcaaccattttgactagagctttgtccttgggagggagttttcacatgaacaggaggcagcagaaagccaggaaaaacagcattgacacgttaggtccattacaccccagggaaaactttcccacagcaaggtcactagaggcagcctctacacacaatgactcctgggcagaattctgcccttggatagatagggaatgaccttggcaaatgcagaagccatttggatccattttcagaccatcaaatttggcttgagagaagtagaattaaaaataaaaatcaattaacactcttagtgtc

SEQ ID NO: 884323 - DNA, 596 bp, Homo sapiens
ggagcacaattgtttttgaaatcaagagagcccaagaaatcttagggaagtgctggctgatgatgataatactggagtgtctgatgggcaggtggaggtcccactcagcttcgtaataggtgaagacagccagaggggtgaggaagaaagaagggtctgctgcttgccctttcccaggaagcccagttgaaaacctgagggatggagctgctacacttgtttcctaacatcatctgttttttttttcttgctgctgtgaattgctttctagttctcaagagcataatgcaatatcaaccattttgactagagctttgtccttgggagggagttttcacatgaacaggaggcagcagaaagccaggaaaaacagcattgacacgttaggtccattacaccccagggaaaamtttcccacagcaaggtcactagaggcagcctctacacacaatgactcctgggcagaattctgcccttggatagatagggaatgaccttggcaaatgcagaagccatttggatccattttcagaccatcaaatttggcttgagagaagtagaattaaaaataaaaatcaattaacactcttagtgtc

SEQ ID NO: 884324 - DNA, 699 bp, Homo sapiens
ttacagagaaacagagagctaggatttgtatcactatctttctgattcctgatagggcctctggtgattaggaaggttgagagcttgcctggtctcctctatctgtaacacaacaacagtgcgtttttttggcttgaaatggtcataccattctgagtttctgcttcaagttgtaagagtgcttagagattatctaggacagtgatgctcaaagcgtggtctttagaccagtggcatcagcaccacctgggaatttgttagaaacgcaaattccygggttctatgctagaactagattcagaagctctcagagtttttgtgttttaacacggtcacatatgtattttttccttgagatggagtcttgctctgttgcccaggctcactgcaacctctgtctcccgggttcaagtgattctcctgcctcaacctcccaagtagctgggactacaggcatgtgccaccatgcctcactaatttttgtatttttaaaaataggcactgggtttcaccatgttggccaggctggtctcaaactcctgacttcaactgatccacctgcctcggcctcccaaagtgctgggattacaggcgtgagccaccgcacccagttggtcatatgtgttttaacaagccctccaggtgattctgatgcatgttcaagtttgagaaggatacgctaggcctttgatactggaa

SEQ ID NO: 884325 - DNA, 699 bp, Homo sapiens
ttacagagaaacagagagctaggatttgtatcactatctttctgattcctgatagggcctctggtgattaggaaggttgagagcttgcctggtctcctctatctgtaacacaacaacagtgcgtttttttggcttgaaatggtcataccattctgagtttctgcttcaagttgtaagagtgcttagagattatctaggacagtgatgctcaaagcgtggtctttagaccagtggcatcagcaccacctgggaatttgttagaaacgcaaattcccgggttctatgctagaactagattcagaagctctcagagtttttgtgttttaacacggtcacatatgtattttttccttgagatgkagtcttgctctgttgcccaggctcactgcaacctctgtctcccgggttcaagtgattctcctgcctcaacctcccaagtagctgggactacaggcatgtgccaccatgcctcactaatttttgtatttttaaaaataggcactgggtttcaccatgttggccaggctggtctcaaactcctgacttcaactgatccacctgcctcggcctcccaaagtgctgggattacaggcgtgagccaccgcacccagttggtcatatgtgttttaacaagccctccaggtgattctgatgcatgttcaagtttgagaaggatacgctaggcctttgatactggaa

SEQ ID NO: 884326 - DNA, 699 bp, Homo sapiens
ttacagagaaacagagagctaggatttgtatcactatctttctgattcctgatagggcctctggtgattaggaaggttgagagcttgcctggtctcctctatctgtaacacaacaacagtgcgtttttttggcttgaaatggtcataccattctgagtttctgcttcaagttgtaagagtgcttagagattatctaggacagtgatgctcaaagcgtggtctttagaccagtggcatcagcaccacctgggaatttgttagaaacgcaaattcccgggttctatgctagaactagattcagaagctctcagagtttttgtgttttaacacggtcacatatgtattttttccttgagatggagtcttgctctgttgcccaggctcactgcaacctctgtctcccgggttcaagtgattctcctgcctcaacctcccaagtagctgggactacaggcatgtgccaccatgcctcactaatttttgtatttttaaaaataggcactggstttcaccatgttggccaggctggtctcaaactcctgacttcaactgatccacctgcctcggcctcccaaagtgctgggattacaggcgtgagccaccgcacccagttggtcatatgtgttttaacaagccctccaggtgattctgatgcatgttcaagtttgagaaggatacgctaggcctttgatactggaa

SEQ ID NO: 884327 - DNA, 605 bp, Homo sapiens
catgattctgtacttccctttctactttttgctttctaggcattatcctcagatagctcacccactcacacagcactaactgccactgctgggggagaccctttaacagtccaccctagagctctagtggctggtctggatgacagctayatccatataatacctcacaatggtccagaaacttattactacattgtgcaataagaaatacatgggcttttgaaactaggcaggcctgagtataaatactggatctaagcataatgaactatgagcatatcttagagatcttgcaggtttggttccagaccactgcaatgaagaaaatatggcaataaaggaaatgttttaatgaagttaatatcacaatgaagtgagtcacacacatttgttggtttccaggggttaaaaaagttatatttacactatactgtagtctgtgaagtatgtaatagcattatgtctaaaaatgtacgtacgtaattaaaatacttttttgccaaaaaatgctaatggtcatctgagacttcagcaagttgtaatcttttttgttggtgggaagtcttgccttgatgttgatggctgctgactgatcaaggcgctgg

SEQ ID NO: 884328 - DNA, 591 bp, Homo sapiens
ttaaagccttcacacactatagcacacctcctaggtgctcagtggatggtatgctatcaacttactttactgagtttgacagcactgtctaaagaactctctgagactctctgtgtagcagaagaaattacctagtgctgtcattgtgattctgagtgaaagagggcaggttgggttcaggcttttctccacgtttcagtctgtggtttgctctggtttcctctgacctgtaacactatctgatagaagattctcaaggcctgatcatttttagatgtttatttgcccctctgcttgctaagatttcatgcctatttatcacctatgctaaagaacagggctrgctcaccagaaaataactgacagatgaggttgtgtaatgagaaaattagaacttcatgactcccgtgcaagcttagagtccatcgtaatagcttggagcttgcagcagcttctgagtagaagggagacctgattctaggaagaaatatgataattggagacccgggggaggtcgactgactttggccaagtaagaaattaccttcagttgttctgttactgtaattcagcaactccaattatcacaag

SEQ ID NO: 884329 - DNA, 537 bp, Homo sapiens
cagaagctgccaaggcttatggtggcttgtgctcttcaaagtggcagcccaagctgttccaggtaccctttgagccacagctggagctggggcagctgtgatgggagtagcagtctcccaaggtgacacagggcagtagtgtcccaggcctgggccctgaaatcattctttctctggactcgtgatgggaggggctgtttccaagatttctgaaatgccttcaaggcttttttcctattgtcttggatattagtacctggatcccttttagtcatggcaatctctctagcaagtggttgcaccacagcctacttgtattcctctcctgaaaatgctgtttctctatgacatggccaggctgaagactttccaaatgtttgtgccatgcttccytttaattagagagaaaaaattggtaccaggagtgaggcatttatataaagatacctgaaaatatgaaagcagctttagaactgggaaatggcaaaggttggaagattttggagagctcataagaagaaaataaaatgagggaaa

SEQ ID NO: 884330 - DNA, 643 bp, Homo sapiens
aaatggcaaaggttggaagattttggagagctcataagaagaaaataaaatgagggaaagtttggaacttcttagagaccggttaagtagttgtgaccaacatgctgatagaaatatggatggtgaaggctaagctgaggcagtctcagatggaaatgaagaattattggaaactggagcaaagtttgcccttgttatgccctagtgaagaacttggctgcattgtgcccaggtccaagcaatttgtggaagggtgaacttaagactgatgatggaagactaatggaagaaatttctaagcagcaaagccttcaaaatgtagcatggctgcttctgacaacctgtgattagaygtggaaacaaagaaatgacttaaaattggaacttatatttaaaagggaagaagagcgtaaaatttggaaaatttgcaagctggccatgaggtagagtaggaaagagtattttcagaagagaaatacaagttggctgtgcagcaaccacttgctagagatatttgcaagagtaaaagggagccaagtgctgaaaacgaagacaatggaaaaaaggcctcaaactcatttcggaaatcttcgaggcagcccctccaatcacaggtccgaaggaaagaatggttttgggagtc

SEQ ID NO: 884331 - DNA, 643 bp, Homo sapiens
aaatggcaaaggttggaagattttggagagctcataagaagaaaataaaatgagggaaagtttggaacttcttagagaccggttaagtagttgtgaccaacatgctgatagaaatatggatggtgaaggctaagctgaggcagtctcagatggaaatgaagaattattggaaactggagcaaagtttgcccttgttatgccctagtgaagaacttggctgcattgtgcccaggtccaagcaatttgtggaagggtgaacttaagactgatgatggaagactaatggaagaaatttctaagcagcaaagccttcaaaatgtagcatggctgcttctgacaacctgtgattagatgtggaaacaaagaaatgacttaaaattggaacttatatttaaaagggaagaagagcrtaaaatttggaaaatttgcaagctggccatgaggtagagtaggaaagagtattttcagaagagaaatacaagttggctgtgcagcaaccacttgctagagatatttgcaagagtaaaagggagccaagtgctgaaaacgaagacaatggaaaaaaggcctcaaactcatttcggaaatcttcgaggcagcccctccaatcacaggtccgaaggaaagaatggttttgggagtc

SEQ ID NO: 884332 - DNA, 676 bp, Homo sapiens
aaaagggaagaagagcgtaaaatttggaaaatttgcaagctggccatgaggtagagtaggaaagagtattttcagaagagaaatacaagttggctgtgcagcaaccacttgctagagatatttgcaagagtaaaagggagccaagtgctgaaaacgaagacaatggaaaaaaggcctcaaactcatttcrgaaatcttcgaggcagcccctccaatcacaggtccgaaggaaagaatggttttgggagtcagacccagagtgccactgccctgtgcttcctcatgacactgctcttcacatcttggcagctgtggctccaatctcagctcaaagggtcccacatatagctcggggctgctgctctgaaaggtgcgagccgaaagctttggtggtttccatgtggtgttaagtcttcaggctggcagaatgcaaaagcgaaaaaagcttggaagcttccacctagattgcagaggatgtgtcagaaagactgagtgcctgggcagaagcctgccacatgggtggaacccccacagagagcctctactagggcagtgtggaggggaaatgtgggattggtccccccacacagaatctccaccagggaaccgcctagtggaactgtgggaaggaggctgccatcctccagacctgagaaagctacagccaccagcagct

SEQ ID NO: 884333 - DNA, 592 bp, Homo sapiens
tgcctggagcacagcatggatgtttatctgtaacaggcccaacttttagaagatgccaactccaaatgacctggatattatccaactaagtgcttttaaattcccagtaataactaaccaagcatgaagaataactcaattttggatgaatctaatcttatttataaacaggmgcctacagaaattctgaagtttaacataatttagaaagttgagatgcaaaagcatgcttcttaatgatcttcctgccatcctgtctttaaaaatttattcagtcaaggagcatgttcagggggcatgtatgcttccagatttcagcaccagagaaagtgcaaagaatagcttcacccattctctgtcctccaggaacctagttctggtatttagggccagtcagtgcccttggtgatatggcaatgggctgctcaccaggctgagaggttctgaaatcttggaagaggtgtattgtttgttgttgcaacaaatagcttgaggaaaactaaaaatggctaaaagagtacagaatgatgtggatgatgtttttattcagggtggtctgggaaggcctctctggggagatgacatctgagca

SEQ ID NO: 884334 - DNA, 546 bp, Homo sapiens
tctctgcacatacctgctcctcttcaccttccatcatgagtagaagcagcctgaggctttcacaagatgcccagtctttcagccagcagaatcatgaaccgaataaaccttttttcttaacaaattaaccagtctcagatattcctttgtagcaatgcaaaatggactaagacagccatgttattattgactaggcttgggtccccaaacctaaagcaaggaatggttggtgaactgggttgaaccgtgtagaatatccctttccctaaactagttaaattacattgaagtaggtcatcactgctgtccttattggcaatcgttttttagtctccacccatcttgttttatgcccaaaactaagccttacatctctytgcatgagggttgcatgcaggaaagaggcagaagagaccagtagactggcagacatgacaagttctgaccaattaagccctgcctagcagagcaccttgttgcccaagacacacaaatggaagagagaggaggcaaggctagttgagtgttgctctgggagactgtgcc

SEQ ID NO: 884335 - DNA, 546 bp, Homo sapiens
tctctgcacatacctgctcctcttcaccttccatcatgagtagaagcagcctgaggctttcacaagatgcccagtctttcagccagcagaatcatgaaccgaataaaccttttttcttaacaaattaaccagtctcagatattcctttgtagcaatgcaaaatggactaagacagccatgttattattgactaggcttgggtccccaaacctaaagcaaggaatggttggtgaactgggttgaaccgtgtagaatatccctttccctaaactagttaaattacattgaagtaggtcatcactgctgtccttattggcaatcgttttttagtctccacccatcttgttttatgcccaaaactaagccttacatctctttgcatgagkgttgcatgcaggaaagaggcagaagagaccagtagactggcagacatgacaagttctgaccaattaagccctgcctagcagagcaccttgttgcccaagacacacaaatggaagagagaggaggcaaggctagttgagtgttgctctgggagactgtgcc

SEQ ID NO: 884336 - DNA, 622 bp, Homo sapiens
cactgcctcagcctcccgagtagctgggactacaggctcacgccaccacgcctggctaatttttctatttttagtagagacagggtttcgccgtgttgcccaggttggtctcgaactcctgagctcaggcaatctgcccacctcggcctaccaaaagtgctagaattacaggcgtgagccaccatgcccggcccacccaggctggtttcaaactcctgggatcaagcaatctgcccactctggcctccytaagtgtgtaattacatcttttttcttcttaatgacaggtttaaaatactttttcttcttcttcttttttgatttttttgagacagggactgtgttgtccaggctggaatggggtggcatgatcttggctcactgcagcctcaacctgctggggcaagccatcttcccaccttagcctcctggtagctgggactacaggcacacaccaccatgcccagctaattttttgttgttatttttaactttttttttaatagagacagaggtcttactattttgcccaggctggtcttgaactcctgagctcaagcgatctttctgccttggcctcccaaagtgctgggattacaagcatgagccactgcacctgacc

SEQ ID NO: 884337 - DNA, 629 bp, Homo sapiens
tggtgagaaaggaaaaaaagagaaagagagaaagaaagaaggagagaatggaaaaaaagaaaaggaaggaagaagggaagggaggaagaaagggaggaagggagggaggaaggtaggaagggaggtccctggaccaggagtgtgtgggtggtgaggaaggcttctctgaggaactagcacttgagatatgaaggtggaggaaaagtataactaagggaagagatgggagaagagaagcattctcagtagaggggatctcttcctcccagagaagaggagacttagaacaaatggtctgtagaagtgagtggggctagagcatgtagagccttcaaggtcctgcataaggattttgatatttatactaaaagcaatgaaagtgattgcaggtttttaaacctaggactcacttgatatactrgttaatctggaaacattgctctcaatgtaggtggagaaaacactggagaggagcatgaatgaaggatggagagaacagtgaggaggccactgtggaatgtcaaggtggactgacaagtggggtagttgagaaagagaaaaatggatggatccaaaaatacaacaggacagaatgaatccagaagtactatttcagaacatagaacggg

SEQ ID NO: 884338 - DNA, 629 bp, Homo sapiens
tgatgacatcattgtcttatcaacctggtgtaggataaacatacctgacagcaataacttaagcataaccttagaatgaccttgtatagcacctgaatgtatgttctgaactagggaatccaggagtagccaatccagagattcattccttgtccatgaggaacatctgagccccggtcccatcctattcagtcctgtggaacacaggccgtacaggggattgaggcccagagttttaggttacaatatgaaggttgccaggtggaggtcactgggggagkgtgttaagtggaaatgctatataaagtgcatgctgattgctagcagttgctgttttcccgcccagcccactgccactgggctatgaggttatcatatttagctcaccaccactggcctctctcccctgtatgtgagccttaataaaaccccatgtctcatttgttgcctctgggtctcttctttggcttcttgaatcttgtgccttccttattggggttaataagggttcagcacaacacccagcaatttcaaatgtagacgacgcctctcagagcaactactgttgtttcatatctttctatgttccaataaattctgttttgttcctgcatcttgagttggctcta

SEQ ID NO: 884339 - DNA, 623 bp, Homo sapiens
agatgaaaaagatgagtttgcttcaaaatgtatatatgaccagactgtaaattcacatgcaacgcagtctgctttgggagttaaacatattatttaaacaaatcattataacttgacttattatacctcaatttgattataaaacaaacattaaagtgaaatctaaggtaagtcttttttatttccagttccaaagccatttccatttcttacttatctttgaatcctcagccccaagcacagtgcytgaaacacagcaggtatccacaatctttggatgactgaatgaaaaggaaagtttaaagtcaattacctttaatcttgcttgtggtttctcagagctaatttgaacactagatggagaaatactgaaaaaaaatatttttcagaaaggcaagcatcctcttggtctgagaggtttcataacaagttaattttattttaaatcagtatgaatggatggatgataaactttggaaagtcacacttagaactacattgaaaacaaatgaatgtgtccccagatgaaaaataataactatgtaaataaaatttgaaataaccacttgatagcaaagagaactccagtatcaagaaatattttaaattccatgcaatggtta

SEQ ID NO: 884340 - DNA, 622 bp, Homo sapiens
cctaagccctgtggaacagggagtcaattaaacctctttcctttacaaattgcccactgtctggtagttctttatagtagtgtgaggacggactaatacaccaaggggaccctttggagcacctcttactcaatccttcagagttggctactttctccatcctcagttttgctgttgacctgagggcatcrcaacttccttgttttcctcctgcttttagttgttcgttcatggtcttcttttcaggctctttcttcacaacccaaccttatggtggtggcattccctgggattggcctctcttgtctctccacatgctttatctaggttgatggcatttattagtatggctttgtgggggggaaaaatctgtgcttcaatgaaaaactgcattgtttatagctcatgcttccttgttatcagattctgattctatgggagctgtttcccaactctggaaattgtagataactgataataatgcagaataattcttgtccatagatatgcaaatggttccatgatcaggaagagggacaaccttgctccctcaaggaaaaaaagctagttttgcttccatttgcatattcctgaagtatacagatctcttacctttgaattt

SEQ ID NO: 884341 - DNA, 692 bp, Homo sapiens
aaactcttacatggcatccaggaatatcagagagacaggtgtagtcagtaacccatagagatagagtggaatccagaggaccttcagaggaatagtcccaacccagactcttaggtagggataggagcctccaggggatacagaggcaggaagctcttagggactaaggtagttccagaaacaattcagagatactgtcagagccaggaggcatttaagacatggttggcaacagaagcccctcggagacaattctagaaccaggagccatcaagaaaattttcaaaaccaagggtcacaggcccagctcagggagcctcaggaacaatgttagaattagaaactcattaaagatacaaccaaaaccagaagcccccaaggacatagtctaaatgaagcgttcacggggcacagtsagagccaggagccctcagagacacaaccagagccaggagccctcagagaaacagagccaggaaccctcagagaaacacggccagggcccccagagacaaaaccaagagccctcggagaaattattagcattagaaagcctcagacatacaaatggcaccaggagttctggaagacacagagccagtgtgtctcatcagaaacactattagatccaggaacctcccgtgacccagctaaagtcaggaagttcttagaatcacagtcagagctagaaa

SEQ ID NO: 884342 - DNA, 505 bp, Homo sapiens
actgcgaggaatgggattatatgtcaaagggtatgaacaagaggaaatgaagagtagaacaaggaagaggagaaagggcaggcacagaggaggcatatgagggtagaatacaatgtgcatttgtttgagaatatttcacttatagagggcctctgggttattcacatggatagaaggyaggtatacattttagcttggaactcaggtaagggctttgagatagagacgcactaagcatttcccttccaattaattacctagaagcaaagattctctagaaacagaataattgctatgaaacaggggtggacaatattttctcagtgtgactcgaagcaaatcttaagggacaactccagattgcctctattatagcctgccatttggtcagagaaggaaattaagcagattagtcaagctagatgcttttctttacaaagccatggaggttattactcaagaccttgttatctcaaaggtgtttgcaaattgatttttggataat

SEQ ID NO: 884343 - DNA, 608 bp, Homo sapiens
gattttaactcacacagtgagctgatgccccactgttctcagcaccctggtcagcgacacagtgaggcaggtacatgaaggctgggagatatcatattctgcctaactaacaagtaatgagggctgactctgctatgtttggggatgtggagtcaaagcaaataactgtctctaccctggaggagactaagagactagggaaggatgcagaaaccaatgagctatagaagaaagtgatacaggctgggaagtggcaggcccagagtcctgtggactcacacagttgtgtggtattgatacagacagaagacagggaagcactgggtagaagagggtggttccccagtaarggccccaccctcaagcctgaagacccacagagctaagtcagcacagacatttctgttttcgcacccaaaaagttgccttttggcccaccatacctccaatcctgtccccatataaacccaagaccttagtgggcacacatacaagtggctgaacgttggaaccagcagaccagtgacaatggaacaatgtggcagagaaagacagaagagaaaggatgtctggacgctgaggggggttcagctggaggcagtcagata

SEQ ID NO: 884344 - DNA, 626 bp, Homo sapiens
gaatagaattagtggcttcatgctgttgtctaccacaggtcactgcctctaggtgcttctgtagaggaagagaacatgaggaaacaggaaggaaaaggtaaatatattgtttatgacattgcaggcactgttctaggtatttctaacatcttattcatgtatttctcaagcataggcccrgggaactcaatgacatatacagtgatttccaagggcccatagaaagcaagtctttagctagaacatcttggaacaaaatcctgcttgaaggtgttgggtaggtttgaattttaacacacacaaaaggtttcaatgaaatatcacctttacacaaattatttcagagactccaaagagaagaattacttccaaacttactttacaagcccaggatagctttcattccaagacttcacaaagatatcacatgaaacttttaggccaatctccctcgtaaacacgtaaactaaaatcctacatattgtattaccaagccaatcctgtgatatataaaatgaataacaggttataaccacattaagtttatgctgggactacaagattgatttaatattagaaaatcaatcagtataactcatcatattaacaaactgaaagataaaaat

SEQ ID NO: 884345 - DNA, 683 bp, Homo sapiens
attcaaaagctaaagtaaccagttcctttacagacaagaagcataaactgggcctctctaagaaatgaggtgtgtcattatgaaaactgcagggcttaatgcttacaggacccctctgaaaggactaaattgtacccacacctaaatggcaaacgcctgggtccctccaagtccatttccaactaaggkccaagtactgcttttactaaaagtcctttgtattaagctatcccactctaaaaaaaatatcttcatgggttgcaccagtggcctcaaacttggctgcacattagaatcatgcagagaagttttggagttcctaatgcttaggtctcaacccttaccaatgaaatcagaatctatgcgggaagttaaaattgtcaaaaattccctagttgtctccaatatgcagccaagttggagaaacattgggaggcatcatttattcattcatccaaagatttcctgaacactcattatatgcttggcctctaggtgattccccaaccgcccgggtctttgggtggtcatgtcttatgcatctctgtgtgtctaactctagcatcagaggcaacaatgaatgcatacatgaatgaatgaatgaatgaatgaatgaacgaacaaataaatggcccttcttatctgcctctccctgacttgggatacaggaaggatttctaatg

SEQ ID NO: 884346 - DNA, 665 bp, Homo sapiens
atctccagggatcaacacggataataaagaggaagcagagagcccaaggttgcaaggaaggcaaaccacaaccttgctgcagaggctttaaaaggctggggtgaaaagtcatttgaatgtttccagtcctgaatgcattctctgtactgcatctgacaaagctcccttgacacactgaacccccatggatccttttccccctagcaaagggagcaaaactcttaacaatctacttcagtgcatctccataaacagtggccgtccagcacccctgggagggctgccctgtgtcctgtaatgaatgcaggcccatggaaagtattgtaaagatccacagccctacagaactttgagaacactgttctatcaccattaacctacrgtgggaaacagaggccaagaggtagcaaggtggtgtttatcaagttcccttagaaagtcagtggcagagctagaaccagatcttcttgattcaaaggctctacctaacacagtttatacttccctgagcatccctgaggagaacatctcttagttttgtttttgcctctcaaattcaattcacaattcttctggttaagcaccttcgcaaatttctcttaaagacccctatcccatagccagcccatatggtttgggatttatcctgccagcagcagggtatg

SEQ ID NO: 884347 - DNA, 665 bp, Homo sapiens
atctccagggatcaacacggataataaagaggaagcagagagcccaaggttgcaaggaaggcaaaccacaaccttgctgcagaggctttaaaaggctggggtgaaaagtcatttgaatgtttccagtcctgaatgcattctctgtactgcatctgacaaagctcccttgacacactgaacccccatggatccttttccccctagcaaagggagcaaaactcttaacaatctacttcagtgcatctccataaacagtggccgtccagcacccctgggagggctgccctgtgtcctgtaatgaatgcaggcccatggaaagtattgtaaagatccacagccctacagaactttgagaacactgttctatcaccattaacctacagtgggaaacagaggccaagaggtagcaaggtggygtttatcaagttcccttagaaagtcagtggcagagctagaaccagatcttcttgattcaaaggctctacctaacacagtttatacttccctgagcatccctgaggagaacatctcttagttttgtttttgcctctcaaattcaattcacaattcttctggttaagcaccttcgcaaatttctcttaaagacccctatcccatagccagcccatatggtttgggatttatcctgccagcagcagggtatg

SEQ ID NO: 884348 - DNA, 642 bp, Homo sapiens
cctgaagcccactccttcatatagaccaggatgttctcgtccaccattcacacaccctctttcgaacatcagaacacccaggaagctgaattggtgacaagcagtggctgggtgagccaggaagcagggcagagatcagacagcctccaaaggccataactgatggaatctggagtgggcaggagagcagggaaggaacccaagagctccaagatcttgcttttgcactccccaccctagggcaggccacagtcamccttgtggccatgctctccctcctgaacattcttcttcatcccattcctcatttcctcaaggacctgcttattcctgactctgactctgggtttctcgggatgatgaggcccatccattacgtcaggaattttctggacaaagggtcagacagtgattttatttctgagtctttgggactcttcactttacctctggctactagctatattctctctacatttgctttcatatcttccttttagtttttaggtggtagggttgtgtcgggggcattcatgtgatattgagtcaaaattcaacttgagcactcggagctgtgagacctgagcaagtctctgaacctctctgcacctcagcttcctcttccataaaatgggtgtataa

SEQ ID NO: 884349 - DNA, 537 bp, Homo sapiens
cccattccctaaattcccctgacccagggcctggggaatcatctggtgctacacttttcgagctgccctgctttcatggggcctccacacctctcccctgcctggcgttgcccatgtgttgcccctgctggacttgccagagaaagggcactgtctggggtccatgacctagaccctgtgctcctcaggggttgtggagagtgggctgcctctatggtgggaaaagatctctgagaaggatggaggtggccgtggaagggatggggtgaggttggagcattgtgtggacagggatggcgtggctcctgtagcatctgaggcctggagccagggcaagagggagctgaagaagggagttggggtggggcarggtgttggggtggggggctggcagtgctggagatggataggagaaagaactggggggggggtctaggctggcagaagcatggaggggtggaagacttgggggaggggaacctgcaatccagagcatagcgaacaagaatgaactccttaggagacgtctcttgttgt

SEQ ID NO: 884350 - DNA, 598 bp, Homo sapiens
tttgctcatacatttctcctctcctttagggaaaatcacaatatgttggattgtcaaactttcaataaatgtgagtggctgttggcaattggaggtctgcggagaactctaaagtttccaggaattggaactctaaaggctaccttccgggactctgccggctacagtcagtccccacatctttgagcttctgtggatacctgaccagcggyagcttcccagtgaatgccctttatgagccagcactgggcagggtattgcagtcagaaggcgtgagacaagcttgaggcagtgccttaaagggtggtttccatggatgccacccagacccagatcccagaggcacacacacaagcacttgcatctgttttttcactcggctggcttgcttcctcaggcccagagctagggtctggggattcccatctgggttctgccgttaatgggttgtgtgaccttggagcagttacttaacctcggggtcctgtttcctcagctgtaaaatgagggggttgcattgtgtggtcccaaagggaggcttccagttccgctactctgtgaattttgcaagcacaaaattgtgtgtcccctctccatg

SEQ ID NO: 884351 - DNA, 649 bp, Homo sapiens
ttaaacccacattttacaaatgtatttgctcatacatttctcctctcctttagggaaaatcacaatatgttggattgtcaaactttcaataaatgtgagtggctgttggcaattggaggtctgcggagaactctaaagtttccaggaattggaactctaaaggctaccttccgggactctgccggctacagtcagtccccacatctttgagcttctgtggatacctgaccagcggtagcttcccagtgaatgccctttatgagccagcactgggcagggtattgcagtcagaagrcgtgagacaagcttgaggcagtgccttaaagggtggtttccatggatgccacccagacccagatcccagaggcacacacacaagcacttgcatctgttttttcactcggctggcttgcttcctcaggcccagagctagggtctggggattcccatctgggttctgccgttaatgggttgtgtgaccttggagcagttacttaacctcggggtcctgtttcctcagctgtaaaatgagggggttgcattgtgtggtcccaaagggaggcttccagttccgctactctgtgaattttgcaagcacaaaattgtgtgtcccctctccatgcctcaatgcttttgtcttgcaaacgaa

SEQ ID NO: 884352 - DNA, 598 bp, Homo sapiens
tttgctcatacatttctcctctcctttagggaaaatcacaatatgttggattgtcaaactttcaataaatgtgagtggctgttggcaattggaggtctgcggagaactctaaagtttccaggaattggaactctaaaggctaccttccgggactctgccggctacagtcagtccccacatctttgagcttctgtggatacctgaccagcggtagcttcccagtgaatgccctttatgagccagcactgggcagggtattgcagtcagaaggcgtgagacaagcttgaggcagtgccttaaagggtggtttccatggatgccacccagacccagatcccagaggcacacacacaagcacttgcatctgtttttycactcggctggcttgcttcctcaggcccagagctagggtctggggattcccatctgggttctgccgttaatgggttgtgtgaccttggagcagttacttaacctcggggtcctgtttcctcagctgtaaaatgagggggttgcattgtgtggtcccaaagggaggcttccagttccgctactctgtgaattttgcaagcacaaaattgtgtgtcccctctccatg

SEQ ID NO: 884353 - DNA, 603 bp, Homo sapiens
agtgtttcatttttttgaatacaaaaatgtatatgaccttcaatgggtttaataatattcttactttccttaactccttaaccttatttgcctcatgaggcattcagttctgtcatgaaatctctgaccacagatatatttcaggaggccaatcttagcacttggagaaagcttcttttaaaattcatcacgtttattgagcaattttccattctctcacaaagctccctactacttaatctcacttgagcaagaaaatattcctgtgaagtgggtagggctgaacttattcccattttacagatgattaaactgaataagctttggaaccatctcctttggaagcaaagtaactcactatggwctaaacactttgagaaaagagagaagaaaattgagatgaattcatgctttgcctcaattccctgtatctttcatgttaaattaccttgcttcatgttattgctgcaaatttggctttgttagtgcagacctgacctggatctgtctatatttctgcatagagagatgaccttaatgtatttgcagaatctacatgctgtccactaaaggccacccagcaaatgcaaatgtagcaaatgg

SEQ ID NO: 884354 - DNA, 606 bp, Homo sapiens
caaagccacttagctaagtagtgttcaaatttctaacatggaaactgagataacaaatgtttgttatttttagctgctgcaatttgagataatttgtaatgcagcaatagataatccagtaaatctggggtgaggccttagaatctgcatttctaacaagtgcctaaataatgctgatgatactggtctgmtgctttgaaaaccactgctttaccctaatactgagaggctatcattagtatacctttacccattacacagatggagaaacagctttagaagttttaagtacctttctgaaggtcacatacaaggtgggtggtgctgggattcaaacacaggcaatctgttccccagagttcatgcccataactcccttgctatgctgcctcttcgtctcatcatgaagtgtgtctattccttctgtgttagattatgttgattgaattgtatctaatggtgatggctgctaatgagggattttggtctggaactttattgaggattataattgaagtggctttcctccatgacacaaatgctcccccaaattaggattactactgggatagtaataatttgtctttggatatagtgtttttcaaa

SEQ ID NO: 884355 - DNA, 590 bp, Homo sapiens
acatcaaccttgggaaagaatttatgagtaagtcctcaaaagcaattgcaacaaaaaacagacttgacaagtggaaactaaaccaaagagcttctatacagtaaaagaaactatcaacagggtaaacagatatgctacagaataggagaaaagattcacaaacgatgcagctggaaaaggtctaatatccagaatgtataagagaaacaaacaattcaataaacgaaaagcaaataaccccattaaaaactgagcaaaagatatgaacagacacttctcaaaagaaggtatacaagcagccaacaaacatgaaaaaaatgctccacatcattaatyatcagagaaatgcaaatcaaaaccacaatgaaataccatctcacaccagttagaatggctactattaaaagtcaaaacaacaatagcaacaacaacaacagatgctggggaggctgtggagaaatggtagcacttacacattgttggtgggagagtaaatgagtttaaccactgtggaaagcaatttggagatttctcagagaacttaaaatggaagtaccatttgactcagcaatcccattactgggtatatt

SEQ ID NO: 884356 - DNA, 590 bp, Homo sapiens
acatcaaccttgggaaagaatttatgagtaagtcctcaaaagcaattgcaacaaaaaacagacttgacaagtggaaactaaaccaaagagcttctatacagtaaaagaaactatcaacagggtaaacagatatgctacagaataggagaaaagattcacaaacgatgcagctggaaaaggtctaatatccagaatgtataagagaaacaaacaattcaataaacgaaaagcaaataaccccattaaaaactgagcaaaagatatgaacagacacttctcaaaagaaggtatacaagcagccaacaaacatgaaaaaaatgctccacatcattaatcatcagagaaatrcaaatcaaaaccacaatgaaataccatctcacaccagttagaatggctactattaaaagtcaaaacaacaatagcaacaacaacaacagatgctggggaggctgtggagaaatggtagcacttacacattgttggtgggagagtaaatgagtttaaccactgtggaaagcaatttggagatttctcagagaacttaaaatggaagtaccatttgactcagcaatcccattactgggtatatt

SEQ ID NO: 884357 - DNA, 590 bp, Homo sapiens
acatcaaccttgggaaagaatttatgagtaagtcctcaaaagcaattgcaacaaaaaacagacttgacaagtggaaactaaaccaaagagcttctatacagtaaaagaaactatcaacagggtaaacagatatgctacagaataggagaaaagattcacaaacgatgcagctggaaaaggtctaatatccagaatgtataagagaaacaaacaattcaataaacgaaaagcaaataaccccattaaaaactgagcaaaagatatgaacagacacttctcaaaagaaggtatacaagcagccaacaaacatgaaaaaaatgctccacatcattaatcatcagagaaatgcaaatcaaaaccacaatgmaataccatctcacaccagttagaatggctactattaaaagtcaaaacaacaatagcaacaacaacaacagatgctggggaggctgtggagaaatggtagcacttacacattgttggtgggagagtaaatgagtttaaccactgtggaaagcaatttggagatttctcagagaacttaaaatggaagtaccatttgactcagcaatcccattactgggtatatt

SEQ ID NO: 884358 - DNA, 622 bp, Homo sapiens
cactctcattttgtggctccagagtgggtgctaattacgtggtctaccccatctttctttctattgagcaatgccactctcctggtccatggggattctggtggaggttttagccaaagaccccgctcttctggcccagactggccagtaaaaaacccatgttcttggacacagaggttggtccgggatgagctgatcagaatcctcttttgattatcctgttgagtttggaggaggagacactcytgagattgcaaatagcaaagaccaaaaagctacagttttcatcctggcatccctcctgtttttgtatggctctgccttagtcctttggtcctgttttgtaaaatttcctatcttctcactggttctaatatagagatgatatttttttttttctcaagacccaagcctgattgattggcagagactgctgctggagtaatgtgttaagaaagagaccgggtcatgcctagggtcaaggtaatatgtagggtcagcaggaagagattgtgatctattagttatgtcttacatgggcacaggagtggttgtaaacaaaccaggtgtttgccatcctttatctagtgacatatcctatttcttctcagtgattggtatg

SEQ ID NO: 884359 - DNA, 626 bp, Homo sapiens
tactattaagtggtgtttattatagcataccttgtattctttataaagacttctgggagatatttttatctggtttcagtgccataaaaggttggctaattagcaaagagtaggacctttacctttatgagcttcataaactttcgtaagcgtttagtttgtgtgtgtgtgtatgtgggcatgtgcatgtgcttatttcaaaaaatttccaaagcaatgaaatgaaagagattttccctgaaagaggaactattattcatccttgaaggcctatcttaactatatggccttgagactttctcagtggctgctagggaggtagaaacttctgcctctgggccccsggaccactctgttctttaaagtcatcagttgcaatgtgcttggatttgtgtggccatggctgtcagccccactcacctgggagcttgtaaaagacaagacaaggccttctgggtagcccccagaacctcaaacacgggaaggtgcattgtcacttagacattttacctcagcctcttgatcttcactgacttgtggactctcaagtatgctttgtctatgtgtaattttgtaatagagcgttggaagagagactggcatttttggataaattaatctcttag

SEQ ID NO: 884360 - DNA, 632 bp, Homo sapiens
acagacactgattataccccaagagcacaggtggcgtgaatgtcctgagctgttcacattcaccacacgggagtttgtctcttggcaaaattgccagagtgaagggaggggctgctgcttccacttctaccctctttgtatacctgcttaaatcacttctcatgccaaggcagctacaaaagctttaacactcaactgtggcctcaaatgcagggcatctatgaaagccagagcagcatgaaagaaaacacatgtatgcagactctgtgtgtctatggctggggccagaatcttacactaccatctagaaaagtccacttaaagtcactggtgacaggctctagcaagaattcttactaattcattgaagagctcacaacaaagttaagttccaactctgaattttctaacctgaaacatattwaaaaaaaaaaaacagagtacaggcttgaaaacatggatttcagttctactttcttagcagtgcattgtataatctgcaatcctttagcagacatgaaggcgagatgtgattccagtatccccagaatacattcccctgcacacttcccaggaactttataccattaacgaatgtaggaacaaggagggaaagttaccacagagagggg

SEQ ID NO: 884361 - DNA, 577 bp, Homo sapiens
ctggagaagaaatctccacccactccacctccagccccgactcctcagcctctcccacccgctccgccgccacagccagccctgccctcaccacccccgctggtggcccccacgtccagctcaccaccgccaccaccgctgccacctccaccagctatgccttcgcctccactgccacccccgccagccgctgccccaccggctgcccctccaggggagcccgccccccatcccccgaggacgctgagctgccggacacctggcctctgcayctggccaagaagcaggagacggcggccgtgtgtggagagacggactagaaggctgacgagagtggcggagagggcattttccgtgagcaggacgagttcgtcatccgcgcagaggacatcctttccctcaaggtgagtcccaggcttctccaaaaactgggcctgatgggttacttgagtgtttgttgagcgcctgctggatgagaggcttgtgttgggacctgcggatccagtcatggctgagggagaatggctgggcccactggaattcacagtccaatggggccgttagaggtggcagtgac

SEQ ID NO: 884362 - DNA, 576 bp, Homo sapiens
aaataaatggggggtctgaaagttgaagacatagagtttcatactgagaagtggtcaaggggaagagcattgtgtttgaagagatgctacgctggaagaaagtgtgtaagcaattcctggggttcagtttctggaacagccaaggtttggcccgtggaagccaatttggagcatcaatcaggcacacgtggagagaggcctggattatgagccaaatcctggaggttattcaagctcctccttatggtataaagtaaggctgacctgtgaagcagaagaataaagggtgagatgcttggaccctgaccacattaggaaccaaatcttgsacctaatgggaaaaaggaggtgggatcatttttacatctttgggcaggaatggaatgaaggtgagtttgggggctcctagaatgatcatgagttctgacttgtccagtagagtcccagtttatgcctgttgtctcagtgtaataattaatggcacctcaccttgagacactttcaaaagtgatttggtttggccaataaagtatgtggttgccctggttagaaataacctttcaaaggaagagaagt

SEQ ID NO: 884363 - DNA, 599 bp, Homo sapiens
gagaggatggaaaaccccaaagacatgctttggctccaacacaattttgtgaggtttggtccagtgcagcacactaatccagcactccagggaggactagaaatgtttaaagtctcccagcgctttccctttactgcgcctctggctgtayggacctaatgagatgccttgtgtttttcagaatgccgaagcaagttacgacttcagcagcaacgacccctatccttaccctcggtacacagatgactggtttaacaggtaaactgggccttgggaggtctctttgactttaggctttggggttttattctactttgttttgtttcaggcttgactaccaccagcaaaataatccccatgcttcattaaattatattgtgatttttcttcttagtggttacattctctaaagtgaaatttttaatattacaatcttcctctagaataatcttttgactgttttgttctgctaacttgaaattatttgctactttaatccattaaagagaaaagaaaatagaaataagaagttctttctcaacccattacaaggtgatttaaaacatgctgattttgctttatgtgttgaaactgtcgta

SEQ ID NO: 884364 - DNA, 599 bp, Homo sapiens
gagaggatggaaaaccccaaagacatgctttggctccaacacaattttgtgaggtttggtccagtgcagcacactaatccagcactccagggaggactagaaatgtttaaagtctcccagcgctttccctttactgcgcctctggctgtacggacctaatgagatgccttgtgtttttcagaatgccgaagcaagttacgacttcagcagcaacgacccctatccttaccctcggtacacagatgactggtttaacaggtaaactgggccttgggaggtctctttgactttaggctttggggttttattctactttgttttgtttcaggcttgactaccaccagcaaaataatccccatgcttcattawattatattgtgatttttcttcttagtggttacattctctaaagtgaaatttttaatattacaatcttcctctagaataatcttttgactgttttgttctgctaacttgaaattatttgctactttaatccattaaagagaaaagaaaatagaaataagaagttctttctcaacccattacaaggtgatttaaaacatgctgattttgctttatgtgttgaaactgtcgta

SEQ ID NO: 884365 - DNA, 582 bp, Homo sapiens
aggggtgtgctgaaaagatactttttagcataccggcaacaaccctaatgtggaatgaagatacatgttgatgatatgctcacaggtactgctaataatactgttgtttgtacttcccattcgtaattgaaggaaatgcttgatttgaggtggtggctagtgcaaataacaatgtaaatttttccacccaagttttagagcctatcttggagccagctcttagagcctcattccaatgaatggcagcttatttttaatacatcaggtcagctccaggaatgtacgcttttagggaagctcttaaaattcatgtgtgggaatcagcctccatctagcctaatacatgcttcactggccttctaaaatagcaagccgagcaagaagacatagacaggcaaaggccactctaaagayaccctccggaggtgtctgcctcggctgttacttagagcaactgtttgctccttcctgcaatacagctgcactcctccaccacagggttttggaaaatatcaattaaataatatattttaaacaactttgaaaaagataaaggcatctttttaatttggggcaccctat

SEQ ID NO: 884366 - DNA, 617 bp, Homo sapiens
gacgaatactgtgttatcccatttatttgaggtacctagaatagtcaaattcatagaaagagaaagtagaatggcggttgctaggggctagggagagaggggggaagagagagttgttgtctaataggtacagagttccagttttgcaagatggaaagagttctggaaattggttgtacarcaatgtgaatatacttaaaaatagttgaaaagataaattttatggtatttgtattttaccatattttttaaaaagagagcactaaactgggagacaaaagaccaaggttggagttcttggttgttttccacagatagatcagtctcaaggaatttgagacttccttgaaactcaaggaagtactcaaggaagttgagtaaaggaagcttctttactcattgtttctgttaattcatctttaaacaggataaaaaagactgtggagtctagatttgtatgaggatcaaataaaaaccaaaaaaaacaaacgtttaaaataattttttgagttgtagttgttctcaatattccagagcctctgatctcttgatatttgttacaagtttcacatcttatttcataatgaaatgctaaagatgcctcagcaatagccagt

SEQ ID NO: 884367 - DNA, 618 bp, Homo sapiens
actttctgggctctgagaagggcaggatgctagtgctcaaatgaccacaacaatgacaattataaacatctctgacatgagacatgatgtatacaactgattgtacctgtgtcctgggtttatttgcaatgcctgcaaatgaattcaccctgtagggagattattaaaactaccatggatatgtttgaactgttgtgagaattaccaaaatgtgaaacagagacatgaagtgaggacatgctgttggcaaaatggcacgggtagacttgttcaatgcaggttgccacaaaccttcaatttgtaaaaaatgcaatatctgcgaagcataataaaacaaggtgcaataaacgaggtatgcctgtatatcmgactgattgatggtgctgttgagttcaactgtgtccttactaattttctgcctgctggatcccattcataactgaggcatgttgaagtctccaactacagtaatggattcatctatttctccttgcagttccatcagtttctgcctcacatatagtttttaaatgtatttttaaatgcacatttgactttttaaaatgtatatatttaaatgtatatattttaaatatatatatttaaggtacacaattt

SEQ ID NO: 884368 - DNA, 608 bp, Homo sapiens
gaaatatatttttccgtccctttacttctagccaatttgaagtgagtctattttagacagcatattgatggatcttttttagataattgttcagccactctgtttttggttggagaatttaatgcatttacattcaagttaattactgaaaggtgagaacttattctgcctgtgttgtggttgttttattcttttccctctctttctgtcttccattgttatttgatgatttcctgtagtgatttgctttgactcatttctctttatcttttatatctattgtaggatatttcctttgtggttagctcccagcttgtgtaaaatatcttgtagttataaccacctattttaagttggtaacttcaactgcaaaygaaaactttactttgacttctcccataaccacccactttgagtacctgtagtcagggtttgcttctttttatattgtgtgtttattaacaaatttttatcttttactttcatattaaggttcaaagtaattcatgcatcaccttcacagttttacattattctgtatttatatatttacctttctcaataaggtttatgcttccttatgcttttgcattgctattcagtgcttt

SEQ ID NO: 884369 - DNA, 570 bp, Homo sapiens
cactatgggtattggcctataattttctttctttttttttttttctcacgcttaattcactttatttttcttgtataaaaaccctatgttgtagccacagctggagcctgagtccgctgcgcggagactctggtgtgggtcttgatgaggtggtcagtgaattcctcatagagagacttggtaaatacagtctccttccagaggtcggggggcaggtagctgtaggtcttaraaatggcatcaaaggtggccttggcgaagttgcccagggtggcagtgcagccccgggctgaggtgtagcagtcatcgataccagccatcatgagcagcttcttaggcacaggtgcggagacaatgccagtgcccctgggtgcagggatgaggcgcaccagcacagagctgcagcggcctgtcaccttgcaagggacggtgtggggcttgccgatcttgttgccccagtagcctctgcacacggggacaatggagagcttggccaggatgatggccccacggatggcggtggccacctccttggagcacttaacacccagaccgacgtggccattgtag

SEQ ID NO: 884370 - DNA, 554 bp, Homo sapiens; identical to SEQ ID NO: 875754

SEQ ID NO: 884371 - DNA, 627 bp, Homo sapiens
cttttcagggtggaaacaatcttaatctaagtaccttgcagggcattcatatggtggattacaatgtgtagctactacctgggccaacactttgtatttctgcttctcggtgtatgtgggaaccaatggtgtcctctcaaaggacaactatgtgttctgaattcatctttgaagagattttaaaaagttgtcaccaacacctaataccttacagtggctgcttctccagttatttctggagtctactgtcaaacacaggttgaaggaaacagcaatgagaaaggcagacaaatgtggtcctcacccttgtgggtcttatggtttagaccacaggtcaacaagctttttctgtaaagggctagatagtaagtattttagacttgtgtaccatagagtctcatagtaacaactcctccgctctgccaytgtagcacaaaagcagacataggtaatatgtaagccaatgagtgtggctgtgttctaataaaactttattcataagaaacaagtcactagctagatatgtcccatgagttggagcttcctgatcgctggtctagattagtgaggcagactttattcagatacatgcttgactaattatattttccaaaccatctgtctggt

SEQ ID NO: 884372 - DNA, 522 bp, Homo sapiens
actcatttgactattaaggaaataatcatttgctcttacaagtaggtaggcctagaggaaaaaaaacaaaaaggtaacctaactccaatactgccaaaaaagaaaacatgaagaatttttactttgttatctgtgtttttcggttttctaaatttactctacattttctttatattaaaaataaaataataataataaatattctttaagaaatatttgagccacacygaggttctatgtgatctaaaaatctcagattggccccatctatgttagaaaacttttctatcaaatcaaccacatctgcttcccttttcttccaaacactggatggcaacacacacaccaaaactttcaatagccaatactttgagtagtggaatgctttttgatttagggactcttttgagaatctgatgaaatcatgtgtcctatttccaaaaaaagtacatatttacattatttgtctataatttgtaagcattcaattaaattaattaatcaggttaagaactgcaaaca

SEQ ID NO: 884373 - DNA, 612 bp, Homo sapiens
aaaggagactcattagtggaagtatttcctttgaaagggcacacacgctgtgaaaaaaaaaaaagaaagggttatgccaggcttttctctttgtaaataaagtgacaccttttatctttttttctgttaataacacaggctggggagaatgagtctgagggaggcttgtagataagctggcaggatttgaagattattcagatctttagtttcttatttctctatgttctagggtaagacttttcttcattgttcatggccttgtataaagaatggttaggattggggatcttagggagttaggcttaagagtggtggcttakactccattatcccagttaactgatgaaccatttgccatgaacacctttggtaggtcatgctccatttagcaactgggcagggaatccgatcacctcaaacactacattcaaacagaaaggcaaaagatgctataaaagctagatggagagataggtggatacacagataaataaacctgatagaaagatgatagatagagatataaataagtaggtagataaatgaatagataggtaaagagactacagaataattagctaaattctgtagaaagacctaaaagggaaa

SEQ ID NO: 884374 - DNA, 632 bp, Homo sapiens
ctattgcttcttatgtcccattccttgcctccaggcctcatttttcttcttactgaagcacaccccttggtagctctttcagtaagggtctgtaccgaaaacacttttggagccctttatgtccgaaaatgttcttcacatcatgttcactcttgattaatgtattagttggtaataaaattctaagttcacttcctttacctcaagaaacagtggagctattctctttatcttcatgggtagacagccctgtttcaactcctgaattcacacagagaaccaggatccaggccgtgctgtgaatgagatttgtttgaccccagtcatcagaaaagctttgaggaacgcactrtgatgttgttattcagtactggttacgaatagcatggaaagcttcagatctcacccttttcccaatatgttgttggtgttgttattcttgtctcctgtttctggttgaagaagagctcccttccttgtttttgaacatggagatatatttaatattacccttttgtatttgatctatgtttggaatgagaagaaggctcaatgtgagctcactctgacatcttgaaccagagaacttgaaaaaatttaataaatctataatccatttttctcctaaactt

SEQ ID NO: 884375 - DNA, 639 bp, Homo sapiens
ctcacattgctataaggaaatacctgagactgggtaaattataaagaaaagagatgctgggcatggcggctcatgcctgtaatcccagcactttgggaggccaaagtgggcagatcacttgaggttaggagttcaagaccagcctggccaacatggtgaaaccccgtctctactaaaaatacaaaaattagccaggcctggtggcaggtgcctgtaatccctgctactcgggaggatgaggcaggagcatcacttgaacttggaaggaggaggttgcagtgagccaatatcatgccactatactccagcctgggtgacagagcgagactccatcaaaaggagagaagaagaagaagaagaggaagaggaagaagargaaggggaaggggaaggggaagagaaagaggaggaagaggaagaagaagaagaaagggaaggggaaggggaagggggaggaggagagaggtttaataggctcatagttttgcaggctgtacaggaagcatagtggtttctgcttccggggaggcctctggaagcttccaatcatggcggaaggcaaagggggagcaggcatcttccaaatcaggagcaggagcaagagaaagagcaaggggggaggtgctaaaacacactttt

SEQ ID NO: 884376 - DNA, 619 bp, Homo sapiens
ccgggtaccacaggcacactgaattgtaatttatttttcaaatgtgtggtaagttgaggacactggaaatgagcatggtacaatgagaatcagaaaacagtgggttaaaatttaccaattaacttgggtatgccacataattcccacaagccgcattctctgcatccacaaagtgcagttagtggtgcttctctctcagtgtggtgacagcgatcagagcggattcttacgggggggcaatgagtccagggccayggatggccaaaaaatgttctttgcttcaaaaaaggtgatggctgactttggggcagagaaactggtggtaaagttaaggctggggagggccaataggaaggggccatgaggggtggagaacaacacctggaagaaaatgttcctgctctgagagaagtagaagacctggaaccacaggaccagtacttctcacccacacatctattgtatgggcctgggatggaaatctgcgccaccaactgaatcttcaagcaagcacataaaatagtggtatttcatttctaattacacattctgtcagtcatgttgggtttcccctgcaattaactggctctttacaaacgcattagcatatacagccaaa

SEQ ID NO: 884377 - DNA, 580 bp, Homo sapiens
caagcctgcagaaagtccatgttaatttccaatcatgttgcttcccttcctgagtggaactgagacaggtgggacctgaggccggctggttacttggcatctcctcacactaatgttccttaaatatctgttcaatgtttagagaagaggcagagagctgcctgagcaagggcctagaagccacggctgcttctcctctcatctccagcacagttcagctctggcccaattctgcatctctccctcaacgaagccctgtagctgccctaacctctccccataaaaggtagctttagaggctatgtcttgttattggagatcaccccttggcctcaccctttaccccagatgtctcatcaaagtgcctctggcccccacactgaggttccccygagacaaacatcctggtaaatatagctttgtgtgctttcattatttattcccagggatgcctaatgcccctgaattgcctggcatcttggctctgctgcctgtcagtggatgtgtctctgaggacagcaggctccccacagtctttgcagcagcccaacacggggagctggggaatgagcacagtgag

SEQ ID NO: 884378 - DNA, 632 bp, Homo sapiens
gccgaaaatgaatatgcatgagcaaaataaatgattgttattgttctgagccactaagtttctaggtggtttgttatgtatcaatagtaactaggacagaaacgctggggaaatttctaaatgacaataaaataaggacttagcttagtgcctagaatgtgtgaagaagtgctcattagcgatgatcattgttggtatcgttcagtaacttyccaaagtcacacagctaataaaggtcatgaccaggattcaatccgaggcctccagtctcacttcatattatgctgaggatcaggaaggtaggcaaatccaatgttcaaggaaccaagcacctcttcttccactgagctggaaggctggagtatcaagatgatgggaacatgggcaatgcctctttgtggctcctacactcaggtttggattgcaagcagagaccccagagactatggatgagggaacattggctaacattctttcttttcctttaagctaagtaccaagagtgtgagatcgttgattctcaagggaaaagctaccccctctatggaaaagtaaaatatgcaaacattaaccagaggatagatgggaatgcataattcacaactagctgtctctctggaccaaagcaggaa

SEQ ID NO: 884379 - DNA, 632 bp, Homo sapiens
gccgaaaatgaatatgcatgagcaaaataaatgattgttattgttctgagccactaagtttctaggtggtttgttatgtatcaatagtaactaggacagaaacgctggggaaatttctaaatgacaataaaataaggacttagcttagtgcctagaatgtgtgaagaagtgctcattagcgatgatcattgttggtatcgttcagtaactttccaaagtcacacagctaataaaggtcatgaccaggattcaatccgaggcctccagtctcacttcatattatgctgaggatcaggaaggtaggcaaatccaatgttcaaggaaccaagcacctcttcttccactgagctggaaggctggagtatcaagatgatgggaacatgggcaatgcctctttgtggctcctacactcaggtttggattgmaagcagagaccccagagactatggatgagggaacattggctaacattctttcttttcctttaagctaagtaccaagagtgtgagatcgttgattctcaagggaaaagctaccccctctatggaaaagtaaaatatgcaaacattaaccagaggatagatgggaatgcataattcacaactagctgtctctctggaccaaagcaggaa

SEQ ID NO: 884380 - DNA, 667 bp, Homo sapiens
ttattaaaatgcagcaaatgtacactttagatttgtacatctcattatatgtgaatttaacaccaagaaaaaaactgtaaacaaatttcaaactctagttaaccataggcatgctgaagtattcagaaggaagtgtaccaatgtctgcaattgactttgaaatgcaccaaaaatttctggttggatggatgtgtggatggacgaaaggatggatggaagagtgataaaataagcatagtaaaatgttaatggtagaatcctaggtgaggggcatatggtgttcactattaaattcttttaactttgctctatgtttgaaaattttcataataaaatgaaaaaagggtttttgcttcatgtagcatcatgttttctagctgtccagttctttttattgttattaawtttttttttttttaagaaacaaggtctatgctatgtttcccaggctggactcaaactcctgggctcaaaagatccttccgtgtcagcctcctgagtagctgggactacaggcgtatgccactgcacacggcttgcagacccttttgaatgcctttgctgtattttgcaaatttccagcctcaatagtcacaccatccaaagccagaacacagaaaactcaaagcccagcctccctggtaggtaggatgcaggcctgccacat

SEQ ID NO: 884381 - DNA, 667 bp, Homo sapiens
ttattaaaatgcagcaaatgtacactttagatttgtacatctcattatatgtgaatttaacaccaagaaaaaaactgtaaacaaatttcaaactctagttaaccataggcatgctgaagtattcagaaggaagtgtaccaatgtctgcaattgactttgaaatgcaccaaaaatttctggttggatggatgtgtggatggacgaaaggatggatggaagagtgataaaataagcatagtaaaatgttaatggtagaatcctaggtgaggggcatatggtgttcactattaaattcttttaactttgctctatgtttgaaaattttcataataaaatgaaaaaagggtttttgcttcatgtagcatcatgttttctagctgtccagttctttttattgttattaattttttttttttttaagaaacaaggtctatgctatgtttcccaggctggactcaaactcctgggctcaaaagatccttccgkgtcagcctcctgagtagctgggactacaggcgtatgccactgcacacggcttgcagacccttttgaatgcctttgctgtattttgcaaatttccagcctcaatagtcacaccatccaaagccagaacacagaaaactcaaagcccagcctccctggtaggtaggatgcaggcctgccacat

SEQ ID NO: 884382 - DNA, 657 bp, Homo sapiens
gattaaaactcatcaaatgtaggaagaatcaatattgttaaagtggccatactgctcaaagcaatgtacagattcaatgctatttctatcaaacttctgataatatttttttacagaattagaaagactattctaaaattcatatggagcccaaacagcctgaatagccaaagcaatcctaagcaaaaagaacaaagccagaggcatcacattactcaacatcaatctatactacaaggctatcagtaaccaaaacagcatggtacaggtacaaaaacagacacatagaccaatgtaacagaatagagaacccagaaataaagccacacacctacaaccatctgatcttygacaaagtcaacaaaaacaagcaatgggggaaggactccttattcaataaacagtgctgagataacaggctagccatgtgcagaagattgaaactggaccccttccttacaccatatacaaaaaccaactcaagatggattaaagacttaaatgtaaaacctaaaactacaaaaaccctagaagaaaatctaggaagggccctggcaaagatcttatgacaaagaagacaaaagtaactgcaacaaaaacaaaaactgacaaatgggacctaattaaattaaagagcttctgcacagcaaaagaaac

SEQ ID NO: 884383 - DNA, 676 bp, Homo sapiens
tctggggtgagttacataaacctcactctccttcagaagggaagggatgcttttattactcaactcggttgctggcatggagttgttatttatttgttttaacagtgttttccattattatctattttcgtttcattttatacccttagttacattaagcacatttcagataagttagatatacttattctgggaatgataagtaatacaaacattttatgtagactatctcaaaattgaacatctgaaaataagattacatctgtcatacgattatctagccayatacatgcatgtgagcaattatgtgtgtgtgtagcctttgaaatggattaaaacaatagatagatgggtactttatatagatacatagatatctctgtgtatctacagatatagacatcattgccaattgccatccggtaataacttggtatatgatataaccttaaacagttgtaacaatgtctatttttatctatataatatctatctatctagtgctctatgcagttacagatatatgtctacacatttcctacttccagtggcatctatcattaaattacgtgtgtgtgtgtattgatagtgtgcacatggcatacttatggttaggaatataaatgcccaaatatatataaaacattttggccgggtgcagtggcttacgcctgta

SEQ ID NO: 884384 - DNA, 592 bp, Homo sapiens
ttttttttaaaaccatggcttgagctattggatttctataggatggtttttctcttctactctgtgagtatagcccagccttccattcttctaatgctcattggttctgttacagagtctggggatggaaaaggttgcttaggtgtcagccaagacactccctctgcttgggggagagcaagctgccagcccgactatccgcttcctgccagcttaaggagcttatgactcagattcaagcaaaacactgagctgaagcaaaaagggagggagggaaccttagctcagatgaaggctctagggccaaactgcatcactgaaacatccaagtcagggaaacccatcagaccaggaggctatgtgattttgtgtttgtcctctgcttygaaaaccacaaacatatgcttacacacaactccatttctctcctactcatacagacatatttccccctgagctgaaatcctgaggctgttgcaccctcctgcaggaaaagctactcttgggagctggtctgagtattagccatctctcagattctgtgatagcagagaagtcttcaccagatgttatgattcagctggtgtgtcca

SEQ ID NO: 884385 - DNA, 590 bp, Homo sapiens
atggtctaaattatagattctgactcagtaggtctgggagtccatatttatgtattcctcaagaaattttaaatcttaaccagatctgggggcccgtttgtctagagaacagtttacctttaactcaacaaatatttattggatatattctatattccagaaattatgccaggaaatggccctgcactgaagtctggtaggagagacagatgtgtaaaattacacttgccatgtagtataataagtgctttcctaaggcatttattaattgcaggggttgtgaaagacraaagaagaaatcatctgaaatggatctgaagagttctcagaggaagtgactcatgttgaagaggaagtgacaaagcaggtaaggaatatagggcactgtagttaggaaaacatcttggcctctgagttcaagacgattgccaggttcctgagtcatgccttataccaatgaagggggcaaagttagacagccatctatttttgcaagaagttcctatctctttttatagccctctcttccaggtgtctaggactttaactgtcttgagagaataaaaatacatttctggcttatttatctg

SEQ ID NO: 884386 - DNA, 590 bp, Homo sapiens
atggtctaaattatagattctgactcagtaggtctgggagtccatatttatgtattcctcaagaaattttaaatcttaaccagatctgggggcccgtttgtctagagaacagtttacctttaactcaacaaatatttattggatatattctatattccagaaattatgccaggaaatggccctgcactgaagtctggtaggagagacagatgtgtaaaattacacttgccatgtagtataataagtgctttcctaaggcatttattaattgcaggggttgtgaaagacgaaagaagaaatyatctgaaatggatctgaagagttctcagaggaagtgactcatgttgaagaggaagtgacaaagcaggtaaggaatatagggcactgtagttaggaaaacatcttggcctctgagttcaagacgattgccaggttcctgagtcatgccttataccaatgaagggggcaaagttagacagccatctatttttgcaagaagttcctatctctttttatagccctctcttccaggtgtctaggactttaactgtcttgagagaataaaaatacatttctggcttatttatctg

SEQ ID NO: 884387 - DNA, 632 bp, Homo sapiens
tggaggaactaaaatttgcactcaccaaacaaaaaaaatattccagctcaatggccggacgcagtggctcacacttgtaaccccagcactctgggaggctgaggcagccgatcacctgaggtcaggagttcgagaccatcctggccaacatggcgaaaccccacctctactaaaaaatacaaaaattatctgggcaagataatcccagcttgtaatcccagctattcatgaggctgaggctgcagaatcacttgaacctgggaggcagaggttgcagtgagccaagatcacaccactgcactccagcctgggtgacagagtgagactctgtctcaaaaaaataaaaataaaataaaacattctagcttatggttcaggctccatctcatggttcgaaattttcagctccagtaaaaactccaagtggtcatatagactttaattaaagaattaaaataactcacattakattttgtcatcatttaattagtggactattatggctgatattggatcaactgtttatttttattttatttttttgagacaaggtctcactctctgttgcccaggctggagtgcagtggcgcaatctccagaagctaatgtaacatatgtggaagcattttgta

SEQ ID NO: 884388 - DNA, 612 bp, Homo sapiens
ttttacaaagatgtttctcaagccccaggtaatgtagatacaaatacagtcatgtgtcacttaatgatggggataggttatgagaaatgtgttaggcaatttcgttgttgtgtaaacatcagagaatgtatttatgcaaccctagatagtatagtctcctatgcacctaagctatatgctatagcctgttgctccmaggctacaaactgttcggcatgttactgtcctgacgactataggcaatggcaacactgtggggagtatttgtgtatctaaacatttttaaccaagatgactgggtgcaaattactaacaaacaatgtcctttgattgagaactcacaggccgggcgcagtggctcacgcctgtaatcccagcactttgggaggtcgaggtgggcggatcacctgaagtcaggagttcgagaccatcctggccaacacggtgaaactccgtctctactaaaaatacaaaaattagccgggcatggtggtgggtgcctgtaatcccagctacttgggaggctgaggcatgacaattgcttgaacctaggaggcggaggttgcagtgagctgagactgcgccattgcactccagcctgggcaacaagag

SEQ ID NO: 884389 - DNA, 655 bp, Homo sapiens
tacccatgaagtctccaggtgcttgagccaagttcctgccaatactgaagcagccaggtgagcctcaagttcagaggaagctaggtcttctgcatcacagaaccaatttagccaaagccaagagcaaaaagagtcagtctcaggaaacacactttgttagagctgcactaagctcaggtcttacagctagtccagggctggggctgtggcaagaaaatgacttccacttgggcttcccaggtgtgggggtccttgccttgaagcagatttgcgctggaatcctatcatrtggtcaatacctggtcatccatccatacccacaccataggggaatgttagagccagggctaaaacccacttcttctgattcctgtgctaacaagttttctctaatgcaagaatcatttcctaagaggtaaccccaggatcctagtataggtgctaagtggtggaggaatctttctgcacaaaccttgtcattgcaaactccaaactctacgggtcagaagagtcctgctcacttcacgttgtaccccttagatgccatctggcccagccacctcataggagaccagagaggtgaaagggcttgcccaatctccaatccaagttgacagcagagctggacaaaaatctacatctactgacagctcag

SEQ ID NO: 884390 - DNA, 655 bp, Homo sapiens
tacccatgaagtctccaggtgcttgagccaagttcctgccaatactgaagcagccaggtgagcctcaagttcagaggaagctaggtcttctgcatcacagaaccaatttagccaaagccaagagcaaaaagagtcagtctcaggaaacacactttgttagagctgcactaagctcaggtcttacagctagtccagggctggggctgtggcaagaaaatgacttccacttgggcttcccaggtgtgggggtccttgccttgaagcagatttgcgctggaatcctatcatatggtcaatacctggtcatccatccatacccacaccataggggaatgttagagccagggctaaaacccacttcttctgattcctgtgctaacaagttttctctaatgcaagaatcatttcctaagaggtaaccccaggatcctagtataggtgctaagtggtggaggaatctttctgcacaaaccttgtcattgcaaactccaaactctaygggtcagaagagtcctgctcacttcacgttgtaccccttagatgccatctggcccagccacctcataggagaccagagaggtgaaagggcttgcccaatctccaatccaagttgacagcagagctggacaaaaatctacatctactgacagctcag

SEQ ID NO: 884391 - DNA, 553 bp, Homo sapiens
ctagatatttactcaagagaaaggaaaacatgcccacaaaaaggctagcatgcaagtgttcatagcagctttattcgtaataatcaaaagccaaaaacagatcagaagaatggataaacacactgtggtgtattcataaaatagaatatggttgagcactaaaaagccmcaaacaacaatatgaataaacctcaaaaacattacacgtagtcaaagagccttactaaaaagcatatatggccgggcgcagtggctcatgcctgtaatcccagcactttgggaggccaaggtgggcagatcacctgagatcaggagtttgagaccagcctggccaacatggcaaaaccccgtctctactaaaaatacaaaaattagccaggcgtggtggcaggcacctgtaatcccagctactcaggaggctgaggcagggagaatcgcttgaacccgggaggcggaggttgcagtgagccaagatcgcgccattgcactccagccttggcgacagagcaagactctgtctcaaaaaaaaaaaaaaaaaaaaaaaaaaaaaaaa

SEQ ID NO: 884392 - DNA, 553 bp, Homo sapiens
ctagatatttactcaagagaaaggaaaacatgcccacaaaaaggctagcatgcaagtgttcatagcagctttattcgtaataatcaaaagccaaaaacagatcagaagaatggataaacacactgtggtgtattcataaaatagaatatggttgagcactaaaaagccacaaacaacaatatgaataamcctcaaaaacattacacgtagtcaaagagccttactaaaaagcatatatggccgggcgcagtggctcatgcctgtaatcccagcactttgggaggccaaggtgggcagatcacctgagatcaggagtttgagaccagcctggccaacatggcaaaaccccgtctctactaaaaatacaaaaattagccaggcgtggtggcaggcacctgtaatcccagctactcaggaggctgaggcagggagaatcgcttgaacccgggaggcggaggttgcagtgagccaagatcgcgccattgcactccagccttggcgacagagcaagactctgtctcaaaaaaaaaaaaaaaaaaaaaaaaaaaaaaaa

SEQ ID NO: 884393 - DNA, 540 bp, Homo sapiens
gtagaatgtgtatttatttcaacaagaaaggaaggaggaaatacctttgtaagtgattgaagaaaacaatgtggttgaaagcagacctgaaggaaataacttttcagcatgtgactgtgtttgtggcttcagggagctattgtgatgatgcagattgcaggatagaaactctttctatgggacaacttttataagcgtgctaagcatagtgagtaggtttttgtgaaaacgaatgaagagtttgacttatggtcacaagcaaattccgaggctctagattctcacaaggccaagtctctgtgaagactgctgatgttagagatatatttatatwgagatttgtgcatgtgtgtgtttccactgcagtatgtatgtgagatggtaattttcaattcatggatttctccactctgagactgagttgtgtcaattgaatagcagctctattctacagttttccctagccactttcattgtactcctgggtctgtgttgcaagtgtggagctcgcccaaatcaccaggtgcagcagattttact

SEQ ID NO: 884394 - DNA, 643 bp, Homo sapiens
aagaacagctttccttgcccaacagttatgtaggaatctcacctgaagcaggtgccttatgagataattcttgcatgtcttaagatctttctctgccactgctcattgcctccatgctgataactagggtgtagactcagcagagaagtatcagccctctccagggggaaatagcctatccactgaacaattgaagtaccttgaaacccacccgggagtggaccttgtattagagtggagggggggatatatgttgtgctgaactcttattgacttcactggggatggcaccaagttcaagaggcagaagaagagacccagagccagaaacaagacattgggtctcatgaaggtcttacatacaggggagagagtccagtggtggtgagctagacmggagaaccacaacacttgcaaaaagcatacagtttatgtagcattttcacttagcaccctcccccaataacttccacctggcaaccttttaacccaaaacacagggcctcaatcccctgcacagcccacattccacatgacaggatggggcccagatgttcctcatagaaaaggaatagctctctgggttggccactcctggattccctagctcggaattcccaactgcattcaggtgcaccataca

SEQ ID NO: 884395 - DNA, 547 bp, Homo sapiens
atctcacctgaagcaggtgccttatgagataattcttgcatgtcttaagatctttctctgccactgctcattgcctccatgctgataactagggtgtagactcagcagagaagtatcagccctctccagggggaaatagcctatccactgaacaattgaagtaccttgaaacccacccgggagtggaccttgtattagagtggagggggggatatatgttgtgctgaactcttattgacttcactggggatggcaccaagttcaagaggcagaagaagagacccagagccagaaacaagacattgggtctcatgaaggtcttacatacaggggagagagtccagtggtggtgagctagaccggagaaccacaacacttgcaaaaagcatayagtttatgtagcattttcacttagcaccctcccccaataacttccacctggcaaccttttaacccaaaacacagggcctcaatcccctgcacagcccacattccacatgacaggatggggcccagatgttcctcatagaaaaggaatagctctctg

SEQ ID NO: 884396 - DNA, 621 bp, Homo sapiens
cctcatagaaaaggaatagctctctgggttggccactcctggattccctagctcggaattcccaactgcattcaggtgcaccatacagggtcattcttagcatatgcttaagtagttgttatcaggtacattcaccatacaacataatgctagatcagagggtattcattgatatagagacactcactcataagtcaagattcagttgtttgtcaaggacacttggagctgatcccgatagttttctggggtggttcttcaaatcctgtatgttctgatggcctacagcaaatgargaaatgccacaagttctttgacagtctcaataaagggtctgacggctcagagaggagggatgttagaatgcatgttaaaaaggttttaggtacaatctatcacttgactatttctaactaagaaggcccagaggacactcccttcacaaagacaataagggatcctgaaaaggagtgctgacacctttgagaaggtggtctgtaaaggctgccatctatgggctgggattgacatttgaagaagctgtccaggagttaatcttcctaatattgctgggatcatgaggcccagaacaacagaggctaagtagcagtgcttagtgtt

SEQ ID NO: 884397 - DNA, 644 bp, Homo sapiens
ttctgctttttggacattatgaatactgcttctttcataaacagtcatgtacaagtttgtgtgtgaacatacattttcaattctcttgggtacttacctagaagtgcaattaccaagccatatggtaactcagttgaggaacggccaaactgttttcaaagaagccactccctgggtgttgatacttcttattttcacatacttttttgtacttctccttgtgttagtatttctaaacagtatgtagaaatgttatgtattctttcaaacaatgtaaggaatttcattttatattatwtataacctgcaccttactttgcttatcattgtgtttctaagttcatccctgggtacacacaaagtgctaatacattcagtttcactggtggtacaatattcagttgtctgaacacacctcaacttgtctattttctgtcttgtctctttgtccgttttactgtcagagtaaataataccatctctgttaatacaaattcccaaaatccacaataaaatcttttgtatcattcatgtgaagttcaaagttaatgcttctggctggggaactctcctgcatgtgctaactcgggatctcagatttctccatcttgcatgattgtcattttctaggtcctcccctgagt

SEQ ID NO: 884398 - DNA, 638 bp, Homo sapiens
caaaggaaccatggcagtcagctcatgttcatgtttcatgtttattccgtttttaattttttgtacattttacacatcgtgattgcatatctacctgctaattctaatacatgatgtacaatcggtacagtaaaccagttgattgttatttggtcatctggggctctgggtgaccaaagctcctcaggtcatgggtaatatttgagtatygatgcaagcatgcaggaatccttagggcctctactggggatgttttcccatggagagtattgctttgtgttctctaggagtcagaaacattggctgtcttctgggattccacgctagggactgactctcaggcttggctgctctgcctcccattgcccagggcctaggctttgtctttagagcagtgttgttatcatcatattcctttagagctacccagtcattttcattagtttaattcctaaatcatttctctggtgtcatttctctgtcatttatttttgagggcaaaggtggagggaagctcggatatttcatttactaactactgagcctagcaaaacttattacttctttttaaattttttttgagacagggtctctctgttgtgcaggctggagtgcagtgatacagtcatggcttacag

SEQ ID NO: 884399 - DNA, 638 bp, Homo sapiens
caaaggaaccatggcagtcagctcatgttcatgtttcatgtttattccgtttttaattttttgtacattttacacatcgtgattgcatatctacctgctaattctaatacatgatgtacaatcggtacagtaaaccagttgattgttatttggtcatctggggctctgggtgaccaaagctcctcaggtcatgggtaatatttgagtattgatgcaagcatgcaggaatccttagggcctctactggggatgttttcccatggagagtattgctttgtgttctctaggagtcagaaacattggctgtcttctgggattccacgctagggactgactctcaggcttggctgctctgcctcccawtgcccagggcctaggctttgtctttagagcagtgttgttatcatcatattcctttagagctacccagtcattttcattagtttaattcctaaatcatttctctggtgtcatttctctgtcatttatttttgagggcaaaggtggagggaagctcggatatttcatttactaactactgagcctagcaaaacttattacttctttttaaattttttttgagacagggtctctctgttgtgcaggctggagtgcagtgatacagtcatggcttacag

SEQ ID NO: 884400 - DNA, 624 bp, Homo sapiens
tggcaattatgtgcctcagaatgacccagaagcccagatgtgttccagttatctccatacacactttaaataagcacatatgagtctacacatgaattcacagagatatctaagagagattagctgttaaactcttcttctcactctaataccaagatacttcaaaccccaaggtaatcattatggatatagaggatcagaaagccatttcagataaagacttagaatctgaataatctatttatctagttcaagttaccgaaatagcttcctccaagccaatttgcagatgtcccttgcttatcagcrgtttcattgctgagttccaaatcattaaacacttgaagcatgaaggccagggaaacgagtaattattggtttggtgaagttgcaagggaggttagggaacccaagagagagttaggctgccggatgtagacacaaaggaagaagaggggtgaaggaggagaaataattaagagtctgcttgcaatcaattgagtgtccatctgctattgaagtcatcgtaacaccaaatgcaggtaattggtatttggctgagtagacaattaggctggccacagaatgaaaggaagccaaagactggtgagtttatcctgcatc

SEQ ID NO: 884401 - DNA, 497 bp, Homo sapiens
atcatcccatatacaagatgttgtcattccaatggatgaggagctgtacaaaatatggcaaccccctcttgcctcctttgaccatcaaagtgaatatataggcatagacttcccttcttacacctatttaagaacataaagaacttgtgtaagaacataaagaacctcaagaacataaagtggcacagattgtggggttcacctcaatatgttttccctttccccaggaccttgggtccccgagtgtttgtagtcctaatattcaagttgtaattccccagaccaataaaaccattgcaagctcacttcagtkctgcaaccttttggccactgctttgtgcttcacagcttgggttttgaatctgtaattcttctaagtgaggaaacgccttgagaggaaatgaagctcagaatgtcagattcacctcacatctttcttttctcaccaagatcctcacctattgagttctggctgccctagtaggtttttttgtttg

SEQ ID NO: 884402 - DNA, 497 bp, Homo sapiens
atcatcccatatacaagatgttgtcattccaatggatgaggagctgtacaaaatatggcaaccccctcttgcctcctttgaccatcaaagtgaatatataggcatagacttcccttcttacacctatttaagaacataaagaacttgtgtaagaacataaagaacctcaagaacataaagtggcacagattgtggggttcacctcaatatgttttccctttccccaggaccttgggtccccgagtgtttgtagtcctaatattcaagttgtaattccccagaccaataaaaccattgcaagctcacttcagtgytgcaaccttttggccactgctttgtgcttcacagcttgggttttgaatctgtaattcttctaagtgaggaaacgccttgagaggaaatgaagctcagaatgtcagattcacctcacatctttcttttctcaccaagatcctcacctattgagttctggctgccctagtaggtttttttgtttg

SEQ ID NO: 884403 - DNA, 597 bp, Homo sapiens
caacaatgatagactgaattaagaaaatgtggcacatatacaccatggaatactatgcagccataaaaaaggatgagttcatgtcctttgtagggacatggatgaagctggaaaccatcattctcaggaaactatctcaaggacaaaaaaccacacaccgcatgttctcactcataggtgggaattgatgaaaacacatggacatacaggaaggggaacatcacactctggggactgttgtggggtgggggggaggcagaagggatagcattaggagatatacctaatgctaaatgttgggttaatgggtaaagcacaccaacatggcacatgtatacgtatgtaacaaacctgcacgttgtgcacatgtaccctaaaacttaaagtataataataataaaatttwaaaaatcaaaataaataaaaataaaaataaagtgaggtgtacctttataataacttaggcttggctgggtttcttctcgtagggtaaattagaaagcaaaattggaattagcttgtggccacttctcagtacccaaaccaaggcagagatgctctcagcttggatgttgcctagatgatgatagataaagc

SEQ ID NO: 884404 - DNA, 651 bp, Homo sapiens
tcacaatagcaaagacttggaacctacccaaatgtccaacaatgatagactgaattaagaaaatgtggcacatatacaccatggaatactatgcagccataaaaaaggatgagttcatgtcctttgtagggacatggatgaagctggaaaccatcattctcaggaaactatctcaaggacaaaaaaccacacaccgcatgttctcactcataggtgggaattgatgaaaacacatggacatacaggaaggggaacatcacactctggggactgttgtggggtgggggggaggcagaagggatagcattaggagatatacctaatgctaaatgttgggttaatgggtaaagcacaccaacatggcacatgtatacgtatgtaacaaacctgcacgttgtgcacatgtaccctaaaacttaaagtataataataataaaattttaaaaatcaaaataaataaaaataaaaataaagtsaggtgtacctttataataacttaggcttggctgggtttcttctcgtagggtaaattagaaagcaaaattggaattagcttgtggccacttctcagtacccaaaccaaggcagagatgctctcagcttggatgttgcctagatgatgatagataaagctcttctctctttttcttg

SEQ ID NO: 884405 - DNA, 593 bp, Homo sapiens
ttaatggaaaaataattgtataagtgccttttgtatagatgcaattattaaaatatgtgtagcacatatagcttagaaagtttataaataggtagttgtttccagtaggaaacaggatactcaatctttcttttctttgcctatagactgatttcttcaacatggcctactaatgtgttcctcttggaaaatgagtacctaggagagattcaaggttcttgttaatgagttaatatttgtaacatatgcctgagggtatttatggaaaccatgtattggatccagaagggcaaaactctccgggtggtggaagctgagttgtaagcagtgtgtgttgagaggaggcctaggggatacagactgtcatagcttcatgagaaaaaaaaattaaaatgtgctgtaggaaaggkaatgagagtgagaagaaaagccatccaggggatctcatatactgaagatatggtttttctttcgtcgaatgtatgatacttggaggaacaaagaaagataatatcagatttgagaactgttgccttaaaaaaaagataaaatgctgactttctgcaaatatctttatgaccaactttccaaaa

SEQ ID NO: 884406 - DNA, 641 bp, Homo sapiens
tacaaaaaataaaaaattaggtgttgtgttgtacacctgtagtcccagctactaaggagggtgaggtgggaggatcacttgagcccaggagttggatgctgcagtgagctatgaccatgccactgtactacagcctggtcaacagagttagaccctgtctctaaaataataaaaatcaaattcaactctttataagttggctttttttaagagatcattctacmtttgtgtaatgtccccagcccaaactttctatcctcgcattcccctgggccttggaatggttttccctctcccctcttttcctcttttcatgtgttatctcaaaatttaacttttctggggcccctttatactgtttgctctctgacaagcaaacaaatctgattaatttgtttacataagatgctataccttaattatggcatagtgtgtcttcagcaccaataaggtttgtattgtaaccttgattctgaaagtcttgagataaagcagtagattgcaggaacttcaaacacaatagcaggacccgtagaggaagttttaggggtacagcttcctttgcctctgcataaagcaggctctttgggctgtcatggaaaagctgtttgggaaatggggtagatgatgctggagaatga

SEQ ID NO: 884407 - DNA, 597 bp, Homo sapiens
aagggcttgcctttctggcagccagtacaaacttctacaaaggattgatttaccccaaatggcatactgagaacttcccatagagctcagctaggaaccctcttcacaccttccagtggagggagggactcccatattccaatagttgtatctttgcaagtaaacccagacatctttgtggatagtgactggtctttattcacctgcatagccttagtgtgtttgatggttgttgaaagctctaagacctgaaattcaccaacatgtctgtgttcccagctgcttggctcaaggtaagttttacccccctgggtttaaatactagtctctctgcttcttggaggtgggggtaaaactctaggattaagctgaatcttggaacccctttgttatccaagacragaagaataggaagagggtctttctgtgaccaatagagttatagataaaattgtgtccacatatccagtttaaacaaacatgaaagtacaacagtggcttggatatgaccagaaaatacaaaaagacaaggcactgtatgtgatgctgttttttgcaaggtgataaccaggtgtatctctgctcttcatctgccaa

SEQ ID NO: 884408 - DNA, 605 bp, Homo sapiens
ttataaatgggatcatagaattaaacaatttagacttaaagtatcacatacttttagcctgtgtaataaatatcactagacattatttgaacacaatgttccgtaacatatcttcctcggagaaacaaaacagacacctttcctgagggtgaaggtaaccttcttgagatttatttaagcaaaaatagaatcgaagatgttgagatagagaagttcttagagttccctgcctccttggttagaatgatgaaacagaaattcagaatatcacacggtgcttagaggcagaaatggaaaaaaagaatctggtgytcaaattcatacttcaggtaggaggcaagcagctatctggaccttaaatgattctcttgattgattgataaatagatagatacgcagcaatactttagttggatacattatttggtgcctcttatgtcagtactctgatgttttccattttcacagtttggaaataagaaaaagtagacaaacttggctgggtgcggtggctcactcctgtaatcccagcactttgggaggctagggtgggtgcatcaccggaggtcgggagttcaagaccagcctgaccaagatggagaaac

SEQ ID NO: 884409 - DNA, 607 bp, Homo sapiens
tatgggaggaaaataactaagatgtattgttttatgtatttatatatatatttctatgagtatagaaatcttacatttaaaatcttgattagtcataatacatgtatacatttttaaataaaaatagatatattgatggtatatgcctagtcttattgggatgatgatgtgyatggtataaacatctcagcatcttccaagacatggataacattttgcttttgattaagaaaatatgattttagattcaaactagaaatggagttagtaaaagaatgaataaactttgctttgaaaaatcaaagctcaagaagcaaaagatgagacattttttccttggtaaattttggcctaactttccaaattgcaccctattatgtcatatttatttctgattttagctatcattttcttcctctgatttagtctttcacagaaataaaccagaggtgaaaagggttctagaagtgttatttattgtgtattttttatctaattttgccccatgctaataaaagctcacttagagctaccttcttaccacaaatctagaaaagttatttttggtccttggacccctagtctccaaagcatgcagaaaatgtgt

SEQ ID NO: 884410 - DNA, 569 bp, Homo sapiens
tttctctcttgctttcttcttgtatctttctgtgtacatatttctcttttgtttctccttctattccctaatgtcatttctgtatctctgtctgttagtctgtctctccctgtatgtatcccttctcttatcattccctttttgatttatttaatttcccactcaccattaccaaattcattttactcttscatggaggccatcctagctctttgactttttccaaacagacctttggcctgcttttgcatatactgacactcaatatagagcttcttgtaaacaaagacccaaacatttccccaggttttcaactttcctaatacagaaagctgtcaaaaactttgagattacaacttttcttttagcacatctgagatcaacttcaagcccacagtagagttaacaggataaattcacctattaccacaggaaatctaacagaagcttcctcaagacaccttcttctctatgatggtctttggaaggatttctacttcacattaaaaggagagcatcctcatgttaatgacccaaccttaggaagccatttaaaatgtgttaaaacc

SEQ ID NO: 884411 - DNA, 607 bp, Homo sapiens
ggcagccttaatgcttgaaatattttattgatgttagagtacttaagctgttaaaactttttttttaacttaaactttcagaagagtgagttttttccatttttgatgcagtactaatttttggctagaagttttacagcttgacatgccacctgacctctgtaccttctatttgacctaatgtatctatagatcatttaaatgagctcatttgactcaagagaaaatccttrcatgtcaattttccatgtaaatgaattctgttttaaagactaatactttcattggaagctgattataaaactgtgctattaattttgacattttatattcacttcagactttctatattattatgttttattacccacgctgcagaatataaataaatgtgttttattatttgcttgggattttaactaaggcttaatggattttattctggcatactttaatgtccccacaattcgtctacttgcaaagtactttagttacaaatgagccaatttccattaacatacttcctctacactgcaaagtatctgctttagaacaggcatattttaaaactaaaataaaaccccaactagttggtgtcagcttttgt

SEQ ID NO: 884412 - DNA, 633 bp, Homo sapiens
acatttcaagaaatcaaatttgatcatattttggggcagattaatttataaggaggggatcattggccagtactttgtaaacaatctggagctcattttgctcaaattaaatattccatagtcattaaatagatattcaagtagtgcttaggcagcacagaatatatgaaaatctgcagcaaatcatactatccacataaaccattatactgcttctattgctgatgtggctgccagatgtctcttttgtgagctggattccatagtgtttttcatatctctagagttatttgaatagttacttcttgaatatctagcaactgtatgtgcatatgtatgtatgtatatatgtatgcatgtgtrtgtatatatgtctatgtgtctatgtgtatgtgtgtatatatacgtggtgaaacttaactttgcaagtcttttattcatttttgtgagatatggtgaaatgtgatcttgtacatttttattaatgcaggttgggaaacagattctccattagggtaatagcagagagggtacattttaggtacattttgcaattagacaattttaacagctactggtcaaagtattatttaaatttggcatcacacttaagaaatataaactgttgtgtct

SEQ ID NO: 884413 - DNA, 587 bp, Homo sapiens
gtgagttctccagcttagtctcaatattgactggaggccgatgctgctgaggataaaggcagtaggcggaagggaaacagcacatgtgagcagatgctggcataatcaagaaaatattctgaagtcaggtgaatgatagagatgaggacatggaaacaggaatataattgttactgaattcaaaagagttgctgggagacttagcagtggcttgtagaatgagggagggtccaccaagacaacctcccacttcaagtctggcacaaagcatccaaatcacctcaggagattttgagaatattgattcccaggccctacccctagacatttggagtccataggtcctggaatctgtatttttaagaagttcccccacatgattctgatgttgcagccaaggaaggtgatccctggataactctctrtaactccttcaagtggttggaagaggagaaaagccctctagggaagggaaggtgctagtgagaggacactttcagctaaatagagacgttgcaggagaccccaaggaaatggccagagtctttgcacactggaattttacatctagacagcttgataaatgg

SEQ ID NO: 884414 - DNA, 484 bp, Homo sapiens
tcccactggacagacttctggcaatatctggtgttcagactgtagtgccatgctctgctatttttattactcacacaaaagtgcgttgatgggccatgggcaagttaaatttatcatcttgcaacggtgggatgaaagagccattgctaaccctggcaaacctaaggtgtacaatttcacaaaattacatagatggtaagaggtggtgttgacacaattggagctgacactttcatttagccgacgtggaaagaggcccaagaggtccacttacaggcagtggtagggccaggtcagaagtctaatcttcagcctccttgctttgtactcccgacctcaaacccraccactctcttctcccaaccataatgcatcttagtgagttacagtacaacaaaagatctagaaatatctgactattaaaaaattatctgctgatcataaaacaattgaaaacatagagaagaatttagttaggggctag

SEQ ID NO: 884415 - DNA, 633 bp, Homo sapiens
aacataatttccaagctttggaggaagaatttttaatgtttctgtaatgttctcaatcagaataggtttttgttacaaaataactcctctgcagaagtctgatggagggtgtctttttaaacatcattcttcatctattcagaggatcaaatacttaaaagggactttattgggaatgtttttctttatctatctgttgacagtaagccagtcattgaaggaaaagaagacaaaggctggcaggaaagctatgcactcaaaaacaagcagccaaatgaagttctcatcctgactgcacctgcttctgagctcacagggtgtgtacctgagatggaggtgattattaaacacagcgccctgaccactgccctttggtatggcacttcctactgactgcatatcagtggtgttgagcagattaactcatcagggtcttagtgaggcacaaascttctcttgacacataactacgtgtagctacttaagagtgcttggtactggaggtcattatgttaagtgaaataagccagggacagaaaaacaaatttggcatgttctcacttatctgtgggggctgaaaattaaaacgattgaactcatggagatagagaatagaacaatggttaccagagg

SEQ ID NO: 884416 - DNA, 661 bp, Homo sapiens
caagaccactgatctctggagtgttttgccgctgagctcatcatactgctttacatcccagccaggcctcagccttgacgtaaaactctccagttctatgtaaataatggttataattaataataaatgaacagcctgggggaattgcagagcagaatttagtggctggagatttatacagctgcatttggtgccagtgtaagatgtggatatggaaaaaacccacggagctatcatttcagagccagggcactgctaataagcactatgcacccagcagctcacagccttgtagaaaaccacacattttcctgggtgtaaaggagaggaggatatttttatcttttttatctctgttcctctaaatcagggttaggcccccaaagtccaggcaatttatatggggtaaggcagaaatctgaacatgaagaagaagmtggagaaagaatttggacatacagaagaaaactgaaataaggacatcatgtacttttaggagaattgatggaaccagtgggtcttgaagtgatgataaagacctacttctgcagaaagaaaacaaaaatgcatcattcaatgcataattggggtacaaaccctgcaagcctcttagctccaaatattttagatgctctaactgggcactcactgagtgcacatg

SEQ ID NO: 884417 - DNA, 674 bp, Homo sapiens
aaagaaaagaaataaaacaaatatggaaataggttaataattgctgagtccaggttgtggggttatatgtgctcattgaacttctcttttgactttctgtatatttaaatgtgtttatagaaaaagttgataaaattgttttatttgatgatatgccttgagaggagaatattcttatatacacatatttaaattatgataattgtcctttttaatcaagacaataaaaagaaggtgagagaatattctattacaggataaactaagagctttatttatttatttttatttttacttttactttaagttccaggatacatgagcagaacgtgcatgtttgttacataggtatacgtgtgccatgttagtttgctgcacctattgaaccattctctargttcccttcccttgccccccacaacccaacagggcctagtacgtattgttcccctccctgtgtccatgtgctctcgtatttcaactcccacttatgagtgaggacatgtggtgtttggttttctgttcttgtgttagtttgttgaggatgatggcttctggctttatccgtgaccttgcaaaggacatgatctcattaatttttgaggctgcatagtattccatggtgtaccacattttctttatccagtctatcattgatggacatttggattggt

SEQ ID NO: 884418 - DNA, 674 bp, Homo sapiens
aaagaaaagaaataaaacaaatatggaaataggttaataattgctgagtccaggttgtggggttatatgtgctcattgaacttctcttttgactttctgtatatttaaatgtgtttatagaaaaagttgataaaattgttttatttgatgatatgccttgagaggagaatattcttatatacacatatttaaattatgataattgtcctttttaatcaagacaataaaaagaaggtgagagaatattctattacaggataaactaagagctttatttatttatttttatttttacttttactttaagttccaggatacatgagcagaacgtgcatgtttgttacataggtatacgtgtgccatgttagtttgctgcacctattgaaccattctctaggttcccttcccttgccccccacmacccaacagggcctagtacgtattgttcccctccctgtgtccatgtgctctcgtatttcaactcccacttatgagtgaggacatgtggtgtttggttttctgttcttgtgttagtttgttgaggatgatggcttctggctttatccgtgaccttgcaaaggacatgatctcattaatttttgaggctgcatagtattccatggtgtaccacattttctttatccagtctatcattgatggacatttggattggt

SEQ ID NO: 884419 - DNA, 644 bp, Homo sapiens
tccatgtccctgcaaaggacacaaactcacccttttttgatggctgcatagtattccatgttatatatgtgccacatgttctttatccagtctatcattgatgggcatttgggttggttccaagtttttgctattgtgaatagtgtcacaataaacatacatgtgcatgtgtctttatagtagaatgatttataatcctttgggtatatacccagtaatgggattgctgggtcaaatgacatttctggttctagatccttgaggaattgccacattgtcttctacaatggttgaagtaatttacactcccaccaacagtgaaaaagcattcccatttctccacatcctctccagtatctgttgtttcctgactttttaatgatggtcattctaactggtgtgagatggcatctcattgtggttttgatttgcatttctctaatgaccagtgatgacragcttttttttttttagccaacaggaagagaatttttaatgtcttgataaaaatttaagaagtcacagaacaattgcaattatgcatgcatgcttttggagcaatcacttggcttaaaatgcctcccacccagcaatctaataggcatctttcaagaccagttcaagtgtgaagattgctttgcaca

SEQ ID NO: 884420 - DNA, 563 bp, Homo sapiens
aaagcaatgttctaaacaatctgcaaaaaaagattgaactgaataatgaaaataataaaacagaacattatccttgaaacctcaatggtctttaagtctgttcttcaaaagaaagcatcatttcccatagtaagatcctgaagctcttttgactcaagctccccactcattctttgaactcgctgtgttcacctgggccttggcacatttcctcctgccattgtccctgactggcatgcccctgacactgtcctctgcctattttggtcctgtattcctccacagtccagctaaatttttttcctccaggtgttcttccctgaccaccttccatagcacaaatggtccattcaaaagatagttatcatacctattcacgtggtcattctcacatgataatcttyaatgacagttgagatcttgaatcatattttaactttctgtatatagcatccttgtctctttatccagttttggaagttctttgaggcaacttttgccttcagcatgactagatggagagagtagccttcacctctggtaggaaaagcaatggactgttg

SEQ ID NO: 884421 - DNA, 612 bp, Homo sapiens
actaatactgaagttattcttgctatgtatatatgggaattcaaaaataaggagacagtggataaatgagtaaatgaatgaatgaatgaaaaagtaaataaataagggagtgaagtgagtgaattaataaagtaaagaataatacaatgaaaatggttaagtagagatatctggaactaaaayactggagatgaacctcccttaatgccgcatataattcatggcacagtcgaccccttttagtttcccttggttctgcatgagtgctctgtctagccacatgctgcctaaaagtcaaaatctaaaaggggaacaagcatggtttctggcaccttgaaagccagacaggcactctctgaggcactctctgaaggcctggtggaatgtggtgggggaataaccagggggtcagcccacgcagattcactcctttctgggtgtggggttggctcctctaatgttgattcatgccctctatttttacggtgtttgattccatcctaccccagagcagcaaatttatattaatattttgcttcatttccagtgataaattcttgctttactctagcactaacctgctatgtgatcctaggcaaaacacaccattta

SEQ ID NO: 884422 - DNA, 631 bp, Homo sapiens
aatgaacggaaccatcttacccattagttacaaagcactaagaaggaccctggggataccagcaatacccaagctaggcctctggggaaattggatgagggaagatggatcacactttttagctgtcaattcagggtcactccctaggaagctgatagcagtgtttcttgtaggcattttggcatttgatatcttgattaaagacaagtcttcccatgataactcctgtggttttcttcagagctcaagtcccttcttatccaagaattctccccagatgacatctaagctttatgcactgagggcctatttctcttttctgtcaaaatttcactctctttctttagacctcatccaatattattgcttkgtattatattattacagttatgctctccatctcttctcgtatttatgtcttgacacccacattaagcataatctttttcctaaagcaggttattcgattccatacttgtactggtgaggtttttggttgcaaggaatagaaatggacttgggctaatttaagtggagaacaaactttagtagaaggatatcagcaactctctagaatcaaagggaaaactgaagaaccaggctcaggtgatggaaaagctcaaggaacact

SEQ ID NO: 884423 - DNA, 609 bp, Homo sapiens
caagagagctagcctgtcctttgaagctataaagctggccattgacttctccactccacctatggaagtcctagatgacatctccttccaacagaaggctattagatctacactgaacatcttttatttattgtagccactttcttcaatgatcttagcaagatctggataacttgctgcagcttctgatcagcacttgctgcttcactttgcacttttatattatgaagatggcttattttcttaaacttcaggaactaacctctactatctccagagttttcttctgcagctgcctcacctctctcagtttttctggaattgaagagatttagggccttgctctggattagactttggtttaagggaatgttctagctgtttgatcttctatccagaccactaaaactttctccatatcaggaataagactgtttggctttcttattattcatrtgttaactggagaagcactttaaatctccttcaagagcttcttgtttacattcacaatttggttaactatttggcacaagaggcccagcctgtttcagctttcaacatgccttctttactgagctaaatcattcctagcttttgattgaaagt

SEQ ID NO: 884424 - DNA, 703 bp, Homo sapiens
ttacaacagtgctggtcacgtggtagatactcagtgagcaattgctgaactggggctgtaggccgggcgccgtggctcacgcctgtaatctcagaactttgggaggctgaggtgggcgggtcacttgagatcaggagttcaataccagcctggccaacatggtgaaaccccgtctctactaaaaatacaaaaatcagccgggcacggtggcaggcacctgtaatcccagccactcaggaggctgaggcacaagaatcgcttgaacgtgggaggtggaggttgcagttagccragatggcaccattgcactccagcctgggcgacaagagtaaaactccatctcaaaaaaaaaatagaaaagccaggctataaactcaagcctagtattctcagcacctctgagatgctgcatggtatgtgtttttttctatccaggtcctgggaccagacttagtccaggctgggccgaggtatggtgaccaggtcaaaggacttgccttgcagggttttcttcaactgcatcaaatatgcttcttgctgagccaccttggcaggtggtactgctacatctggacacattatctgagcacagaacaagctagaatatgctgtacactgaagtttttaaagaagtttggtcctgacttcctgtaccctcaaacttcctttgcacctcctagagtccacatcagatatatagaaa

SEQ ID NO: 884425 - DNA, 552 bp, Homo sapiens
agtattcatgattctttccctttattttccggttttcaaagcatcctccaaaggtgaccaatgctttccttttgaatgattgtttttgttgtttttttgcattcccaaaagaaatgctactgattatggttattattctttcagtaccttgttggattctatttcctagagttttatttaagtgtctcatgtatattaatagatgaaattgatttatatcttggggtgacttccagattttacacacacacacacacacacacacacacacacacacacagattgtgttcaaacyatttcttattataatctctgtgggtactgaaagaatcatgcatttatggggatgaaaaaaattacctttgagagcaagcattcagtgtacccaataaagcagaaactcttgcataatcacaaataaaggtgccacagaaatttatgggaaatgcggtcttgcattgcccagaggaagtcaccagggacagatgtttagtagctcctcctgcacacatacagttccattttagggaaagaggttgctcttgctctgtc

SEQ ID NO: 884426 - DNA, 575 bp, Homo sapiens
ccaaaactgagtttcacctctcaaaagagggttttactctgagattttcagaaacccccaaatccaactcctgcatatcatgcttcaccatgaaaagtttacttcctggctaagaatggtcacttccctggcccctagatttcctctttactttcttcactagcagttgcatgttgtttttttgtttgtttgtttcrtttttgttgttttttgttttccaggcatttggacaaagaaacttcaaaagcagccactgtccaaccagcaaattgatggactaggcttagtgacctactggatgtgagacgcagggtgatttgtcaggcttctggctggctgagctattccctccctgcgtccctcccaaaccctagcacgggagtgattttggtatcttggtggaatcctgcataagttactacacatctcaataagggagggccttctcttttactgcaatcccctccaccccccaagccacacaggaagttgctcagctgatagtttcagggcctctgccatacactattccttcctcatctgaggggggagaaactgcctctgtggaaggagac

SEQ ID NO: 884427 - DNA, 575 bp, Homo sapiens
ccaaaactgagtttcacctctcaaaagagggttttactctgagattttcagaaacccccaaatccaactcctgcatatcatgcttcaccatgaaaagtttacttcctggctaagaatggtcacttccctggcccctagatttcctctttactttcttcactagcagttgcatgttgtttttttgtttgtttgtttcatttttgttgttttttgttttccaggcatttggacaaagaaacttcaaaagcagccactgtccaaccagcaaattgatggactaggcttagtgacctactggatgtgagacgcagggtgatttgtcaggcttctggctggctgagckattccctccctgcgtccctcccaaaccctagcacgggagtgattttggtatcttggtggaatcctgcataagttactacacatctcaataagggagggccttctcttttactgcaatcccctccaccccccaagccacacaggaagttgctcagctgatagtttcagggcctctgccatacactattccttcctcatctgaggggggagaaactgcctctgtggaaggagac

SEQ ID NO: 884428 - DNA, 605 bp, Homo sapiens
tgttggataagtagttctgcagaaggctgcacgtacatgtgtgggacggctacaggcataacatcctgagagggaccttgcctcgtagcttgttgatttatggtcatgacctaacctggccctgtttttgctcattttcctcctaaaaacaaacttgcaccacacagcatgtttttttagttaccagagttgatgacactgcatgactcctctgtttttttgaatagagcttcaccttcctggaagctgatggggcttcttggagaagcaggactctcactcctaactttaatcctcccagaggtacagarcagaactctgccatgggggtttcctggaagtgagattccatggatgtgtctgtgccaagagcagcatttctgcctggaccttatcttcatcttctgccaccttggcttgttgttaaatgatctcctctgtgagactctgccatggataaatgttccctccagaatgagcctttgtccaagaaaagctgtcaataagatttatcacatatgctgtaatctaactgtgtaggatctagaagaaagcatcttagtatgtgatggctgtgaaaaagctcatctaacgttatggggaaa

SEQ ID NO: 884429 - DNA, 524 bp, Homo sapiens
atactgtcttccacacaggatgaattaatttacattcccaccaacagtgtaaaagctttcctatttctccacatcctcgccagcatgtattgtttcctgattttttaataatcaccattctaactggcaggagatggtgtctcattgtggttttgatttctctaatgatcagtgatgttgagctttttttcatatgtttgttggccacttaaatgtcttcttttgagaagtgtttgttcatacccttggcccactttttgatgggttgtttgttttttttttcttgtaaatatgcttaagctcctcataaattctggatattagacctttgtcagatggatagaytgcaaaaattttcaaccattttttaggttggctgctcactctgatgatagtttcttttgctgtgcagaagctctttagtttaattagatcccatttgttgattctggtttttgttgcaattgtttttgccatttttgtcatgaagtctttgcccatgcctatgttctgaatggtaatgc

SEQ ID NO: 884430 - DNA, 630 bp, Homo sapiens
tattaaattcccagtctggtaattccaactctgccatatctgagtgtggtttttattcctgatctgtctctttagactgtgctttttgagttttcacttctttcctgccccagcaccagtttctatggcggtttctgctctggcaagttatgagtctctatattcrcctatcagtctctccaatttaaggggcaatggtttgctctgtggctccacttctcttagaagtaaaaagagttgttgatttttcaagttgttccactttttacttgttagtacagagtgacaacttccaagcttcccacatgctggactgggaaacagaaatcttctggcctttttattaccacaatctcagcatcagcaaggcagctaaagtgtccttgtaaaaatataagatagattacatcagtcttctgcttaaagccctccagtgatttccatctcactcagagtaaaagtccttattaataatggctttcaagtccctaatgatgtgtctccccattacgtctctgatctcatcttttttcttctgtgtcactccattctagccatgctggacttcttgctatttctcaaatgctccagccatataacttttcagatctttgcacctatgcttccctg

SEQ ID NO: 884431 - DNA, 577 bp, Homo sapiens
cgacttaaaaaacgaggtgtagacttatttatccatagcattcttcatgggatgaatctgtttcaaggaaattttgactttgaatcaaattttaggcatgcctaggactaaaaggaggctcagcagaaatgcgatgacaaagcccatggattacagaaagcctctccggcttgtgcatatctctggtagagtttgcccattccagactggccttgctgttcaggcattttcctccattccatcaagattattcttattcagtgtttacatctctatcgagctcctagtgtatattaagcattgaggaagagatcacagtgaatacgttggcctctggagtccaaataccttgctgctaatcttgctttgttagttgtatattaatgggcaagatattcacaatattcactagactagttttaacatcagtaaaactgrgagaattaaaatatatacctcctaagagtaatgagagtgccaataaaacactgagtgcaatatttggcacttggaaagtcttcaataactgttagcaaatatcatcattatcactggtggagagggacttgcaaatgtt

SEQ ID NO: 884432 - DNA, 648 bp, Homo sapiens
aagaggacctcaggaagaaccagaaagttaatgagaaggaaaggccagtcatggattactagactcaaagggctcgaatagaacttagtgaccaactgtctaacccccttcattttagagagcttgaaacaggccaaggtgggaggattggtagggaaattctatttatctgcttacctacatatctacctacctacttacctattcgtctgttcatgtactacttctttctataaagcctttgaggcctcccacaggtctctgactcacaatctggagaactttctaggacttcttgccaccctcctaactttaaataagaatacatttgaggaaattaggaatacctcatgctgtgtagaccttatgtaatcatgaaagcatccacgtcccaagccagaatagttcaacccaaatgcgaagagttgataaagtccattctgataaactggaatgtccagaaggamttcagtgcctttatggagttacctgtaattgtggaaagcttgacaggtaaaaaaaaaaaaaaaaacaaacaaacttaccagaagacaccctgaaactttcaggcctttaagtttgacttggtgggtttgaaaggaagctaaacagaaaataatgcctttaagtgcagttaaaaataatact

SEQ ID NO: 884433 - DNA, 611 bp, Homo sapiens
ggaaataacacctcaatccaaaggtgtgagtcaaatgctaagaattttaggcaccttggcagagtgttgaagaaattattttgggagcaagtacatggttctgcttgaaatattccctgtgactctgtccatagattctgccttggcaaaggactaggtcacggtcaccatcaccataagccattttattgaagctgagcccatagtgctggacaactgaaaggtcttcagctactgctgagatactaagataagtgttttgtttcttcagwccactccttctggatctatttgttattcaactgtagtgctatttaaattacttttctttgaccaactagctggaggcgtgaggatgttttgtacctcctccctgccacttctacagccatggttataccttcataaacactcgtcacctaaaacttccttctacatggattctgcctttgcctacagcagcatttctcaatcttgaatgtacctatcacttgaagagcttgtgaaaatgcaaattctaattcagtggaatggccctcgattcagcaattttaacaagctgtcaggtgatgctgatggtgctgctctctggaccacactttgaacagaaa

SEQ ID NO: 884434 - DNA, 591 bp, Homo sapiens
ctaatctcagtgatatcacatactagccatgtgggcttggaaaagtttgtgtcacttctctagtcctctagttttctcatgtatatattggggctaagagtaattcttgcctttcatatttttgtgaggaatatatgagatattgcacaaatagtgcttatcatagggcctggcacagagtaagtgctgcctgtcactatgtgaaagtgaaggcaggaagccccaggacatgttccactttgtgccttcgattttgatggtctcctgacaagtgcttttttagaacctcacactgtaacgtcccagggaaaacatacatggctagcatctcagctgatggaagaagctctctgctcctcactaattaagctaattaacaattcatcataacagcctgtgaggttyccctgtcacgggtatctctactcacaaaaaaataatagcatcattagcaacaacctgtcaggaaaacaaggcacaaagttctgaggaagcagtcacttacttgctttgtctaatgttttcttttctctctctggaaagaataacaagttgtgagaaagatattttgccctggactgctaggtaggg

SEQ ID NO: 884435 - DNA, 613 bp, Homo sapiens
catcttgatctttctgccttttaccctcttggctacttggacttctgttgcttctttcatctccacccacccctgcataatttaatctcatgtttcatggattccttcttctactggagttatgtgtcctgaatccaaccattcagccagacctactatatttctctctctttctctctctccctctctctctcctttgagaccctgaaaagctttaaggaagactctcrcctcaactctgcttattcaccttctcaatatagtaatccagagtgttacaaaccttgttttgacctcatgatttctcaccttctcttcctaccatttcattccgttcatacacactctcaagtgtcaggattacctcttccaaatctcccctttctcctttcccattcacttccccaacagttgggatggaccccaggaccatcactcttcacatgtcttgagcatgtgttaggtgtcaggagtgaaccaagcacttcacatttattttatttaatcttcacaaccaccagtgtggtcagtgctgtactttctccatgtatagaagtggaaatgaagatgtggggaggtgaaggcattcatccaaggtcacattgagagtaga

SEQ ID NO: 884436 - DNA, 613 bp, Homo sapiens
catcttgatctttctgccttttaccctcttggctacttggacttctgttgcttctttcatctccacccacccctgcataatttaatctcatgtttcatggattccttcttctactggagttatgtgtcctgaatccaaccattcagccagacctactatatttctctctctttctctctctccctctctctctcctttgagaccctgaaaagctttaaggaagactctcgcctcaactctgcttattcaccttctcaatatagtaatccagagtgttacaaaccttgttttgacctcatgatttctcaccttctcttcctaccatttcattcygttcatacacactctcaagtgtcaggattacctcttccaaatctcccctttctcctttcccattcacttccccaacagttgggatggaccccaggaccatcactcttcacatgtcttgagcatgtgttaggtgtcaggagtgaaccaagcacttcacatttattttatttaatcttcacaaccaccagtgtggtcagtgctgtactttctccatgtatagaagtggaaatgaagatgtggggaggtgaaggcattcatccaaggtcacattgagagtaga

SEQ ID NO: 884437 - DNA, 597 bp, Homo sapiens
ggcttgtagaaacactgtgtaactgagacctgctgatttacctcactccggttgtttgcagtctgtaatagtcttggacaagtgtcttaagtagttcaagtgtcaacgcttgcatacataaaaatgacaatattaataatatctggctctgatgacaggatgcatggctagtgcttagtacagaaatgtaggagttgttccataaatgccagttgttatattaacacttgatttggaaayactgatggcctatcttagagtcagctctgatctagaattccaggtgttagctcaggttctaaatgctgagtggtactctgtgtcattcctcaaatactttcgagtaggaaatcccgactgtttttctttatattcatatgcaatacctctggccaccaattgagtggcgttttctttcacaccaagcaattcttcaattctctgtggatgacaactggatgtcctacaattcaattcaattcccgcactatctacctgggcttagtgcagatcccacaagttaagggctcagtcccacaagattgctctcccccaactttcagacaccaattgcaaatgagaggttacccacaactt

SEQ ID NO: 884438 - DNA, 588 bp, Homo sapiens
aaaacataacatgtatttatcttgtatgattcctcctaaatggagttaatgagttggggaaatgactggttttccatttatatttggttggctatttgtctcttagattttaatgggggcatgttggatctgggggagcaagggtagtgggaacaagagctcttggggaatctctggaagatactctagcagtggcggaagtgggactttccctamctgctactgttggctgggctacatttcttggagacattggaccctcactcaatagagactttaggaaaagtcccaagaaagatctttccattactccagaggaatcactgagtcgtacttaccaggaaaagtctggttttgtcatgctgggagtcaaatcatggcgtgtatttacacccttcatgaaaaggcagtgcagtatggtgaccatgagtgagagctctggaaacgcgcagttcttttccaggcgaatgaacttagtcgcttgactctgtgctttggtgtttccatctaaaaatggggatcatagaggagctatatcacaggtttattgttgaattaaatgagataatagatttacattgatgctac

SEQ ID NO: 884439 - DNA, 627 bp, Homo sapiens
aacctatgattacatgagttgcttttctacttgatatatcgttgaatcttttctcatgtctacaaacattctcaccatcaattttaacaccttcctgatatttcacagtctggattttaaaaacccataatttatttaaccaactgcttattgttggtattttttagaatgtattaatatttacattattcccaattttccctgttagacacaaaatgacaaaaaagaartgaaatctaatgataaatgactgagagtaaaattgctcagaaagggtgtacgtattttaaaggctttggatacacattactaaattgccttccaaaaaattatgtcaaattatactcccaccagtcatgttagaaagtgcttatttcagccgggcacagtggctcgtacctgtagtcccagcactttgggaagccgaggcgggtggatcacaaggtcaggagtttgagaccagcctggccaatatggtgaaatcccgtctctactaaaaatacaaaatttagccaggcgtggtggcatgtgcctgtagacccagctactcaagaagctgaggcagaagaatcgcttgaacctgggaggcagaggttgctgtgagtcaagatcacaccactacactcc

SEQ ID NO: 884440 - DNA, 627 bp, Homo sapiens
aacctatgattacatgagttgcttttctacttgatatatcgttgaatcttttctcatgtctacaaacattctcaccatcaattttaacaccttcctgatatttcacagtctggattttaaaaacccataatttatttaaccaactgcttattgttggtattttttagaatgtattaatatttacattattcccaattttccctgttagacacaaaatgacaaaaaagaagtgaaatctaatgataaatgactgagagtaaaattgctcagaaagggtgtacgtattttaaaggctttggatacacattactaaattgccttccaaaaaattatgtcaaattatactcccaccagtcatgttagaaagtgcttatttcagccgggcacagtggctcgtacctgtagtcccagcactttgggaagccgaggcgggtrgatcacaaggtcaggagtttgagaccagcctggccaatatggtgaaatcccgtctctactaaaaatacaaaatttagccaggcgtggtggcatgtgcctgtagacccagctactcaagaagctgaggcagaagaatcgcttgaacctgggaggcagaggttgctgtgagtcaagatcacaccactacactcc

SEQ ID NO: 884441 - DNA, 627 bp, Homo sapiens
aacctatgattacatgagttgcttttctacttgatatatcgttgaatcttttctcatgtctacaaacattctcaccatcaattttaacaccttcctgatatttcacagtctggattttaaaaacccataatttatttaaccaactgcttattgttggtattttttagaatgtattaatatttacattattcccaattttccctgttagacacaaaatgacaaaaaagaagtgaaatctaatgataaatgactgagagtaaaattgctcagaaagggtgtacgtattttaaaggctttggatacacattactaaattgccttccaaaaaattatgtcaaattatactcccaccagtcatgttagaaagtgcttatttcagccgggcacagtggctcgtacctgtagtcccagcactttgggaagccgaggcgggtggatcacaaggtcaggagtttgagaccagcctggccaatatggtgaaatccygtctctactaaaaatacaaaatttagccaggcgtggtggcatgtgcctgtagacccagctactcaagaagctgaggcagaagaatcgcttgaacctgggaggcagaggttgctgtgagtcaagatcacaccactacactcc

SEQ ID NO: 884442 - DNA, 506 bp, Homo sapiens
aaggagctctgttagaggctgagaagaactgcagacactggtctcaaattcccaagttttctagttgaaggagctctataagtcccactggtgcttagcttcttacatacaaaaatgagggaaaacggtctctgctttgactsaattttgcaacctgagtgaaggtgatattttaaaaaataacacagacactcaaacattgctgacaataaggaaaaggctttgtggtttcaagcataacaggattccctgagtcttaggagtccacttcagatacttcacagagagaaatattgtttcttaaatatgagagaaacagagaaaaaacccagatttttcctctttcattggctacagaaacaattcaccactaaaaataaattggcaaaggtagaggatagcaatgtgcagactggcattgagagtgaagaaatgatgaagaaaagcacacaatgaacactctttgtttagtcccttgctttaaaaaatgccttctgatattagca

SEQ ID NO: 884443 - DNA, 460 bp, Homo sapiens
ttaaatgtcttgaacaaataggacttctgccctttgtcaaggagctctgtgtgcatcttcaatgttctgtcagtttacaactctgctttactctcacttcctgcttgtgtagggtctcaggtcatccagaggtgagagattaagaccytacttggtgtcttctgggcacatgcacagccatgcacctgttcatggcattccagattcccagggatatgttggaggttttcaaagttccctatgaacatctcatttcctaaacattaagtttttgatcaacttcttatttcttccaactggtctgtgatgttcaataatttccaccattttttttttaacaaattctctgggatatgactttttccagttatcaaattctgtctcgggttaaataatgagaatatttgcaaatatggctttttcagggagctgccagttaggtaaaattgtgacacttctc

SEQ ID NO: 884444 - DNA, 648 bp, Homo sapiens
ttgaagtgtacaatactgtattgctaactataggcactatattttacagcagatctctagaacttactcatttattctaacaagaaatttatattcattaagtgacaatgccccattactgtattctctgcttctatgagcttgactattacagatacctccttaaaagtcatatgttgacattcttttggtaaatatgctgtttttcattacaaatagaaaagaaaatcacaaacagttgtcattcacagaggatgaacaatactatttatttacagttgtgcctcaaggctagacttttctcctataatttcttataataaagtctaaaaagatctgggttgtctggacatcccacagaacatcattttgatccatttgatcaatgacataattgggttgaacaggataagcaagaggtggccagcatgctggatgcaytggtaaaccccatgagagctgagatgattcaggagctttccacttcagaggtgttttcagggatcttatcccattttggcatctgctgctccaaggaccataagtcaactggtaaatgccacaatccttcttggagcaccacattgctctttagcattttaaagactctgagaagtatatgcagtaaaagaaacttgtttaattttg

SEQ ID NO: 884445 - DNA, 690 bp, Homo sapiens
aacactgcaatcaagtgcctatcttcacttgtactgaaggtttttattaatgaggagaatgtaaatgactttgggatatataaagacctctaacatgtgaagcataatgataatgatatgaaagtgggagtgtcaatatttcaggtcgacagaccagaatgcttatagaaagcattacatgaaaaaagagttcagaggcaagagagtcgaagaagtcaactcactcattgcattaggctcatatttagaatcagaataggaattgctacagaatttatagacagatggaaaaagcagcaggatgtcatagtggcttaacccagagttgagcgaggctcaaaaagctggtgrgaatgccacagaaagcaaaaagcaggccaggtcactgaggaaaacaggaaaaatagtccattgcataggaaccagatcaaggatcttaaggcttaagaggaatgaaaaagtttctttaatgatgtgaaacaacaagaaaatgatacttagggaaaaaatcaacaattaagaagtaggagctttggaattcttttgctttcaaatgtttcccattatactcaactgtattttagtctaaacactcataacattattgtgcatattggtttagcttctctctctcaaccacgttatggactctttaaggaggagatagtttctccattcccagcttttagc

SEQ ID NO: 884446 - DNA, 637 bp, Homo sapiens
acctctcatacaagtaaggggattagcagaaaatgagaagcaaattctagttgatcaaaaacttcgtgatatggtatgagttataaatgtcctcatttggaaaacaaaacaccttctgtctgtattagcaagtaaatattcttgatgcagtcttcatttattttataatggattcatcttttcttctgaaatttagcagatattatatggttatataaatattttataatagttgattaatatattctagccctacagacatttgaataatgaaatcacatttggttgttacctgtgcaaacactagcatttcagagctttagaccttctagactttaaacacaatcaaccaatcttttatcaaaattaaaagaagcagggtagtctttaatgctgataaccgatatttctagktctccttcttttaaatacatagtaatattgcatttcttcttccctttaaatcacatgtggccatgtgactttctttgaccaataaaaggtaaatataactgacatttgttatttctaggtagagacctttaaagttcccttccatctgccataattcccagttgcactccaaataggaaaactcccttcttagacagttgagttaggacaatgtacaatataa

SEQ ID NO: 884447 - DNA, 592 bp, Homo sapiens
agctctatataacttctctgttgatttccattaaatatttaaggaagaagcaaagtttttgttttgttttgagacagagtctcactctgtcacccaggctggagtgcagtagcgtgatctcggcttactgcaacctcagcctcccaggttcaagtgattctcctgcctcagcttcacaagtagctgggactacaggcatcaaccaccacacccggctaatttttgtatttttgtatttttagtagagacagggtttcaccatgttggccaggctggccttgaaatcctgacctcaggtgatccgcccgccttggcttcccaaaatgctgggtttacaggagtgagctaycacgcccagctggaagaagcaaaattgatgtacaagcagcttactctctctactaccagaggcagaataagtaacatgtcattaagggtgaatatatggagtaacacaatagaacaagcatgaacttaattcctaatagaccctaatccaaatactctctatgccacatccagtagtatgcctggagtaatctctttaactttctaagcccaatttttctcacatataaagcaacattaatat

SEQ ID NO: 884448 - DNA, 593 bp, Homo sapiens
atgctatgaacagctctatactcataattctggcaacttagatgaagtagacaaattccttgaatgacactgttatggaatgaattgtgtcacatcaaaattcatatgttggagtcccaacccccagtacatcagaatgtgactacatttagagatagggccttaayagagataattaaggtaaaataaactcatataggtgagccttaatgcaatataactagtgtgctagtaagggaagggtattggggggctggagggcaggtggggatggttaacgtgtacaaaaaactagaagaattaataagacatattatttgataacacaacagggtgactacagtcaacaataacttaattgtacattaaaaataactaaaagagcataattggattgtttgtaacaaaaaggataaatgcttgagggaatggatatctcattctccatgaggtgattatttcacattgcatgtctgtatcaaaacatctcatgtaccatataaatatatgcatctactatgtacccacaaaagttaaaaatttaaaaaaattaaaaacaaggggagattatgacataaactacctggactaag

SEQ ID NO: 884449 - DNA, 592 bp, Homo sapiens
acccagtttcaaaggagtgtttctaacatgtagcagggcaataggaagaagagtaatcaaagggagatgagtcttttgagggagttttctgatgttccttttcataatatcatttgtctcttctactgttccttttcataatatcatttgcctcttctacctttcctgtgaattgtggtttccaagcacaatggagatggtattctatgcctagtgcctttgataatccctgggtgacagccaccttgaatgaagggccattatcgctctggagttacttagggagtccaaagccaggaattatctcattaattagtacgtttatcacctcaaaggctttttctgtctgacatggaagtgcttctacccagttygtgaaggtatctacccataccaggaggtactggatgccccttatctttggcatatgggtgaaattcatctgccagtcttcccccgtgtagcctcccattctttgggttccagcaggggagaacctgttgattgaggaaattatttttaaggcaagtctcatgagcattaacgacctgtttgattatttttagcagatttttacctgagaacaaccttt

SEQ ID NO: 884450 - DNA, 651 bp, Homo sapiens
acccataacctttgcggctggaagtcctgtgctctgtatatgcctcaaacataaggatggtcctaaaagggtctgtcattagtcctttgaatgaaaaatacattgcataaaacataatttatttcttttaactcattaggagccatttaaaagttgacagcaaagtttattccttaccaaaaaaggggaggctgcagataaaatggtgttctccccatcagcacccggatgttgcacatgtagggataacagctggcacggggatattaataggcagccattgtttttgcacctggctggggatgacagtctgagactataaccagtgcagctgcggaggttcttgtcagatttttctgagccatagaaatgaggaaacaatcattttagatctatgacatactagccttcatgaaatacctcagrtattaaagaaggataaatgaagtaaagagtaaaatatgattattttgaacagtctccaaactatttagtgcacttttctattatcttaagaataaagaacattgattctaaaggaaaacaaaatagaagaggtatttgagtaagagaaaaatatggcactaaacattggtatttggatatgtgtaaacgttgtgtgacttaagttcttagaaggtacaactgaga

SEQ ID NO: 884451 - DNA, 625 bp, Homo sapiens
gtggatatgctggacaaagggatgattcacatcccgggcaggagtgagcaggatgacatgagatttcatcacactactcagaacagcatgcaattttaaatttatgagttgtttacttctggaattttccatttaatattttcagactatggttgacaacaggtagttgaaaccacatgcagaaagagaaaccatagataaagggagactgccgtattattctttcttcttttttgagacagagtcttgctttgttgcccaggctggggtacagtggcacgatcgatactcactgccacctccacctcccaggttcagcaattctcgtggcacagccaccctagtagctgggtccacaggtgcatgccaccacgcctgactaattttttgtagagacggggtttcacgatgttgccaggctggtctcgaactcctggcctcccaaagtgctgggattacrgggttgagccaccgtgcatggcttcctattctttctaaagcttcttgtttatgtacttctatcttcagagttctctctagaattcctgatttagatcaaaatttgattttaagcaatagctttaagaaagttaatgagtataaatccacttgtgcttatcagaac

SEQ ID NO: 884452 - DNA, 541 bp, Homo sapiens
tttcatacctgcctactgatgtatggacttcagaataacgtggcctatgtatattttccaggattgttcttttgtttgttgtttttcacccttcctccccctattttctcttcacaagacatgggagttcacagccttctaaaaattagctttcctaataacttgggacttacctgtctaggaataaaccatcctagcatgagcgatcagatgaaatctgggaccaaagactcatttttcttctaaaatgctttctccaaaaaaaaattttttttwaaaaaaagaaaagggggcaaatgtaaaggaaaatatcttgggcccccaaatcactaagttaaaaggaaaattcaagctaggaactacttaagacaaacttgcctcccattctattcaaagtcatccctctgctcattgagataaatgtgtatctgactgcctccttaggaaaggtaaatcagaaactcaaaagaatgcaaccatttgtctcccacctacccgtgacctggaagcccccttcccgcttcaagttgtcccgcctttc

SEQ ID NO: 884453 - DNA, 654 bp, Homo sapiens
tctgggcactctggttttggtacccatggagtagatagtttgctcaactttaatttttctgttagaaatgtataagctggaccagttgaaatgtatggtgtcagctattttttctgctgtttattatctgttctcttcaactagggcatgatcagaacaataatctctgagaaaaaaaaaagaaaaaaaatttttaaaaaaggaaaataaataagagcataaacaagatgaacttttcccttgcagattgatgtggatgatctgctgctgtgggctgcttcttcaatatcatctcatccatttttaaaaygagttattcatttgtaaactgttgatttctttgggtcattgtcctcatacagtttttttgtaaagtatcagtgattttactattcttctactcaagcttcatcataaatttgatgtttgttcttccttcagttttcacagaattcatgttgctctaataggagctgttttaaaagtgatgtcttattcttcttagtgcctcaaactagatcctgttcaaacaagttataacaagctagtacaagtttattttggtgcaaaaaaattgaaatctcttcatagttttttcataatttgcattttccatgaactttgtgaagaccccttgtatatcccgttccaaag

SEQ ID NO: 884454 - DNA, 579 bp, Homo sapiens
gccccgactcgctcggagtagttgcccttgcggagcaagcggtgtacgcggcccacagggaactggagtccggcccgcgaagagcgggtcttagccttagctcgggcctttccgccttgcttgccgcgtccggacattttgaattcttaaaaacgatgttaagcaatgaagacaaaaatgtaaaagtgarttttgttagcaagtgagaaactattatacttggaggtcgaattgtaaataacgctatttgattggctagaacaaccaaccaattgcaaagaaacgctagaatcacctaatttgcataccacagggcacacagagacaattcatccaatcaatgtgtaagcttttaaatgccagtttacgataggagctctacaaatattaccagctgcagagtgaggacacttgcatttctctttaggttgtggacgaagtgtttatttatcatgcctgaacctgctaagtccgctcctgctccaaaaaagggctccaaaaaggcggtgaccaaggcgcagaagaaggatggtaagaagcgcaagcgtagccgcaaggagagctattccgtgtacgtgt

SEQ ID NO: 884455 - DNA, 569 bp, Homo sapiens
ctaagacaaccctcaatcaatatgattgacaacataaggattaaacattctccagccttctccatgatgaaacaactctgaagtgtgacttacaccattaacagacatcccctgtgggactcttccaaagttaccctcggggacactttgcttcatactcacttctttcccttctttcttccagttccctacgacctctggattttccctgggaacacacttcctaacactttcacacaaacctttgcctcagggtctgcttctggaaaccaacctaaaacaggaaaccatggctgccggaagtccatggtggtaaatygggaattactagagaaggaatgaagagaagaccccaaacgtgtccgttgtccccctggttggaccccctccagaccaccttggttctgaatgtagaaacttaacctctaaatatctgcccaggccctgccctggtccagaagcagagctggaactcaaaaccagttttgctgaaggtgtgcaccttcccaacatccactggtgagaacatcccagcacactgctctgtaacttccagaattcattccttt

SEQ ID NO: 884456 - DNA, 545 bp, Homo sapiens
gaagtgatccagctctgagactcactcctaatccagtgttccagctagtccaatcagacaggcacttgttttcatctgcagatatgttggtgttccaagtagacagggattgtggctctacccatgtgcaaacctgaacctatggggatgctgttatcctgaagttttccrgaaaggctgtctatgggtgcacccatgccgacctcctgtgggagaagacccagctgtgtctgtagtggtggataagggggaaaataattccccttcttcaagacacttcatgagcaccagggctgccagaccattgtagagtcacaggcttctcctcaacctccttagcccagcacttcacctgtgcctctgctgaaagagattttctacaagcagaaaagttttgggacttaaggcctgccacctggattcttttgtcccatggggtgttcccttaatgtggtgcactcccccttcccctaggagtaggagtccctgagaaccagactactgtgaatgctgctgctcctctgggtctagccacccagtggagt

SEQ ID NO: 884457 - DNA, 603 bp, Homo sapiens
aactagaagggaggccttgagcattccaaacacatttctagggcaccagaactcacaaacgtgggattaatcaccagacactgaaaattcaatggtactattgtgtagatgacacataataaatctcaccagtcctgacaggcgtgacctatttactgccctagtggtggtaaaatckaacccttgtcaaacaggatgcttttgttagttcctttttacagtttagtatccatgtcatcaggaataatttgcatctaggtcacagattcatatctgttgctgaagtcaaattactggtgaggaagattgtgggtaaggagaggcttttgcgtggtggcattgtgcaagagtgttgctatcagagtctgaaaatcaaccttcacctgagatttgacaagttgaggtgctggaagtgtgacttccaatttggagtcagtttgtcactttcagcttcattaaaatacaactgtggacaatcttagctgataattgacaaaacattccttattttgctagaaggttggttctcattcttttagggatgctcccagtcaaacttgattaaagggaaagttttatataattgttaaaagcaacttttgt

SEQ ID NO: 884458 - DNA, 686 bp, Homo sapiens
caaaatataacaacacccttgctgtgtgttttgtaacaggaatagtgaaagctttcatgcatttctttgtaactgaggccatgggcttatgccatcatcaaataaatatttcaaggataaagtgaaatagtaccccagagagtctaattgtgctcctttgaagtaacagtcatataatctctctttgcctctctaccaggtgggttttatttgagcggatggagagatagcttgtttctgcttgggcagaggtccacaaaccagatggcaggtaatatctgaatttaggtgtctattccactcattcattttttyccctttctaactaaatcacaacaaccagaggcatatagtaaatataaattcgtaaactcgaccacataaaaattaaaaaaattcttgcccccaaaataagcaaaattaaatgacaaatgacaaactggacaagataatttcatggtataaacaaagagttaatttcctaaatatagcagattggcatcatttatagaacataacatagttatgttctataaagtcactgagaaacctgaattagcgactgctgaactattgctcctatgggaaataaagggttagttccctgtgagagcctttggtcacaagattttcctcaaccaatcaatatgtaacgttgttctgtatgtatttctatttaaagacac

SEQ ID NO: 884459 - DNA, 546 bp, Homo sapiens
tgctaaatgttagagagacagactccagcaccatagccatttaaagcttgactacagcaaattatgtttccaagttttaaatattcagcaataagctaatgttacattatgcaagtgtctttatttgtcatgacagaaacggggacctcyggtagctgggttgctgcaggaatgggctgagtcctagggtgtgggcatttcgcactaacgctgtaacttggctctgtgctgttcttctctagtccaaggccctaggttactaacttatggaaagtagccccaactggtggggagtctcagaatacaattctggtacacatcgggcaatgcttatatcttcttcttctattaatagatccccaagtcatccaggagagagctactaacactcaaggccccttatggaaggtctagaaaacaaacttaactaaaaagttagcagtgttcttgttgagtatattttccccgaaatgtattttagtttaccttttgtttattcatttagtaaacactgcttaaagtctgttttgtgagcagcaatattta

SEQ ID NO: 884460 - DNA, 615 bp, Homo sapiens
taggcatgaagcaaatatttgctaaatgttagagagacagactccagcaccatagccatttaaagcttgactacagcaaattatgtttccaagttttaaatattcagcaataagctaatgttacattatgcaagtgtctttatttgtcatgacagaaacggggacctccggtagctgggttgctgcaggaatgggctgagtcctagggtgtgggcatttcgcactaacgctgtaacttggctctgtgctgttcttctctagtccaaggccctaggttactaacttatggaaagtagccccaactggtggggagtctcagaatacaattctggtacacatcgggcaatgcttatatcttcttcttctattaatagatccccaagtcatccaggagagagctactaacactcaaggccccttrtggaaggtctagaaaacaaacttaactaaaaagttagcagtgttcttgttgagtatattttccccgaaatgtattttagtttaccttttgtttattcatttagtaaacactgcttaaagtctgttttgtgagcagcaatatttaatacgcttttgagggatgaaaaaaaggatctattgaaaaagatataatca

SEQ ID NO: 884461 - DNA, 621 bp, Homo sapiens
gtgcataaatgaatgcacaaaatagaatatgaaatgataatattttttaaatattaaattgatatgtttttaaatttctttaacttataatacttctcagctacctgtacatagaatcaatgggttttgttatttctgaaaaataatagatactcctactccagagcagagaagttattttttggttttggttctcagagctgacattcttgartctttagtaatacaatgtcttatcatcagaaagagattttctaaatcccaaaagcttccctttactcatcaagagtcagcctgattcaaatcagagtttaattgcaatgagtgggttctgaccctggttgtgtatcagaattacctggggaggcttagaaaatactaatgctcaggccttacttctagagactctgattcaattatctggtctgagatgtagttcaggtaatactgctttgcttttttttttttttttttttaaatgcttcctaggtgattctaatgtgcagcccaataggagaacacttctgtaaactgtattgtttgaaggctggataaaatgacttttggtaagacccattgcatgcaggaaggataatagaagaccagggcaaggagatcaga

SEQ ID NO: 884462 - DNA, 621 bp, Homo sapiens
gtgcataaatgaatgcacaaaatagaatatgaaatgataatattttttaaatattaaattgatatgtttttaaatttctttaacttataatacttctcagctacctgtacatagaatcaatgggttttgttatttctgaaaaataatagatactcctactccagagcagagaagttattttttggttttggttctcagagctgacattcttgaatctttagtaatacaatgtcttatcatcagaaagagattttctaaatcccaaaagcttccctttactcatcaagagtcagcctgattcaaatcagagtttaattgcaatgagtgggttctgaccctggttgtgtatcagaattacctggggaggcttagaaaatactaatgctcaggccttacttctagagactctgattcaattatctggtctgagatgtagttcaggtaatactgctttgctttttttttttttttttttwaaatgcttcctaggtgattctaatgtgcagcccaataggagaacacttctgtaaactgtattgtttgaaggctggataaaatgacttttggtaagacccattgcatgcaggaaggataatagaagaccagggcaaggagatcaga

SEQ ID NO: 884463 - DNA, 625 bp, Homo sapiens
tgacatcatgacacccaagagaccaggagggacaagatcctcgcagaggatagaggctcacccactggagaccagcacaaacctgaacattgttttttgcctgaaactccatctgctgctaccctgagtataggaatgcctccctctgcgttcaggcatgactctgagaggagcggtacagctctcaytgggaggtggaattttgagtgggattaatattcattccaaatcaacttaggccagtacacactgttttacaccatactgaactactttttattttttaatgtgtttttcttctgctatcattgaaagtaggaacgagagggcttataataaagaaagctatgcttcttgtgtgtttggattgtggtatgtaaatttgtgatatgctacaaagaatataagagatgagtttaaatattgacaaggtagagccaaataatttctcagtactatttcacataaagtagcttttagtacaacagaatgatattcagtagtaaaaaagagactgcttattgctatacctgcaacaacgtgagtggaacgcacaaacaatgaacaaaagcagctagacccaaaagagtacatgctgtatcaatccaccaaataaatttgagga

SEQ ID NO: 884464 - DNA, 598 bp, Homo sapiens
acactggcttgattaatctcactttttaacaggtttgaaatcagtaaatgtgagtcctacaactttgttctttttttcaagatcattttgactattcaggtatgtttactatctcatatgaagttttggatcagttttcccatttctgttaaaaaaggcaattgacattttaataaatactgcatcgaatttacagatcaacttggagtcttttaccatcttaacaatacaaagtcttttcattcacaaacatagaatgtgtttccattcactttttaaataaaagacatttatttaatgtctttcaacaatgactttttgtacttttcagtatacaaatcttgatttattcctacgtatcytaggcttttttttttgatgctattgcaaatgattttgttttcttaattttatttgtgggttgtttattgctagtgaacttaattacaagtgcttttgtaaattggtcttgtatcctgcaatttgctaccttcatttattaaacctaatagctttccatgaaatttttaatggttttctatatataagaaatggcttcctctgtgttttctatcatgtcatctggaataaaaataat

SEQ ID NO: 884465 - DNA, 679 bp, Homo sapiens
taggcagcacccctggtacctctttggagatccctgggagaaagagatctggcctgcctacttccagtaacaagcattcatagtgcaagcctttttagaaaccttcaggcaagagtattgctgaaggtaagttctgtgatctggagaatttactgtgaatcctagaatagatctggatgaagactggtcaccatgctcctctaaaattagactaagaattagaagacattaggtgaatatatgagaatatagccaggctcatgagagcggagggatttctaaggtgaagaataatggaaaatattgtgaagaagaaattacttattattatattgctagctagctagctggatagatggacatgtaaactaaagggmaaatttaggatttcatttaatactaatgagataatgattacatctggttaatattaaaaagtcatacaaatagatataaaaagactaaagcatcaaaaagatataaaaagtagctcattcatttatttattcattcaaaactactagaacatctcccatgtggcaagcaccatcctaggtgttataaagacagccatgaataaagaaaagtctatgacatagatattcattcttcattgagaagacagaaaattaaacaaaaaatgtataacataatggctgaaatgtcagataatgacaaa

SEQ ID NO: 884466 - DNA, 679 bp, Homo sapiens
taggcagcacccctggtacctctttggagatccctgggagaaagagatctggcctgcctacttccagtaacaagcattcatagtgcaagcctttttagaaaccttcaggcaagagtattgctgaaggtaagttctgtgatctggagaatttactgtgaatcctagaatagatctggatgaagactggtcaccatgctcctctaaaattagactaagaattagaagacattaggtgaatatatgagaatatagccaggctcatgagagcggagggatttctaaggtgaagaataatggaaaatattgtgaagaagaaattacttattattatattgctagctagctagctggatagatggacatgtaaactaaagggaaaatttaggatttcatttaatactaatgagataatgattacatctggttaatattaaaaagtcatacaaatagatataaaaagactaaagcaycaaaaagatataaaaagtagctcattcatttatttattcattcaaaactactagaacatctcccatgtggcaagcaccatcctaggtgttataaagacagccatgaataaagaaaagtctatgacatagatattcattcttcattgagaagacagaaaattaaacaaaaaatgtataacataatggctgaaatgtcagataatgacaaa

SEQ ID NO: 884467 - DNA, 539 bp, Homo sapiens
cttccacatcttctcaagtatctggacattgaaatttttcataattcaagacattgttgtttttcttaccccctcctcatcaccctttggagaagtacatttaaaagtcactgttctggccagatgcagttgctcacaccagtcattccagcactttgggaggccaaggcagtatgagaccaggagtattgagcccaggagtatgagaccagcctgggcaacaaaatgagatcctaagaactaaaaaaattagccggaaatgatggtgtgggcctgtagtcctagctactcaggaggctgaggtgggaggatggctcragatggaggctacagtgagccaaggttgtgccactgcactccagcctgggtgacagagcaagaccctgtctcaaaaaatgaacaacaataaaaaaagacactgctctgggataccatatcaaaatgtaatttaatatttttttagaagattgagtagggaaagtggcacaccagatagtaaacctaacaaatattaatatcacagatatgacttatatagt

SEQ ID NO: 884468 - DNA, 625 bp, Homo sapiens
tgacttcttgtctttgtagcctgaaattatatattcctgtctcatcattctgtgggtgcttcctgcctacttctggaggttaaccaaccaagtctacaggaacacacaccacctagctctgtccatgtaatatactacagagggtggaaatgcacaatgcttaaatcttcacttgtccaatggatgtttaactcattcactatttccatcctcacacaatgaagacaggtgagcctttggactctgctacttcaagatatttaattaattaaataccaaggtatgttattaagagtaagggggagaatgaaagctgttttgctcaactraatgatagactctcattaccttccaaagaactaaataccttttttcccctttcttatgaaatatggatagagatatgattctcaaaccacttatgtcttcaagatttaggcaagctttataaagctttgcgtatgaaagtctgggaaattatatcccagtttctaatctagtctgtggttttaatttttttctataaaaggatattagaaaattagttatctatttacctctcatgggtttaacagataaagatattgcatttttgaaattaaaggaagctcataattaaacattc

SEQ ID NO: 884469 - DNA, 625 bp, Homo sapiens
tgacttcttgtctttgtagcctgaaattatatattcctgtctcatcattctgtgggtgcttcctgcctacttctggaggttaaccaaccaagtctacaggaacacacaccacctagctctgtccatgtaatatactacagagggtggaaatgcacaatgcttaaatcttcacttgtccaatggatgtttaactcattcactatttccatcctcacacaatgaagacaggtgagcctttggactctgctacttcaagatatttaattaattaaataccaaggtatgttattaagagtaagggggagaatgaaagctgttttgctcaactaaatgatagactctcattaccttccaaagaactaaataccttttttcccctttcttatgaaatatggatagagatatgattctcaaaccacttatgtcttcaagatttaggcaagctttataaagctttgcrtatgaaagtctgggaaattatatcccagtttctaatctagtctgtggttttaatttttttctataaaaggatattagaaaattagttatctatttacctctcatgggtttaacagataaagatattgcatttttgaaattaaaggaagctcataattaaacattc

SEQ ID NO: 884470 - DNA, 601 bp, Homo sapiens
ctccagccatggctaaaagggaccaaggtacagcatgagccattgcttcagagggtgcaggccccaagccttggcagcttccatgtggtgttgacactgcagatgcacagaagtcaagaactgaggtttgggaacctccacytagacttcagaggatgtatggaaatgcctggatgcccaggcagaaatttgctgcaggggcagggtcctggtggaaaacctctgcttgggcagtgaggaagggaaatgtggggttggagcccccagagtccctactggggtactgcctagcagagctgtgagaagaaggtcacagtcctccaaaccccagaatggtatatctaccgatagcttgcaccatgcacctggaaaaaccacagacactcaatgccagactgtgaaagcaatcgagagggaggctgtaccctgcaaagctacagaagcagagctgcccaagaccatgggaacccccttcttgcatcagcatgacctggatgtaagacatggagtaaaaggagagcattttggagctttaagatttgactgcaccgctggatttcagacttgcatagggcctttacccccttcgttttggtcaatt

SEQ ID NO: 884471 - DNA, 530 bp, Homo sapiens
gctgtgtcctcactcaaatctcatcttgaattgttgttcctataagctctatttgtcatgggagggacaaattgggaggtaatttaatcattggggtgattaccctcatgcagttctcatgatagtgaatgagttctcacgagatctgatggttttatatgggctttttcccctcttgctcggcacttctccttgttgccaccatgtgaagaaggacctgtttgcttccccttgtgcaatgattgtaagttacctggggcctccccagctatgctgatctgtgagtcaattaaacttctttcctttataaattactcagtctcargtatgtctttattagcagtgtgagaatggactaacacagtaaattggcccactgcagaaagtggagcactgctgtcaagataccccaaaatgtgtaagtgattttggaactggataacaggcagagattggaaccatttgaagggctcggaaaaaggcaggaaaatgtgagaaaatttggaacttcccagagacttggagggctc

SEQ ID NO: 884472 - DNA, 609 bp, Homo sapiens
gtaaaacaaatttgagaaagcggcttaatcctcttcctcaactatgaaccattaggcattgtgtttttaatgtaaaaagaacttggaatttagatccaaaatagttattcacatataatattttaggtattgctctaatttayttttaggccattgttcttagtcagaattaaaagctgcacccttgggaattataaccctggcaagaagtggggctggcttttgtggcctccactaactcatttgatcaaaaagaatgggaattctttccctatcatccataaaatgtgggtcatagtaactactttttctcccggaaaagctatggaaataataaccttaaatcatcaagattttcaaagagagacattatttcaaaatcaaaatttcaaaactttcctgaaaatgcaaattaaattttaagcttaattaatccaaatttgtacgtggaaatacataccaacatgtatgctaacatgctcttataaaaaggtcagcctcagaaacaattcttttactagtttatgaaaaagaccaacttagaactggtgccagagtcagcattccacattattaaaaagcaaatttaaggatagggtttattacagg

SEQ ID NO: 884473 - DNA, 553 bp, Homo sapiens
gggcaggctgtccatccccaagggccccaaggcctagctctggcgtctgttcctcgcagcctcctcgccctgccgccctccaagctgagggcctcccctggggtccctctttgctccccatccttgctctccttctgcccccactgccacccctgcagagtttattccagttgttcacttactggcttttctcctccagcgcagctctctgagctacytgaggtgagagaatttactctttaaaaagtaaagaaaaacttgattataaaagtaatctatgggccgggcacggtggctcatgcctataatcccagcagtttgggaggccgaggcgggtggatcacctgaggtcaggagtttgaaaccagcctggccaacatggtaaagccccgtctctactaaaaatacaaaaaaattagctggccgtggtagtaggctcctgtaatcccagctactcaggaggctgaggcaggagaatcacttgaacccggaggcggaggttgcagtgagccgagattgcgccattgtactccagcctgggcaacaagagcaa

SEQ ID NO: 884474 - DNA, 587 bp, Homo sapiens
ctaagacgccagtgtaaaaatgtaaatatgatacattgtgatttttactagaatagaaattccaacaattaaagcctctcacaagtagaagagatttcagagtaaagttgtaagctttcccatcctaggagtttcgagcagatgctggatgatctcttggtcatgatagagtatactggatcctagcattagatggggatatggactacatgacttgaaaagattstcttcctgggatgcttagactgtattagtttctgtagtagctacaatgcagtggtagttttggggttaagacagaagtaatgtggcagatattcctggttgcatccactaaattcaatctctgcttcttaattaggagaaatccaattttgtcccaactatgcccagcttaaagtacacagcttgtacacagcttgtacacagcttgcggctataggtgggtttgtggcacaattctggccaatgagattcaagatcgagttaccaggtggggctcctgggaaagcttattaaatggggctgagtaagggcctttttagcttttatcttttgtcttttgtcctttctcccatttttatttt

SEQ ID NO: 884475 - DNA, 647 bp, Homo sapiens
ttattgtccatccaggtttagaagtagacttttaaagaaagagagtaaagtatttaaattttttgagtttatgtatttgtttattattctttttatctccaatgcttggcacagtattctaaaggccctcaagaagtgtttattaaatgaatcagttaacaaaaaaggtatttatgctactttattaaatgagagaagaaaatacatataataacaacgcctgcctatagcgtggtctctatgagaattcttccagtgctgtttgaaatactgtaccactgagrccaaagaggacacagtgactgagcttagcatatgctttaggtaagtgatttgtgtaagattaatgtgtgcatagatgcaatctcaaaatttcaagacagaaaatgactgctttttggaagatgtttattaagagcctatggcatgccagacatgcatgtcctacccatgcttctggagctcagtagaaagagaagttgagtgagggtggtgatagtttcctcatatggttgtcaggttattgtaaagcttaaaaatagtgttccttttctgccatgggcttgaaaacaaacaaacaaacaaaaacaaaacaaaacaaaaatagtgtttagcactcaaatacctttgcataagtattaatagtc

SEQ ID NO: 884476 - DNA, 679 bp, Homo sapiens
ttgagtagtgcctttgttctcgttggtgccctttcatttctgttgctgttgtcccagctcagagcttactttcctcttgcctgatttatcctaataacttatttaatagcatcagttcttccagtgtcaacccccaccttagtcattctaaatactcttgacagaattctcttaaagcactactctaatcgctccctttccctacacaatagaatcctaacttcttggcataactttaaaagcttttaatgatctggctaccaactacttcccagcataattttccatttcttttrtacatcataggtagccattctctgaaaccgtccttgtactttctctcctttgtgtcatcactcataccattccctccatctagaatgcttttgctccttctattcctcccatttcagttgaatccagcaaatctgtactgagtgtttgctacatgcctaaggattgtaccaactactttggttccaaagatgaggataattatcctttccctcaaagatctcacagacttatgtagaagaattggtaaattgaagttgacatattgcttcctctataaagctttcctaattttcaagtttaaattaatttttctttttttcatatgcttttcttttttttaaataacactgacttgtacttttcaaatagaatgtgtgtatgt

SEQ ID NO: 884477 - DNA, 579 bp, Homo sapiens
tcctttagtgggtttgaagggtacagcatggtgcctgacctgtagtaggtggtccataaatgttagctataaaatattactattatttaaaaggttatttaaaaccctgaattcagcagacatttattgaacacctactgtgtgtcaggcactgttttaagagctagaaaaaagccataaagcaaacaaagattcctgtgcttgaggaactcaggttttaactggggagayggataagcaatacccaaagtaaataagtaaattatgtggcagattacaagattattagggccatggaccaaaggaaaggcaaagcagggtaagggggatcaggcatgtccaagaagaagaggtgagatttaagcaaggacttgagggaggtgacagcattaattgtgtctcatctcctcagtcaagagttgatgtttcaaatggcaagataaatgactgtaaaaatgcctgatgttcttaactattagacttaaaccatacgaaaaactgtacgctttttcttttctcgttctccacgaagtaagaaaatactgtccctttctttttcccctcaatgacaataaaata

SEQ ID NO: 884478 - DNA, 679 bp, Homo sapiens
agaatctagtaattctacaaacataaatcaacctaccatgctgtcatttaacgtaatatagtaatagttcatttataatagtcataatttgagatacaataaacttggtgtttatatcatgagtagataaatattgcctttatatgtttgtgcttagatttttcttcctgcttttgttttttaataagtttaattatttgtttcccccggtgtatrcttttaagctgttctgtaaaattttcaagctgctccattggatccactacaaaaagaatatcaatttgttcttcagaattctcatatttatctgagaatctatgaattctctcttttctattttcatggttcaggcctactgtacaagtcttttttctaaaacttttaacactttctaggttgaaacacatgttttctggatcccatgctctcctctttctcctttatattgtgctgctagatttgctgggagaatcccctcacagcttcctaagagatttgacttccgttctgtaggtggaaaagagggaatcatctgttagtgcaggatgtggctgatattctgctccatggtgaaatgcctttgaccagttcccttcattttctgccctgcacctctaccctaccttcactaaattaatacatccaaatatttaatatctcatgaattctgcagagttaa

SEQ ID NO: 884479 - DNA, 679 bp, Homo sapiens
agaatctagtaattctacaaacataaatcaacctaccatgctgtcatttaacgtaatatagtaatagttcatttataatagtcataatttgagatacaataaacttggtgtttatatcatgagtagataaatattgcctttatatgtttgtgcttagatttttcttcctgcttttgttttttaataagtttaattatttgtttcccccggtgtatgcttttaagctgttctgtaaaattttcaagctgctccattggatccactacaaaaagaatatcaatttgttcttcagaattctcatatttatctgagaatctatgaattctctcttttctattttcatggttcaggcctactgtacaagtcttttttctaaaacttttaacactttctaggttgaaacacatgttttctggatcccatgctctcctctttctcctttatrttgtgctgctagatttgctgggagaatcccctcacagcttcctaagagatttgacttccgttctgtaggtggaaaagagggaatcatctgttagtgcaggatgtggctgatattctgctccatggtgaaatgcctttgaccagttcccttcattttctgccctgcacctctaccctaccttcactaaattaatacatccaaatatttaatatctcatgaattctgcagagttaa

SEQ ID NO: 884480 - DNA, 658 bp, Homo sapiens
ttaaccacagcctatgtgaataattgaatttttccaatgtaagacaaacatttcctaatggattaaaaaagaacattgagctatgcattgcttacaataaaaaaattgaaaataaaatgacacagaatagttgtaaatcagaggataaacctacgtataccaggcttatgttaagcaaacaaacaaaaaagacaggaaaatgtaaacattaggccttcaggcaaggttgaatttaaagaagcattaaaaaagataagaaacattttatattggtaaaaggtttagtcctcaaagaatatataataatggtcatattcatcttaatacatagaattcacataaatactactcctaatagttcatcttgatacttgtaccataaatcttagaaatacaaagagagccagatgaagttataattagagtaaaaaatattaatacacttctcccagtatagagctagacctcagtaacaaaamgacaccaatacctaacaccttgggaagttaaaacactcatgtaaactgaaagtgaagtgaaatcgtagttgatgaaccacacacaaaaatctacatatgtattatggttgaaatagtactcactagaaaaattgtagcctcaagaaatttcattagagagggaatggagagaatgcatt

SEQ ID NO: 884481 - DNA, 605 bp, Homo sapiens
atttgtggcaaatttagtagacaggataatggttttcacatggtgttatgaagaaccctagatgacatatgtgtcacacaactgaggtggtccaaaaggtcaaagtcaaacatctctgggctcatgcatctcttccttgtttctaccactgtggcttcatgtayactttctcacttcttgaacttttaagtaatttctttgaagaaggagctccttcagggaaaagcttttttaaaaaaatctatttctctgatgacctagaaagttccagaggacaggctatggggaggatggaaatacgggattagaacagggcttacccagtggaagtagacaaccttaaaaaagcatttcaacctctggtgatgctccagaaagtcttctgaagccacctttccctccaagtattattcacggaatttcaagtgtgacctgagccttccagaaatctccacttcagtgacccttgaaggcacctcatccacaatggacctcatcaatttctgccctcatgtcacttgcccaatagcctctgtctcagtgaacatcacccacattcagccaatcactaaagccagaacctgatggggatgggcatagagtta

SEQ ID NO: 884482 - DNA, 508 bp, Homo sapiens
tggattgcttttcctacttataacatcagtactgtactagttcttgagccagtcctattattgtcaggtcctctagcattcacttatctagagtcatgtctctagatgggatccagagtctagctgttacagaatggttttctttagttgtctttattcttctgcccactacagtctagaacctgggatttttttttaagcttatcacttataaaatttcttttaccctactgctaactcattatttgtccaaccaatggaataatgctttagtctaacttttctttatattttttcttcgttcctatgtgttgccttgacacaacttccaatattggactgtttatttggggctgcacctaacttctgccraccctttccccggaagcctcctctaagctaaaagcctggattatgctgtttacagatagatcttcccaaaccataacaaagccatcctgactcctctatcagcgcctctccagttggatgggttccatctgctagc

SEQ ID NO: 884483 - DNA, 607 bp, Homo sapiens
gctttgagttttaagaccaggaaggtcaatttctatatttattcaaaaaacccataaatatcatgtctatgggacaaccgggccattttcatcaccataatgcagcaactagagagttaactcttagcatagcaagatcctctcaamcctgttttcccagctatacgcaacatttattctgattggctgataaccacactatgctgtttattaaatatattttgaagattacccctgctgtaattctcattaatatatggtgtatgtacaaggatctctgcccaatctgaaggccacagagggatagattttcctgattcttactgttggaccacttgttctttaaagacattaattttatcacaaattctagacaatttggctagaactctaaaaaattgttttttttataagccccaatttcccttgagggttggattctactttttatggtagtagccattagttatggccctattcttcagcagatttgtcaactagaggtaaggcattgctgtccatcttgacccttgacattttcaagcatctacacttttgctattacactcaaacatttgattggacatccttaggtatgtcttggtat

SEQ ID NO: 884484 - DNA, 551 bp, Homo sapiens
ctgaagctgcatcaaaactcctaatgtgggtaaaaatcttattttccattttagtgagtaacccaagaacactataagtagaaggacacccttataaatccaggacaccaagaaagacactcatggtaattgatgtattttatggagtccaggtctagcttgattaagggtccctgtaagccagctttaggatgrggacaaactattatatttgttttactttaaaacttggcttgagatagtcattcacatatatatctttaatatctgtctttttccagaagttgtccattttttggcattgttgcacacttttgaatattacgatttttgttggcccttttgaggagattaatttaagcaataaatatgagttaataattttagttcaatcactactgtggcataaaaatgtcttacgatgactttaaaagcacccatgtttaataaacaatttacttgtttttccacaaatactgttactattagagtagaaacactggctgtattctttttcctttctaatatattcaagtggtaaaattcccaca

SEQ ID NO: 884485 - DNA, 615 bp, Homo sapiens
tgtcataaaaaattagttaatacaaaaattatcataatttttaaaaatgttgcttattgagatatatcagctcccttcaccattttgatctgtgcagaataaatattttataatcaaaagagactctactgtttcaaggatctcatggtgttctgaggatgatcaggcaagctttcctccttgattctggtcatgaaaccaactctctccattctccttcaggccataattcttcttttttwatttttttgatttgagctgaaacaagagtaagtggatacaaagggagggggaatatagaatttttttatacccgttgtggtttgattctaaaataaagaaaaaaatctagagtatttgagttcccactgatatgcctgctatacttacatgtatatttgaaatatacgaactttaaaaattaggattgttaacattcactttaagtgaaaaatcaagacatttagttctcaacaaaagaagtaattttttaactactaaaccagaacctggctagagtagtgctctgttttaaacccaagtaactatttcaattggctatggcaaactctgagactgttgagtgctagaaaaatagtttatttcaggacttga

SEQ ID NO: 884486 - DNA, 595 bp, Homo sapiens
aaagataccagaaagagcaatttggttttggtttattcacttaacttctcaatttcctcatctgtaaaggggaaaataacagtacctaactttgtgggattaaataatacatgtgttaagtggtaagcactttaccaagaacatactaagtgctcaataaatggtacctagcatatagtaggtactcaaaaatgttaaataaatakatcataatttatttagcatttttattgcacaactactatatgctgagcacttttaggcactagatatgaaaaaatatatgaacaagtcaatctctaaaaaaggtcccctcttttaatgcagacaggaaattacaatacatattagtacattctgttatataaattccacacaaatagcatgatagcacataggaatggtacataatccagacacagacaaccaggaaaggcttcccagatgtgactgctaagtattgaaagatgagtgggggttgtgggggatgccaggaaaaaatgtatggggaaggaaaatgcaggcagaagagtaacatgtgcaaaatctaggaatatgaccctaggaccctaggaagacaggggagcgcagtagg

SEQ ID NO: 884487 - DNA, 621 bp, Homo sapiens
ttataaagcacaaaaataaagaaaaatataacataaggcaatgatttttaaaattttatttattttgctcatccttaagacaatgatttttttttttttttttgagatggagtcttgttctatcgctcaggctagagtgcagtggcatgatcttggcttactgcaacctccacctctcaggttcaaacaattctcctgcctcaggctcctgagtagctgggattacaggcgcgtgccaccatgcacagctaatttttgtattttttagtagagacagggtttcgccatgttggctaggctggtcttgaactcctracctcaggtgatccgtccacctcaggtgatccgtccgccttagcctcccaaagtgctgggattacaggcgtgagccactatgaccagccaagacaatgatttttaatgggaataaaaagaataagaggaacatgtagccatatttaaggctattgctttcattctggaggttcttgcaaattgactctgggttctgcatattctgaggggaggaggcagggccaacattgtcgacaagtctcccttttgcttgctgcctttccacaaagctagcagagccagaagagaactggccatagaaacaac

SEQ ID NO: 884488 - DNA, 617 bp, Homo sapiens
ccaaggacctcgtggttttgttttgttttgttgtttgtttgttttgagaccgagtcttgccctgttgcccaggctggagtgcagtggtgcaatcacagctcaccgtaaccttgtcctcctgggctcaaacaaggtgctctgcacctcagcctcccaagtagctaggactacaggcacatgccaccacacctggctaattattctttttaaaattttttttgtgtggagacagggtctcactatgttacacaggctggtctcaaacttttggcctcaagggatccttggcctcccaaagcaccaggattataggcatgagctaccctgcccacgctgacctcttctatttgtaaaggcagctcytaagaagtaatgctgtagttagccctgtagacaagtcaggtgtctcccactgtactcttacattgcctgggacatgctctaatattgcacttatctaattcacatgtaaaagttaactgtttttaaatccatatccttgcctagaatgtaatctcctaaagggtaaggctttgtcttattcacctctgtgccctagcacttaataaagtgttgacacataggtcagtgcagtggctcacatctgtaatcctaga

SEQ ID NO: 884489 - DNA, 589 bp, Homo sapiens
ttcctactaagtcccacaatgacccttcccaaggttctaaatctaatagtcaattatcaatcctcaatctacttgatttcatagaaatgtttgacataatttagcactcacttattcttggtccatttcttcacttggctaccaggacaccactcttacttttcctcctatatggttgcagttctcagttacctttgctatattcttctttttccttctacttcttaacgttgaagtgctctaggactcagtccttggttctctcttttctctcttcattcattagtgatctcatttattagaagagataatggtacagttcgaatgtgttgccttcaaaattcaggtgttgccaatgatagtattagaaggtggggcctttaagaggtgaaagctcattagtgctrctccctggtgagtgggattaaggtctttataaaagaagcttcatgcagtagttagttggcttggctcttccactcttccggccagtgaggtcacaatcttcattccttttggctttctaacatgtgaagattcggcaagaaggccctcaccagatgctggcaccttgatcttaattgggagt

SEQ ID NO: 884490 - DNA, 593 bp, Homo sapiens
tctaaagaattgaaccctattgttgttttaagaaatgggtaggcctattttaattaaaaattcaagttgatatctcaggataacaaagtatcagtgacctttgtctgatggaaatagctgtgggagaggatcttggcccaagctctgttattaaatggctgtgaccttgcaagaatttacttgaatgatctgaacctggttctacattcatcaaaagagtctgaagataaaacaatctccagtattcctttagagtttgaaattttcatatagctgctattgagccataccttgctaaattcaccagtgacttccatgtcactaaatccgataaacaccttagtcttcaatttaatctcaccacagcattctgaacagatgaccatccaccatttgcagacacattggcttctaaattactttaacatcaggtrttcaagattcttcttttttctctgtacccctctgctgtttctttcccatgtcaactcagtcattaaatgtcaaagttcacgagacttggtttggtggactctccttttgctgctctatgcaaactccctaagggaccttgtccttcccagttacttcaa

SEQ ID NO: 884491 - DNA, 571 bp, Homo sapiens
aagtaagaactgacatttcttgagtccctgctatgttttcaggcctaaattaggtactttgctctaaatgagctcattacatagaatgccttatagctcctttacttagattagctcctggttactggttgtaaagattacttctcttacgggtgtggttagtattaaccactccgtatgtattttcaccttctctagcacacacgtcttgctctattcagacagttctcttcagttttctcagcccacacattcaccgcctccttctctttgtcatatcttccctccttctctttgtctcttcttctcttattttttcttgcttatttcttccttcaacaaatgtttatcaagcatctactacgtaccagctggcactattcctttgtgttgtrcctacaccagtgagggaaacaaagttcctgatcatacatctcagttggagacatattataattagatacaagtatacctggttgttttaagagctatgaagaaaaataaagcaggatgaggacacagagtatgactattcctatccaacctctgaccgttgtctttatgctgttct

SEQ ID NO: 884492 - DNA, 658 bp, Homo sapiens
cctcagcctcccaagtagctgggattgcaggtgcctgccactatgcctggttaattttttgtacttttagtagaggggggtttcgctgtgttggccaggctggtctcaaactcctggcctcaggtgatctgcctgtctcggcctcccaaagtgctgggattacaggtgtaagccaacgcacctggccagaataacgtttttgaatgtacaaaataaaatacttaaaagagtacaaaggaaactgattgtattaaagttaccaaartgtaaaggaatttgtagaataaggcacacactgtcttaatgagatcacgtggtggatctaataactaccacaatgacagaggggtgatgagagatggacagaaatcatattcgaggatatgtgcaataatgcgatatgacaaacacctgcaatttcttctggtgacaaaattgtaagtactgattatactaccatgttttctggccatattaagaatgaaaggaaatgctaaaaatttccattagttactagaaaaaaaatcaagtgatttttcccatccaggctcacagattccctgaattctcttgagggattctgggtgtgggtgtgagtgagtgttaatcccaggtgaagcatcaggctctgtggtcctctgtgatcatctagaattcg

SEQ ID NO: 884493 - DNA, 585 bp, Homo sapiens
acatgtttattgtatgtgaacctacatttgttgtataattaatcttggaaacaagattttgcagcttcactgctccagaagtaaaaggagtaaggctcagggattttacgcagttgacaaaaatatttaatactgatgaaaagatagaacttatctttagagttctttttaatgtcttactttttaaaaaaatgagattttttaaaatcyctgaatctgaagatttatagctaagaattttggaaagtgataaacttgaactttttattcagtcccagaaaattgccaaaggaaaaaataagtactttatcaaacacacatcaacacccatatgcaaatctacctgtaataagtaagctggattacagcatagagcccaggagttggagaaagtgtggtttcccttctgctcttcaaagccaatgccaccttctgtatgttgtcatgtatcttttccttgacttcaccctccttgctctgctagatcttattttttaggatccagagacacgctgaaatactccccattctaaaacaaaaagcaaagtaatacaaacaacactgttccattgaccttggatttcc

SEQ ID NO: 884494 - DNA, 585 bp, Homo sapiens
acatgtttattgtatgtgaacctacatttgttgtataattaatcttggaaacaagattttgcagcttcactgctccagaagtaaaaggagtaaggctcagggattttacgcagttgacaaaaatatttaatactgatgaaaagatagaacttatctttagagttctttttaatgtcttactttttaaaaaaatgagattttttaaaatccctgaatctgaagatttatagctaagaattttggaaagtgataaacttgaactttttattcmgtcccagaaaattgccaaaggaaaaaataagtactttatcaaacacacatcaacacccatatgcaaatctacctgtaataagtaagctggattacagcatagagcccaggagttggagaaagtgtggtttcccttctgctcttcaaagccaatgccaccttctgtatgttgtcatgtatcttttccttgacttcaccctccttgctctgctagatcttattttttaggatccagagacacgctgaaatactccccattctaaaacaaaaagcaaagtaatacaaacaacactgttccattgaccttggatttcc

SEQ ID NO: 884495 - DNA, 655 bp, Homo sapiens
tttgggtatgtctttatcagcagcatgagaacagactaagacaatacctcaccctttatgtccaacaacaatggtcttcatgaccatctttgagaagttcaagtatgctctgatatcagagccttaatacctgctgttttctgtacgtgaaatacctttccaccagctrtatgtgtagcactcaccctcacttcctctaggtttcttaaatgccactctcttggtgtagccttggctacccacattattttaaattgcaagttgggaacctcatattctttcccacagtagatcccaaaggggcccagtttcagctctagaccctcatgctgcatgaagggctggtatgttcctcctgggagatgcacaccctctaagccagtgagactgggctctccagcctctgtcccacaacatatcccaatgggacccagtctcagctctagcttctcatgctgcatgaagggctgacaggttccttctgggagagacatgacctctaagccaatgagactggactcttcagcctctgccctacagcagatcccaacagggaccagtctcagctccagccctcctgctgcagtcagaaaactatcccttttatgcagggacctgctggtagacaacatgcctatctgagccaatgtgatag

SEQ ID NO: 884496 - DNA, 655 bp, Homo sapiens
tttgggtatgtctttatcagcagcatgagaacagactaagacaatacctcaccctttatgtccaacaacaatggtcttcatgaccatctttgagaagttcaagtatgctctgatatcagagccttaatacctgctgttttctgtacgtgaaatacctttccaccagctatatgtgtagcactcaccctcacttcctctaggtttcttaaatgccactctcttggtgtagccttggctacccacattattttaaattgcaagttgggaacctcatattctttcccacagtagatcccaaaggggcccagtttcagctctagaccctcatgctgcatgaagggctggtatgttcctcctgggagatgcacaccctctaagccagtgagactgggctctccagcctctgtcccacaacatatcccaatgggacccastctcagctctagcttctcatgctgcatgaagggctgacaggttccttctgggagagacatgacctctaagccaatgagactggactcttcagcctctgccctacagcagatcccaacagggaccagtctcagctccagccctcctgctgcagtcagaaaactatcccttttatgcagggacctgctggtagacaacatgcctatctgagccaatgtgatag

SEQ ID NO: 884497 - DNA, 587 bp, Homo sapiens
ggctgtgtctgcacccaaatctcatcttgaattgtagctcccataattccctcatgttgtgagagggatccagtggaagataactgaatcatgggttgcctcatactgttcttgttgtagtgagtaagtctcacaagagctgatgattttataaggggaaacccctcttgcttggctctyattctcttctcttttctgccaccatgtcagatgtgcctttcaccttctgccatgattgtgaggccttcccatccacgtggaactgtgagtccattaaacctctctcttttacaaattgcctagtcttgtgtaggtctttattagcagtgtgaaaatggactaatacaagaaataaaggacatctaaattaaaaagaaagaagtcaaattatcatcgttggtagacaacgtgatcttatatttagaaaaacctaaagactccactaaaaaactcttagagaatttatttaactcttaaatgaaattagtaaagttgcaggatacaacatcaaaaatcagttacatttatatacactaccagcagtcaacttgaaaaagaaatcaaagcagcaatcccatttacaatta

SEQ ID NO: 884498 - DNA, 587 bp, Homo sapiens
ggctgtgtctgcacccaaatctcatcttgaattgtagctcccataattccctcatgttgtgagagggatccagtggaagataactgaatcatgggttgcctcatactgttcttgttgtagtgagtaagtctcacaagagctgatgattttataaggggaaacccctcttgcttggctcttattctcttctcttttctgccaccatgtcagatgtgcctttcaccttctgccatgattgtgaggccttcccatccacgtggaactgtgagtccattaaacctctctcttttacaaattgcctagtcttgtgtaggtctttattagcagtgtgaaaatggactaatacaagaaataaaggacatctaaattaaaaagaaagaagtcarattatcatcgttggtagacaacgtgatcttatatttagaaaaacctaaagactccactaaaaaactcttagagaatttatttaactcttaaatgaaattagtaaagttgcaggatacaacatcaaaaatcagttacatttatatacactaccagcagtcaacttgaaaaagaaatcaaagcagcaatcccatttacaatta

SEQ ID NO: 884499 - DNA, 665 bp, Homo sapiens
aatctgtaggggcccattgggcattctgcttcttttttggctttaggaggtaccagatgcaacaagttacctttaaccttagaagggatatctcaacatgctccacactactggacccctagaaatttcactgagatagaaggcctctgaatttttgtcagatttatttcccaccctctggcacacaggtgtcctgccaataagtttagatattgctacttcttgttcagaagatccaataagcataatgtcgccaatataatgaaccagtgtaatgtttgtggatggggaagtgattaagactcctgaaaactaaattatgacatacagctggagagttgacatgcccctgtggtagaacagtgaaggtgtatygctggcctttccagctgaacacaaactgcttcatgtacaccttacggaaagggatagagaaaaaaagtatttgccagaataatagctgcataccaggtaccagagaatatgtcaatttgctcaagcaatgaaatcacacctggaacagcaactgcatttagagttaccacctggttaagcttatggtaatccactgtcattctccaagatctatcttcttcacagtccaaatagataatttaaatggggatgtggtacaaatgacaacccctgattcatttaagtccttg

SEQ ID NO: 884500 - DNA, 604 bp, Homo sapiens
aaatggctgttttcttctaaaggttttataattttagccttacatttatatttatgatccattttgtgtaggtgcaaggtaaagtataaattcatctagttgtattaaacatcttttgtcccattcttatgtttgtaacataaagtcttgtagcattggcccacacagtttctaactttcagagcttaaggagatgttcttcatgaagtgaatatatgatcaatttcaaatgcttttatagttttacaaaaatggtatgctcttatttttaaaagccatgcaatgtagattagggaaagaaaagaaaagaaaagaaaagaaaagaaagagaaagaaaggatggagagagggaggggagggaggagagggagagagagagagagatgaaagaaagaaaaagaaaggaaggaaggaagaaagagaaagaaagagagagaragagagagaaagaaagaaagaaaaaaagagagagaaagaaagaaacaccgtgaaaagagtcatcaccaattattatttcagccatttctctaggtcacaagtcattttctcttaaaaaaaaattgaatgcataacttacattgttttgtgatatccgttatgactg

SEQ ID NO: 884501 - DNA, 655 bp, Homo sapiens
caaaataggatttgaaataaaggtataataaggaaagagtacaggagataggcaaggaaaaaagttttagcttaggttctaaaaatgaaagagtcttaatttctacttaagttgtgtcaaaagtaacttaatgaaagatacttaaggragttgatcttagggatatgctataaagctaatcattgcagttcagtggtaaaatgaaggaataaagttaacaaaaacctaacatagaataaaagattaaatttaaaattataaaaggattttgcatctgaaacatggaaaatgcattttgatttctcacgattttatttcctctctactatgcagtaatcttgatttgacaatatttcactggacaaattttggaaaggactccgtgttcttgtccagtatataagaataacaattccttattttagaattgtactttaacatttcaaagaaatgtaaactctgtagctttaatttaacagcattgagtagcaactctactaccagcctcagaattgtgggaaaatttactcccaaagtaatgtagcaaataataaaattttgaatgcaaatgtatgtagtatgatacaacaggtgtgtgaatcaaatgaaaagtacatttttgcacatcgacacatttaatattcatttaaaatgc

SEQ ID NO: 884502 - DNA, 631 bp, Homo sapiens
aaaactctgtaagaggaagagaggaagtcatctctgtttgcagattacatcattttatatttagaaaaccccatcatctcagtccacaaacttcttgaactgataagcaactttagcaaaatctcaatacaaaatcaatgtgcagaaatcacaagcattcctttacaccaacaataggcaagcaaagagccaaatcatgaatggactcccatttacaatcgctacaaagagaataaaatacctaggaatacagctaacaaaggatgtgaaggacctcttcaaggagaactgcaaaccactgctcaaggaaataagagasgacacaaaaaaatagaaaaacattctatcctcatggatagaaagaatcaatattatgaaaatggccatactgcctaaagtaatttatagattcaatgctattcctatcaaactaccattgacattcttcacacgattagaaaaaaactattttaaatgtcatatggaatcaaaaaagaccccgtagagccaagacagtcctaagcaaaaagaacaaagttgaaggcatcatgctacctgacttcaaactatactacaaggctacagtaaccaaaacaatatggtacttgtaccaaacatatagaccaatgga

SEQ ID NO: 884503 - DNA, 561 bp, Homo sapiens
cacagaaaaccacagctggaggaaggcctgggcagggaagtgctcaacacactcttgcctttcatctgggttgtgtcaggagtgggtttggtacctgggtccactccctgcccagcccaccaggcctggtctggccctacctccaggctggagcagagagccatstggacagtgtggatgctgctctcaggtcatcacacaccagaagccaggaatctgtcctggctataggtcccagggtctgtcctgcatgctccttctgggcaccattggccacccagggacttaattctgtggctgtgaaggccatgtataccatagttgtcaccacacactcacctcccagtaggtagacatcccagagccacaggatgagcatgaaggaagtctgtgggaacagcaggtgtgggaggacctggcctttccaacctcggggctggtggcttgagcagggcccactgtagcctcagtctggacttcctgaggctccctctgcttgggaagagacccacccaatcttccataaggctgggtcagacaaggtccggcagctcttcatag

SEQ ID NO: 884504 - DNA, 585 bp, Homo sapiens
tggctcttccagagccaggttctacccccactggggtccagaatcctcagcagattttgtatctaaggcaggaaggctgcagaggtcaggagttgagtgcaggacagcacaaggcagggctgagatcacagtccagagtcacatctgggtccctgggtcagttgcctccsctctgacctcaggcatctcatcttcaaatgggtacattagcacccattccacgaagtcagtgtgagggtgaatgagacggctgcaatacatggtcagtgaagagaaagcacctggtgggagctcagcgacattaccctccacagcgccccggaggccagtgatgccatctggtagcatctgcccccatgtcagcaggaaggggagacagcaggtcacacttacccgagaatgatcagtcagctgtgctgagatgtgcctctcacttagaaaagggtcctgcacacagagacactcacagacaccactgtgtgtctccagctgctccacaactcagaggcaggcagatgttcagcaacagtgacgtctggggttacagcacccatcagagtggggccctgcctgggtcagcagggc

SEQ ID NO: 884505 - DNA, 585 bp, Homo sapiens
tggctcttccagagccaggttctacccccactggggtccagaatcctcagcagattttgtatctaaggcaggaaggctgcagaggtcaggagttgagtgcaggacagcacaaggcagggctgagatcacagtccagagtcacatctgggtccctgggtcagttgcctccgctctgacctcaggcatctcatcttcaaatgggtacattagcacccattccacgaagtcagtgtgagggtgaatgagacggctgcaatacatggtcagtgaagagaaagcacctggtgggagctcagcgacattaccctccacagcgcccyggaggccagtgatgccatctggtagcatctgcccccatgtcagcaggaaggggagacagcaggtcacacttacccgagaatgatcagtcagctgtgctgagatgtgcctctcacttagaaaagggtcctgcacacagagacactcacagacaccactgtgtgtctccagctgctccacaactcagaggcaggcagatgttcagcaacagtgacgtctggggttacagcacccatcagagtggggccctgcctgggtcagcagggc

SEQ ID NO: 884506 - DNA, 638 bp, Homo sapiens
aaacagttctgatgacaaacatattttcctactgactctattagtcttcatgtattctaatatatttcaattcaagctacatttctcaggctgtttggcgtatacataaaatgctccaaaattagaccacatgtcctaatttagggtttaaaaattcagtttgcttatggtgcctgaaatctgcctgttgcttcatccatgatatttgctgagtccttaatccatgcagagttttgccctgggcacagaaggaggaggtgaaagagaataattgaaatgcattttctaaggctgctttcaaagtgttcaatctttaggtataacaaaaatcatcaattatcggaaagatatttactaatctaaaatcagcacatgttaaatattcaacaaatatgcattaggttttgacacaacacaaagcactatrttggacatgtgggcaactgggggaagaatattccaggcagagctgtccaagcatacaatgtgagagacatagaaatgtcagatgtggttgctatgcttataaagcattaggcttactgaagaaacaatgtgtgcacacaaaactctgaaataacagtatgaaataatatgcaatcaaatatcaaaatgccttttcagcccttcagctccaa

SEQ ID NO: 884507 - DNA, 633 bp, Homo sapiens
ttttttttttttgagacagagtccctctctgtcgcccaggctggagtgcagtggcgagatctcggctcactgcaagctccacctccccggttcacgccattctcctgtctcagcctcccgagtaagctgggactacaggygcccgccaaaaagcccggctaattttgttttgtatttttagtagagatggggtttcaccgtgttagccagatggtctcgatctcctgacctcgtgatccgcctgcctcggcctcccaaaatgctgggattacaggggtgagccactgtgcccggcagattgttagcatttttaatcaataaagtatttttaattaaaaaattaacgattttttttggtgtggtatcaccattgtcaattagccattcaatcaacaaacaactaatgagtatcttctgtgtgccaggtgctgctccacctgttgaagctacaatagtgggtaaaggtaaagtttctgttcacaatgaatttttctagaagaggagtgtgggaggaagaatagtggttccctcagagacatccattcattaatccccagaacctgtgaatacgttagtttacaaggcaaggagggcagtgtgattgcaggtgaaattaaagttgctaattggctt

SEQ ID NO: 884508 - DNA, 620 bp, Homo sapiens
tccagcaagatagtcttcaagctctgatattctttcttccacttggtcaacttgactattgatacttgtgtttacatttgggtaggaggaatccatattgtgaaaatggtcatagtgccaaagcaatttatagattcaatgctattcccactaaactaccattgacattattcacagaagtagaaaaaaaaatttaaatattttaaaattcatatggaaccaataaagagctctgagagccaagactatcctaagcaaaaagaacaaacctggaggcatcaggctacacaacttcaagctctacaaggctacactaaccaaaatarcatggtactagtacgaaaacaggcacatagaccaatggaacagaatagagaactcagaaataaaactgcacatctacaaccatctgatctttgacaaaccaagtaaaagcaatagggaaagcatttcctatttaataaatggtgctgggagaactgctagccagatgcagaaaatagaaactggatcccttcctaacatcttatgtaaaaattaactcaagatggattagagacttaaatgtaaaacccaagatgataaattgtataaaactatacattataaaaaccctagaa

SEQ ID NO: 884509 - DNA, 641 bp, Homo sapiens
gaggttgtttcgaaaatatagattactggatcttctatacttactgtgtgagaatctgcattagtattgagtcatttgtgtattaagaaactcccattgagtaattatggtgataggtctactttgggagatgtggtctagagtgcagtgagctgctcacactctgcttcttattcctaccttccgaggaccagccaggccatctggatctgggcctcagctttcttgtcattsacacttaacaacaacaacaaaaaaatagcaagttaaatcagttctgatgtcagtgctctccagatactcagtggacatttaaacaacacaaacaattctctaccaaccaggtgccctgtctgggtagaagtcttgatgtgtgattaacatctttactactgaaacagaggttatcattttctactaaaatttgtgtataactaattaggcggattgctgcagagagcagctaatatcctcatagttgtccatatggtagctcggttgattaataacatacatttctgcataagataaaactaaatactttttaattttatactttttagatttagagcattgatagtgattacatggctttatgtaagccaactggagaatgccatttccactgtggatataatctt

SEQ ID NO: 884510 - DNA, 641 bp, Homo sapiens
gaggttgtttcgaaaatatagattactggatcttctatacttactgtgtgagaatctgcattagtattgagtcatttgtgtattaagaaactcccattgagtaattatggtgataggtctactttgggagatgtggtctagagtgcagtgagctgctcacactctgcttcttattcctaccttccgaggaccagccaggccatctggatctgggcctcagctttcttgtcattgacacttaacaacaacaacaamaaaatagcaagttaaatcagttctgatgtcagtgctctccagatactcagtggacatttaaacaacacaaacaattctctaccaaccaggtgccctgtctgggtagaagtcttgatgtgtgattaacatctttactactgaaacagaggttatcattttctactaaaatttgtgtataactaattaggcggattgctgcagagagcagctaatatcctcatagttgtccatatggtagctcggttgattaataacatacatttctgcataagataaaactaaatactttttaattttatactttttagatttagagcattgatagtgattacatggctttatgtaagccaactggagaatgccatttccactgtggatataatctt

SEQ ID NO: 884511 - DNA, 497 bp, Homo sapiens
aaaactttttaaggcaattatcttaatatattcttcggttccactacaaatgaaattttgaaatacatttatttaacatttaaggtgatataaaagtggagaaagtaagttgtgaaagtttcaaatatattttctraggttataatgattagaatctattttccatcccaaaactttcagtcacagtatgaagataaatgtttttgaagaaaaatttcaaacatttcttactgctgtgtcatgttgttctgttcatgtatattattctaaaaggctgattttgagattcattatacataatataaagttaatagggacttacatggttttttccccttaagcatagatttttgagatctttacagattgcctttttttttttagacagagtctcgctctgttgcccaggctggagtgcagtggcatgatctcagcttactgcaacctccacctactgggttcaagcaattctcctgcctcagcctcctgagtcgctg

SEQ ID NO: 884512 - DNA, 483 bp, Homo sapiens
taaggatggaagaaaaggacctcttcaaggaggcctaaaaccactgctcaaagaaatcagagaggacacaaaaaaatggaaaaacattccatgctcttgaatcggaagaattaatatcatgagaatggccatattgctcaaagtaacttatggattcaatgctattctcattaaactaccattgacattcttcacagaattagaaaaarctattttaaaattcacatggaaccaaaaaagagcccaaatagccaagacaatcctaagcaaaaagaacaaagctggagacattatgttacccaacttcaaactatactacaaggctacagtaaccaaaatgtcatggtactggtacaagaacagacacatagaccaatggaagagaaaagagatctcagaaataagaccacacacctacatccatctgatcttcgacaaacctgacaaaaacaagcaatggagaaagaattccctattcaataa

SEQ ID NO: 884513 - DNA, 483 bp, Homo sapiens
taaggatggaagaaaaggacctcttcaaggaggcctaaaaccactgctcaaagaaatcagagaggacacaaaaaaatggaaaaacattccatgctcttgaatcggaagaattaatatcatgagaatggccatattgctcaaagtaacttatggattcaatgctattctcattaaactaccattgacattcttcacagaattagaaaaaactattttaaaattcayatggaaccaaaaaagagcccaaatagccaagacaatcctaagcaaaaagaacaaagctggagacattatgttacccaacttcaaactatactacaaggctacagtaaccaaaatgtcatggtactggtacaagaacagacacatagaccaatggaagagaaaagagatctcagaaataagaccacacacctacatccatctgatcttcgacaaacctgacaaaaacaagcaatggagaaagaattccctattcaataa

SEQ ID NO: 884514 - DNA, 560 bp, Homo sapiens
cttgcttttcacagccaaatatcttgaattatgtttctgtccattgtctcttcttccttatccttcatatatccgtcagcccactgctccctggatgcaactaaggccacggacggaagtaacattgctaaatccagtgcgacctccccggcttccacttccttgtcttctctgcagcattgcrtggggctgccctttgcccccacttcccattcttgatcttccccgctcccctctgccctctcccatctcaacagccactgcctctcagcacccttggcagcctctttctctgcccaccctttgaatgttcaggggcctcagacttccatcccagggcctcttctcacccttggtgatctctctgtggttgacttttcatctccaagagttagcttagagtaaaagaagcaatcccagaaattcgtcacttaagaagaaatgtagcgcttctatctaagaggatgctgattacaatgagaacaaccctcatggtaagatgctgccccagctatttgcttgttagactacccatgcatcctcaagcaccagctcaattt

SEQ ID NO: 884515 - DNA, 636 bp, Homo sapiens
agttactgttccatgtaaacaagactgagaagatctttgccgtaatggaaatcataatgtgctaggaaaaatcacacaaatatgcagatgattataatcaaggagaataaattataaagacagaagtacaggaagttatggatgttgcttgaaacccacatttggggtgttaaggaatgtttacagatgtaggaaagtttaaactgagacccaaaagatgggtgggaattactacgtatatgtgtaatatcctaaaggtaccatataatattgatttaaagcagtgaccttgactgaatgtggttgctcatgcctgtaatactagcgctttargaggctgaggtgggtggatcgcttgagctcatgagttggggaccagcctgggcagcgtagcaaaacctcatctctacaaaaaatacaaaaattagcagggcatggtggtgtgcacctgtagtcccagctactcaggaggctgagacaggaggatcacttgagcccaggaggttgagaatgcagtgagccatgttgacaccactgcactgcagcctgggcaacaaagcaagatcctgtctcaaataaataaaaatagtagtgacctccaagtaaaaaaaaaaaaaatccaattctctaaatatg

SEQ ID NO: 884516 - DNA, 532 bp, Homo sapiens
gagctggcagcaggagccatgctctctggttgctgccttcagtcccactgacatccttgggacatttgtgattctaatgcatttccagtcccatggcttatgctgccatccacagctgaaactttttatcacaaccacgaagcactttgtcatcttctagtcttctttcatccttcatcatttcccaggatgtggcaggaggctrggcaactttcaggtgctttttaatgtcagggtggagcttactaaacttgcagagagtgctacatcaacctaaaatggcttcctttccatgttactgctgtctggagagtcagcctgggtgggtagaggtgaagaggtcccaggtctccttccaatgcgcactcacctgcgccaacctgtcttgctttttgctccaactatccactgtccttagctcaaggaacctattttaggcaagagagaggagcagcagggagtcactctttttctatgtagttctgtattccaccaagattaaggctgttgaacttcagagctaaacatcagt

SEQ ID NO: 884517 - DNA, 577 bp, Homo sapiens
taccttgagcccatccccagagggctgggctttcccagctgctctctccaagggattagtgccctaggtctctgcagatgcagcaggaactgctgctccccagagccaagtatccacattttccccaagggcatctartgccaaagcaccctctagacagaggctgtttgcaaagtgaacgagtgctaaggataagggtcctaattcccagtcccacatcccgtcacttagatgtttcatctgcaaaatgggtggcaaaccattaaagtgactgggcctgatgacttccagagcccctgccagctccagaagctgtgatattctgaagtaatcttgaatggagccttcagacatgatcaggcacatcgcaaagaccacaagtgtgttctccctgcaatgcatgaacgccttccgacttattcagtccctgctttatagcgcagagtccagagggataattgtctctttctctctcattctggtttctctgcttacacaagccacataaaacctttctggttagagcccaggacacacagaaattatatgtatgcaccgtcatgtatgtgcctgtctc

SEQ ID NO: 884518 - DNA, 577 bp, Homo sapiens
taccttgagcccatccccagagggctgggctttcccagctgctctctccaagggattagtgccctaggtctctgcagatgcagcaggaactgctgctccccagagccaagtatccacattttccccaagggcatctaatgccaaagcaccctctagacagaggctgtttgcaaagtgaacgagtgctaaggataagggtcctaattcccagtcccacatcccgtcacttagatgtttcatctgcaaratgggtggcaaaccattaaagtgactgggcctgatgacttccagagcccctgccagctccagaagctgtgatattctgaagtaatcttgaatggagccttcagacatgatcaggcacatcgcaaagaccacaagtgtgttctccctgcaatgcatgaacgccttccgacttattcagtccctgctttatagcgcagagtccagagggataattgtctctttctctctcattctggtttctctgcttacacaagccacataaaacctttctggttagagcccaggacacacagaaattatatgtatgcaccgtcatgtatgtgcctgtctc

SEQ ID NO: 884519 - DNA, 577 bp, Homo sapiens
taccttgagcccatccccagagggctgggctttcccagctgctctctccaagggattagtgccctaggtctctgcagatgcagcaggaactgctgctccccagagccaagtatccacattttccccaagggcatctaatgccaaagcaccctctagacagaggctgtttgcaaagtgaacgagtgctaaggataagggtcctaattcccagtcccacatcccgtcacttagatgtttcatctgcaaaatgggyggcaaaccattaaagtgactgggcctgatgacttccagagcccctgccagctccagaagctgtgatattctgaagtaatcttgaatggagccttcagacatgatcaggcacatcgcaaagaccacaagtgtgttctccctgcaatgcatgaacgccttccgacttattcagtccctgctttatagcgcagagtccagagggataattgtctctttctctctcattctggtttctctgcttacacaagccacataaaacctttctggttagagcccaggacacacagaaattatatgtatgcaccgtcatgtatgtgcctgtctc

SEQ ID NO: 884520 - DNA, 589 bp, Homo sapiens
ttgctcctcaaccatcaattctcaaagttttctggagggctttctggagccttttaacaatcagcttatgtctgatggcatcaaaccctcctggcagctccctggacagggggaagttggctgtactatcctccatgtctctgaagaactctctctcccttccaaccctccctgtttccactgaagactctcccagatctgaaaagcggtttggggactgccaggaaaacatcaggtcataatacatctattgggtacatgctattattttattttaccaggtcaaaacacaaagactcacattgttaaccaagatatggcagagccagaatttgaacccaggccmcccaagttgaggtttcattccattatatgacaactctatcccttcaataagttggaccctaaaactccacccctacccaaaggaaaatcacaaaatactcaaattgttgttgctcttgttcagagtccaattccacttggccatcccaggttgtttattgctatatgtctctgcttccagtctagcagcctcccccatcagactgtgaactccctagatgctaatatctaccttaggaaaggg

SEQ ID NO: 884521 - DNA, 617 bp, Homo sapiens
gggtgtagaagaagcctgagttttaccatatgcttttcccaagaggctaagttttaaataagtgtatggaatagcaacaattacttattcagtacttagaattctgtatttactatataattttgtcaaatatcctggggttcatattattatccccatttaaagataaggaaactccgaaaggctaagtcatttgtttaaggtcatagagcaagcatgtagcagaatttgaaatcaaatgtaggttttttggatctccctaagtcaaagcatgtttctgttgcttaacattttaataatgaagtattaaaaatcagatgagtccttcccagaacgctcaatgcctgaatcatttcctctttctgakgcgtctagagaacagccaggtgtagccatgtgactttatctcaagactctgtcattgcctgccatcttgcctgtcttatccataaacgcacagggctctccgtgggcaggggactgggtcttaatcgttgtattcccacggtagagcgtgatgcttagcacacaggagatgcacaacaaatacttacctagtaaatgaatggatgggtaaaagaaatgatgggttttaaagattggattaatttatgaca

SEQ ID NO: 884522 - DNA, 617 bp, Homo sapiens
gggtgtagaagaagcctgagttttaccatatgcttttcccaagaggctaagttttaaataagtgtatggaatagcaacaattacttattcagtacttagaattctgtatttactatataattttgtcaaatatcctggggttcatattattatccccatttaaagataaggaaactccgaaaggctaagtcatttgtttaaggtcatagagcaagcatgtagcagaatttgaaatcaaatgtaggttttttggatctccctaagtcaaagcatgtttctgttgcttaacattttaataatgaagtattaaaaatcagatgagtccttcccagaacgctcaatgcctgaatcatttcctctttctgaggcgtctagagaacagccaggtgtagccatgtgactttatctcaagactctgtcatygcctgccatcttgcctgtcttatccataaacgcacagggctctccgtgggcaggggactgggtcttaatcgttgtattcccacggtagagcgtgatgcttagcacacaggagatgcacaacaaatacttacctagtaaatgaatggatgggtaaaagaaatgatgggttttaaagattggattaatttatgaca

SEQ ID NO: 884523 - DNA, 683 bp, Homo sapiens
aaaaagaaatttagagccatatgatatcttattcctcttatcatccttaggttccataggtcatgatagaatctccagggaataacggtctttctcttaagttatgcaaagccctagaaatggtaatcatttattggaaaaacatatgaatatagaagatatcatcgtaccgagttttataaaaactctttagcaatctatgcatgggctgactgacatgtttgccttgccactatcctggttgttttctcctttcacttaggaataagctctgaacataaggatctatgtaaaagcttttaggtctgttaggaaaatgctgactcaaattagctacaagggagagaagagtgagagtcacttgtagttgtttctttcttaaattcttagtgaccaaaaatatgagagagatggggaggtgagagagagagagagggagaaagaggcagaaagagagaagggagcgtgggagaagagggagartatttgctgctgcaataaaaccagtttttttgttcatataataatttttaaaaactttttgctcaacttttccttgaataaagtacctacagctactttaaggattttgagttgaagcagaattactcaatgtggaaagggttattttataacggaaactgaaaaagatcaagaaagagggatgcatgggtaggaggaga

SEQ ID NO: 884524 - DNA, 643 bp, Homo sapiens
tctccattctctccatctgtccttaaaaaccctactcagcagtttgtgctatagcaccatgctgcagcatcccagcacttgaacttgggaacaggctttccaggagtgcagacagagcccttaccgcattccttctgaacctcatcttgcctctccggggatttgcttctgccatttcgcctgtacgcaattacacttttcttttccaattgtcaacgcaacgttgatgaaatacgagctgcttcttgggtagtatttaaaaacggcagccaaaaatctctatcaaacaaagctgccgtggctgcttccattagcacagtggcagcaatgctggggaggaaaaaaaaaaaaaaaccactatccctgattagtcagctgacagatccttcccttctgctccttgtaattcagagttaacacattcctmcaattacttagcctgattgaaccttgtggattagcttgtgctggactgctcaagaagatcaggcatgtcctaagagtggaaggaggaggaaaaaaaaaccagctctcttcctaggagcaggcttgatgggactggctttctcctctgcgcagtttgatttttaaggtggaatgctaagaatctttgtgaaggtagtattaactcatgctttttact

SEQ ID NO: 884525 - DNA, 596 bp, Homo sapiens
gatcaataatgtcttctactacatgtcaggcatggtgtgtgcccagtgttctcaattcatcctcacagcacactcacatatctgtggctcagagaagttaagtaacttgtccaaggtcacacagccagtgtttagtggagccattccactgaccaagcacctactatgtgcttggttttacttgtgttatttctagtccctacggaaacttcaaaaggcaagcaggcatttttcttcacctccctgtgcctctatttttctagtccataaagtggtgacgacacttggaatcgactttatggaaattgccgtgaaaattgaatagatagaaacgtgcagtgcttagcacagtgctggccacagagcaagtatcytatgaaatgtcagctatgtgctgttttaccttcatttcaccagtaaggaaatggaggcccaggtccctaaaggaactccacctcaggcctccagggcttagcttacctggcacagaggtgaaaggaggcgactttggagaaagttaaaggagagtggttttgcccagaaacagacccagtgtcccgcttccccaggtttctgctgggtggccttgggcaagc

SEQ ID NO: 884526 - DNA, 692 bp, Homo sapiens
acggctgtaatcccagcactttggaaggctaaggtgggcggatcacgaggtcaggagatcaagaccatactggctaacatggtaaaacgctgtctctactaaaaatacaaaaaattagccaggcatggtggcatgagcctgtagtcccaactactcgggaggctgaggcaggagaatcgcttgaacctggaaggcggagattgcagtgagctgagatcgcgccactgcactccagcctgggcaacacagtgagactccgtctcaaagaaaaaaaaaaatmatgctttgtttcttaaattagagttaagcttcataaatatacaccatcctattttgttcctgttttttcagccaacaatataacactaaatgctttataaatatttggtaataagtaaacaaaccaattggtgtataccaagaacattaaaaatgcaagtaaatctataaaataatagtaaagctaagattttttcaaacacttataaatgtgtgccaataaccacccataagtaaccctataaatgaggagtgctattattatcttgttatctcttttaacagagaagaaacctaaagcttaggcagtctgacttcagttgttttaacaactctatatgaatacttcagaagaaagcaacaatagtgcaaaatttcaaatagagaaaaagcattggagagaaaaaacaaaa

SEQ ID NO: 884527 - DNA, 692 bp, Homo sapiens
acggctgtaatcccagcactttggaaggctaaggtgggcggatcacgaggtcaggagatcaagaccatactggctaacatggtaaaacgctgtctctactaaaaatacaaaaaattagccaggcatggtggcatgagcctgtagtcccaactactcgggaggctgaggcaggagaatcgcttgaacctggaaggcggagattgcagtgagctgagatcgcgccactgcactccagcctgggcaacacagtgagactccgtctcaaagaaaaaaaaaaataatgctttgtttcttaaattagagttaagcttcataaatatacaccatcctattttgttcctgttttttcagccaacaatataacactaaatgctttataaatatttggtaataagtaaacaaaccaattggtgtataccaagaacattaaaaatgcaagtaaatctataaaataatagtaaagctaagattttttcaarcacttataaatgtgtgccaataaccacccataagtaaccctataaatgaggagtgctattattatcttgttatctcttttaacagagaagaaacctaaagcttaggcagtctgacttcagttgttttaacaactctatatgaatacttcagaagaaagcaacaatagtgcaaaatttcaaatagagaaaaagcattggagagaaaaaacaaaa

SEQ ID NO: 884528 - DNA, 681 bp, Homo sapiens
cagatcttgcagacagcattattgttttaagcctaagctagtaagaaagagtaataagttaaaattggtcaaaggggtgcagagtttcccaattacaatcttacaaaatctggccattttttttcacataacagtctacattttcttctaagatgataatctataatctttactacagcaaaatctgttttatgttgagctctacccaaaagcaattcattgactgtcaatgccttatttccacctaacccaatagggaaaatggatctaaatattacaaatcacagaagaggattaaagtacacagaacacatttgagccaaatactctaaatgcttattaaactgtcccgtatagcatatgttgactttttatatactacctatatagtttgactcatcagaaagcactgattttcagggatttgtcataagttaaagagatattcagaacttttcaattcatttagtgaattccacatactgcccaggcggtaactatgagagccacacaagactaacacacaccattgaaaytcttcttcaactaaccaacaccaaaaatgcaaaatggatgcgtattgactaaactatttgaagtcaccaatacatttttctctaaaggcttttttatatttgatagataagagcacccaggtaaaaaatttaagagttttatcat

SEQ ID NO: 884529 - DNA, 592 bp, Homo sapiens
gtggatggacatttaggttgtttccataccttggctattgttgaatcaggctgtagtgaacactggggtgcagatagctctatgagataatgatttcattcccttcaggtttatacctagaagtaagattgctgaattattaaggtagctctatttttaattttttgaggaatctccctactgttttccttaatgactatttcaatttacactcccaccaacagtgtgtacaagtgctcccttttctctacatcttaccaacacatcttttattttataatagccattctaacaggtgtgaagtgatatcttattgtgattttgatttgtatttccctgataataagcgatgttgagcactttttaagacttattggccatctgtggttcttcttttgagaaatgtctatttatttttcygcccatttttgagtcaggttatttgagggattttttttttttttttttttttttgctgttgagttgtatgagttcttcatatattttggatattaacccttatcagatatacagtttgcaaataatgttctcccaatctgtaggttgctcattcaatgttgggttttggggg

SEQ ID NO: 884530 - DNA, 644 bp, Homo sapiens
gactgaaatgttcagatgtgggttaggagggaggaccctcttcctagtcttagagtcccagctcaccagggaaacatttctccaggaggagtgttgatggtgggaagacagggcacttagatttccgtgctctgtgtcctcttggatggaactattatggctgactgctggattagacactcaaaagttggttggcttgttctagattcctctccaccaggtagtgcttgataggcaatgaacaagtttgcttctgcaatgctactgtggctgactgcccttcccctaacacattcttccttagacacttcagtacatttagacaggtcttacagccaagattcaagatccattctttctattcaaaaataatttgaacatatcatttattctaatcaagtgtcaattttggaatawaacatacaaatagcaatattttattatgattttattattgtttttaatgttagggtctcattctgtcgcctaggctggagtgcaatggcgtgattatggctcactgcagccttgacctcctggacccaggtgatcctcccactttagcctttcaagtagctgggactacaggtgtgtgccacaatacccggctaattttttaaaaattttaataaagacagggtctt

SEQ ID NO: 884531 - DNA, 644 bp, Homo sapiens
gactgaaatgttcagatgtgggttaggagggaggaccctcttcctagtcttagagtcccagctcaccagggaaacatttctccaggaggagtgttgatggtgggaagacagggcacttagatttccgtgctctgtgtcctcttggatggaactattatggctgactgctggattagacactcaaaagttggttggcttgttctagattcctctccaccaggtagtgcttgataggcaatgaacaagtttgcttctgcaatgctactgtggctgactgcccttcccctaacacattcttccttagacacttcagtacatttagacaggtcttacagccaagattcaagatccattctttctattcaaaaataatttgaacatatcatttattctaatcaagtgtcaattttggaatataacatacaaatagcaatattttattatgaytttattattgtttttaatgttagggtctcattctgtcgcctaggctggagtgcaatggcgtgattatggctcactgcagccttgacctcctggacccaggtgatcctcccactttagcctttcaagtagctgggactacaggtgtgtgccacaatacccggctaattttttaaaaattttaataaagacagggtctt

SEQ ID NO: 884532 - DNA, 629 bp, Homo sapiens
aaactgcatcaattaatgggcaaaataaccagctaacatcataatgacaggatcaaattcacacataacaatattaaccttaaatgtaaatgggctaaatgccccaattaaaagatacagaccgacaaattgggtaaagagtcaagacccatcagcgtgctgtattcaggagacccatctcatgtgcagagacacacataggctcaaaataaagggatggaggaagatctgccaagtaaatggaaagaagaaaaaaagacaaaaggaaaaaaaaaagtaaggrttgcaatcctagtctctgataaaacagactttaaaccaacaaagatcaaaagagacaaagaaggccattacataatggtaaagggatcaattcaacaagaagagctaactatcctgaatatatatgcacccaatacaggagcacccagattcataaagcaagtccttagagacctacaaagagacttagactcccacacaataataatgggagactttaacaccccactgtcaatattagacagatcaacgagacagaaggttaacaaggatatccaggaattgaactcagctctgcaccaagcggacctaatagacatctacagaactctccaaatcaacagaat

SEQ ID NO: 884533 - DNA, 623 bp, Homo sapiens
attaagggatttcaactttagaaattttgatcttccaggatttcaatattcaggaaaatgacatttggaattttgtcttttgagattatgattggtaccaatctggtggccaccatattggatggtgcaactctaacaagagctttagaagaaaatgattagaatgtaaaaaacaagctaaagacatgaatcttcagattaaaagagtccaccacgctcgtgaaaatagacccatatttagaaatacagtagtgaactttcagaacaaattaaaaagaaaactctaaaagcttccagagaagaaaaaaaagaaagaaagaaagggttacyaacatagaaatgagaatcaaattgagatcagaactatcattagcaacactaaatgctagaagaaaagggctggtgggagaaatttctgagaacacgttattttggatcaggaattctttaatcagacaaacaaccattcaattttgaggtgaagataaaacttggacatggaactcactcagttcatcctgaggtccttcataatgatctttgcaaaagcctctctcccgtagtcaggcttagtgcagaaccaagattgacttctacagcatgaagtactccacgggccaaaa

SEQ ID NO: 884534 - DNA, 613 bp, Homo sapiens
aaatctggggctcagaggtgtgaagtggcttgcccagtcagtagtgactttgtcagctactaaattcaaaccaaactatgaagttcatgttccatctactaccccacgctgtaaactgtaatatttatagcggggattgtcttaattcaagatgcaactacacatgtgtttgtggcttataggccagtgctgaagctctctgctggaaatgtaacctcccaaccgtgagctgcagataggtggccagctctccaacctcttcactcccacacttctaagccataaaatggcatccccaaaggccaggttcttggaaaacagccaacgttctgttaagtaggatggtggcagcatagcacagcagtcaagatcacaggctctgttgccagattgagtgggtttgaatcccmgtttctgcccttcccagttgtttcaccttacacaagtctcttgcatcactttctgcatcataaaatgagaattaaaacagttcagcttgttggaaagattggataacagaatatatgtaaaatgcttagtcagtactgaaggcttattattattattattactactactactatttgatacggagtttcgctcttgctgccca

SEQ ID NO: 884535 - DNA, 654 bp, Homo sapiens
ggcatcttctgtgaagttcttccattccttcaacaaatgtctttttgtgccaagtacagggttaggcagacagaggagcagggcagaggcccagaggtgagaaaatgcttgaccctgcaagttgctcagtaagaccagggtgcagagggcacaggaatcagggtcgctggtgaagagtccagggcctggactcacactgccatcatctgaagcctctccagcctcaatcagggatgttgggagaatgtaatgaaatgattcctgcagtacctctggcacttagtgtatgcttagtaatgccagctctcatcattaccaagatcatagtgattttcattatcattttaagcaggggtcagaacacacaggagttacacacgttaagraggtagaatacacccttgaaggcattgacagtccattggaagagctgagccaggatgggaggggtgtaactatgttggaaattcagaacaatcactctggtagctgcatgcagaatggatgggaaacaccagactgagagagaggaaaaagtcaggaacctgctgcagtcatttcagcaagagacaatagaggtctaggtcaaagcagaggtgttgggacagacagaggttggtggattctacaggtaaggagaaggctctgagatag

SEQ ID NO: 884536 - DNA, 677 bp, Homo sapiens
agtccattggaagagctgagccaggatgggaggggtgtaactatgttggaaattcagaacaatcactctggtagctgcatgcagaatggatgggaaacaccagactgagagagaggaaaaagtcaggaacctgctgcagtcatttcagcaagagacaatagaggtctaggtcaaagcagaggtgttgggacagacagaggttggtggattctacaggtaaggagaaggctctgagataggctgcagggtacagtggttaagggcacaggctctggggccagccaatctggattggaactctaactctgccatccctgttcatgtgacctggagcaagtaattctaccttctgatgcctcagttttcctgtctgtatcttgaagataayaaggaatgctaccgacctcacagtgttggttgatgtcaaagttaagtttgttaatgcatgtaatgcacttagaacagtgtctaacacaaagcaaacagcaagtgttgcttattgttatgagaaataattgggttccctgacccattaaacagatcagaagggaggagtccaagaagaattgggtagccaggggatgggaagttgttttctgaggttggtggggagaccccagcagaagtaccaagtttggggaaggaagagaagagagggtatggatgatcttttaaca

SEQ ID NO: 884537 - DNA, 611 bp, Homo sapiens
ctttgcccagactgggagacaaacatacccctccctcctgaactggatccccaccacctttccaaaggccactggacatgtctcttaaacgctgcatttcagctcttgatcattctgccctggggatcccttctctttaggttctttgttatggtctggggaaacactctgactttctatggtgttgacagcatctgagtccaatcttcttcttttcttcagttggttcaagtgggatttggattttatgtgcgctgataagacaaaatcaaaccaaacaaacaaaaaaactcattaggaattttctagaattaatcctagaagcaagtaaaattaactatacaatgcttttcttcaacaataaacagcaagatcaacacatgtactrgtatagctgcttagcatttttaagggaagaataaattatatggccagccagctagcaaaatagagtgagctaccacatatcaagtgctccctgttaggtactttacatcaccaatcctcatggcagtcttgtaagatggtactattctgctcattttatacaagggaaactgaagttcagagaggtcttacaaaatgtccaaggtcacacagcaggtaaactc

SEQ ID NO: 884538 - DNA, 597 bp, Homo sapiens
taggagggacctggtgggagataattgaatcatggggtcagtttcccccatactgttctcctggtagtgaaaaagtctcatgagatctggtttcatcagtggtttctgcttttgtgtcttctctcattctctctttgcctgccaccatccatttaagacgtgacttgctcttccttgccttccaccatgattgtgatgtttccccagccacagggaactgttaagtccaattraacctctttcttttgtaaattgcccagtcttgggtatgactttttcagcagcatgaaaatggattagtataatgtcctatcctgaaagcagtggagaagtattggagatttttatggcagaaatgacatactaagattacattaactttgacaatgagattcccatatgtttgaatcaatctgaatgtaatcaataactcatcaaactggcatagaataacaaaagaacttgactgctctatcacttattagcaatgtgaccttgagtaattaacttagcctctctgtaagcttcttaagcataaaatgggtataacaatagttcacattttatgtacacctagaattgagtatgatttctata

SEQ ID NO: 884539 - DNA, 539 bp, Homo sapiens
cttcttttgctgtatcccagaggttttcataggttgagtcatgattatcattcagtttaaagaattttaaatttccatcttcattttattattgatctaaagattaatcaggagcagattatttcattttcatgtatttgtatagtttttgaggtttccttttggagttaatttctaattttattccactgtggtctgagaaagtacctgatataatttctattttcttaaatttattgaggcttgttttgtggcctatcatatggtttatcttakagaatgttccatgtattaataaatagaatgcatattctgcagttgttgggcagaatattctgtaaatatctgttaagttcatttgttctaggatatagtttcaatccgttgtttctttattgactttctgtcttgatgacctgtccagtactgttagtggagtactgaggcccaccactattactgtgttgccatctactgcatttcttaggtctagtagtaattgttttataaatctgagagctccagtgttagttgcatat

SEQ ID NO: 884540 - DNA, 601 bp, Homo sapiens
attaaaccttaaagtttcaaaacgatctcctttgagttgatgtctcacatccaggtcatgctgatgcaagatgtgggctcccatagccttgggcagctccacccctgtggctttgcagggtacagccctcccaccccaactgctttcacagctggcgttgagtgtctgtggcttttccagatgtacggtgcaagctgtcggttgatataccattctggtgtctggaggatggtgactctcttctcagagctctactaggcagtgccccagtgggaactctgtgtgggggctctgaccccacatttcrtttctgccctgtcctagcagaggttctcaatgagaactctacccctgcagcaacttactgcctggacatccaggcctttccatacaccctctgaaatctaggcagaggtttccaaacctcaattcttgtcttctgtgcacctgcaggactaacaccacatggaagttgccaaggctgggggcttgcactctctgaagcaatgtcctttgcccattttagccatggctagagcaactaggatgcagttcaaaggctgcacaatgcagaggtgccctggacccagcccaggaaacc

SEQ ID NO: 884541 - DNA, 655 bp, Homo sapiens
tggagtttgcagtggcaagccacatttttcaaagggtctgtgaaagggtcactcagtttttccagtatgttcttgtggtggttctagagcaaaagttcacaatgtgagtctcctcactctgttctgtccatccaagtgggagctacatgttagtcctgtctcctatttgccatttttcctaaactcccaccttttcatactcttaatgggatcttttggagagtaaagttttaattttaaagaagttcaatatattattatttttctgttktgctttgtgtttttagtatcctatttaagaaatctgtgcctaacctaaagatacaatcttttttctgctatagtttattctataaatgtcataatatttgctcttaaatttgtgtctataatctatttcaagtccatttttataaagtgttaataaaaggttaaattttatttgtttgcacatgaaaatccaattgttttggtatcatttattgagtattctcaacaagtccattaattaccttgaaagttttgtaaaaaatcaattgaccttataagcattgtctattttcagactttctagtttgttccattgacctacatgcctgcctttccccataccacactgccttgtttgctatacttttataataagttttgcact

SEQ ID NO: 884542 - DNA, 593 bp, Homo sapiens
aaacctcaattcttgtcttctgtgcacctgcaggactaacaccacatggaagttgccaaggctgggggcttgcactctctgaagcaatgtcctttgcccattttagccatggctagagcaactaggatgcagttcaaaggctgcacaatgcagaggtgccctggacccagcccaggaaaccatttttcctcctaggtctcagggcctgtgatgggagggactgctgtgaagctctctgacatgccctggaaacattttcctcattgtcttggtgattaacatttggctcctcattacttatgtaaatatctgcagccagcttgaatttctgcccagaaaatgggtttttctttttcttttgcatcatcaggttgacaatttttcaaacttttatgttctacttcctcttgaatatttagaattttttttagaaatttcttccaccagataccccaaatcatctctctcaagttcaaagttccacagatctccagggcaggggaaaaygctaccagtctctttgctaaagcatacaaagagtcacctttgttccagttcccaacacgctcctcatctccctcaccacctcagct

SEQ ID NO: 884543 - DNA, 514 bp, Homo sapiens
tcacctttgttccagttcccaacacgctcctcatctccctcaccacctcagcttgtacttcattgtccatatcactatcagcattttggtcaaagccattcaacaagtctccaggaagttccaaactttcccacaacttcctgtcttctgagccctccaagtctctaggacattccaaacttttccacatttttctgtcttctgagtcctctaagctgttccaacctctccttgttacccagttccaaagtcamttccacatttttgggtatccttatagcagtaccccactcctggtactaatttactgtattagtctgttctcatgctactaataaagagatactcgagagtgggtaatttctaaaggaaagaggtttaattgactcacagttcaacatgactggggaggcctcaggaaacttataatcatggcagaaagggaagcaaacatgtccttcacatggcagcaggaaggagaaggatgaaagctgagcaaaagggaaacctcctt

SEQ ID NO: 884544 - DNA, 514 bp, Homo sapiens
tcacctttgttccagttcccaacacgctcctcatctccctcaccacctcagcttgtacttcattgtccatatcactatcagcattttggtcaaagccattcaacaagtctccaggaagttccaaactttcccacaacttcctgtcttctgagccctccaagtctctaggacattccaaacttttccacatttttctgtcttctgagtcctctaagctgttccaacctctccttgttacccagttccaaagtcacttccacatttttgggtatccttatagcagtaccccactcctggtactaatttactgtattagtctgttctcatgctactaataaagagatactcgaragtgggtaatttctaaaggaaagaggtttaattgactcacagttcaacatgactggggaggcctcaggaaacttataatcatggcagaaagggaagcaaacatgtccttcacatggcagcaggaaggagaaggatgaaagctgagcaaaagggaaacctcctt

SEQ ID NO: 884545 - DNA, 475 bp, Homo sapiens
cagcagtatcccagctgcatggttggtgagcattgtgccaggaaggttttgggagctatgttataacaccaccaacaaaaaatcccctcttacatttaaacatttcacatacaatttttaacagaaaaggaaaagagaggctaggtttctccttgtaatatacatgctatttatgrattgtgttatacataaaaatacacatactctaataatatcctcagtaattttttgagtcctactgagaagtgagtgctttgaaagcttgacaaaaagaaaagaaaggagtttcgaaaaaaaaaaaaaaaaaaagttaacagaagtcacacctcatcagtgggagtcaaaataatacaatttacatgatcctgggaaacggggggtttctaagcagccaccaataacactacatattagtcagactgccagcaccctggggaactatcagttggttgatgaaaaaaaaaaaaaaaagacc

SEQ ID NO: 884546 - DNA, 591 bp, Homo sapiens
gcagccacatccgtttgacccaagtaagatatcttttctaggacgagggctagaaattatttgtatgactcatcagtcatacaaaattattcttttttaattgttaatattataagaataatccaaactatctgactaggcascagtagagtcaattacagctgaacttgcacttcaaacacacctgtaatctgctttttgcacaaagtaaaagaaaataggttaaaaagtttattctcccaatatttcttctaagttttacaagctgtaagaggtttggtgtgactgaactttttattgtatatccaaatggaacatccagtcatttttagtcttcacatagctgaattaatttatcagaacaaaagagcattgctcgtcttctttttgaaattgcccacatatctcataaaagaacaatgaataagtgacttcaacaatgaatctgagtgacttcaacatggtattaaaattacgttctaggataacatttagcaaattgtcaaaataatattttcaattaacagttaaatatatagtgtacaattgctgttcaaggttagttttgctatatatacatatatgcataat

SEQ ID NO: 884547 - DNA, 591 bp, Homo sapiens
gcagccacatccgtttgacccaagtaagatatcttttctaggacgagggctagaaattatttgtatgactcatcagtcatacaaaattattcttttttaattgttaatattataagaataatccaaactatctgactaggcagcagtagagtcaattacagctgaacttgcacttcaaacacacctgtaatctgctttttgcacaaagtaaaagaaaataggttaaaaagtttattctcccaatatttcttctaagttttacaagctgtaagaggtttggtgtgactgaactttttattgtatatccaaatkgaacatccagtcatttttagtcttcacatagctgaattaatttatcagaacaaaagagcattgctcgtcttctttttgaaattgcccacatatctcataaaagaacaatgaataagtgacttcaacaatgaatctgagtgacttcaacatggtattaaaattacgttctaggataacatttagcaaattgtcaaaataatattttcaattaacagttaaatatatagtgtacaattgctgttcaaggttagttttgctatatatacatatatgcataat

SEQ ID NO: 884548 - DNA, 695 bp, Homo sapiens
aaattctctgcttttcacttaaaataagtgtatactatttttaaaagggcctttttttttctcttttaatcttcttaagaggagctaaatagcagtcctgagctgaggtttacctgaaaacttgcaaaagttcaggtaagaaaatataggcagagtccaaagaaagtgaactctgatcttaaaactagtaaaacaaaataggagaaacgaagtgatgagaagactgtgtctcttagcaaaatggctaaaagaagaaaagaaaaggaacagcatgcaggtagccaggcttgattccaatgcacctactgaattggcttcaagactgagataaaattaatgtgtgaaatgaatttaagcattttgaagaggtattttatgaggtcattgctacttttgcaatgtgatatggactgctaaattaaactgtacaacagaaaatctgagaaaacatatcrttattcaagcacagcttggtacttcattaacctcatagcaaaatctgagtaccaggcctgcagtgcacaaggataaaaaaaagtttgcttcaaaagtttaaacctaaatttgaacaataatttggttttcttctttgttattgcttattttaaaggtagacccttttgctgatatagattttacatgttaccagccatataaacaaattctggaatatctcaacaaaatattcttatttt

SEQ ID NO: 884549 - DNA, 529 bp, Homo sapiens
tccagtaaattgtgtatcccagtaaaaagtaatctctgatggttcttgtgtctttttcatcatgtttagtgcaatactgtaaaccctgactaacaccttgggacccatacaaagtgccattagtgatgctggaagtgctctcaaaaagcagagaaaagtcgtgacattacaagaagaagttgaattgcttgatatgtaccatagattcaggtctgcagcttcagtttcccaccattttaagataaatgaatccaacataaggaccactgtaaaaaaaaaatagaaaaggaaattcgtgaagctatagctgtagccacrccagcaagtgtgagaaccttgcactttttgcaaaatatcattttacttttgtggaaaatgcagcttttatgtgaatgcaggattactataaaaatcatatctatagttagactctaatattatttgagtcaaaaatgaagtctttatatgacaacttaaagcaaaactacagtgaagaatctaaagctgaagaattaaatgccagcataga

SEQ ID NO: 884550 - DNA, 588 bp, Homo sapiens
ttctgaatgaatctgcgttcagattctgtgtgtccaggaacataacaaattgaaccatctattcaccacatgcttgagtccccttgatcttatctatgctaagtggcaatcattctaggatgaatttagaaccactgctttataatgctgtccagtctgactgctagaaaattctcccctaaatttgaagccaattctatttttttctgcaattttaacccagtttccatttttcttcctctttgggtcttaaagaagagggtttttraaaaatctatttacttcttttcccccaaacaggaaagccctttaaatatttgaacacagtttagctttctcctcctaaacattcctgggttttctgaaaggttttcctataacagtctatgaccatgtttctctgggtggtctgcaggccatctgttgccgaatattctgaggttcctattaaaaaaaggccgacctgtaggtttcacctcagatgtactgaatcagactgtcagattggagagtcattgctctctgctgttggagttgggccccagctgggctcagtgtcaacctgctctgttctccttttaactgagt

SEQ ID NO: 884551 - DNA, 588 bp, Homo sapiens
ttctgaatgaatctgcgttcagattctgtgtgtccaggaacataacaaattgaaccatctattcaccacatgcttgagtccccttgatcttatctatgctaagtggcaatcattctaggatgaatttagaaccactgctttataatgctgtccagtctgactgctagaaaattctcccctaaatttgaagccaattctatttttttctgcaattttaacccagtttccatttttcttcctctttgggtcttaaagaagagggtttttgaaaaatctatttacttyttttcccccaaacaggaaagccctttaaatatttgaacacagtttagctttctcctcctaaacattcctgggttttctgaaaggttttcctataacagtctatgaccatgtttctctgggtggtctgcaggccatctgttgccgaatattctgaggttcctattaaaaaaaggccgacctgtaggtttcacctcagatgtactgaatcagactgtcagattggagagtcattgctctctgctgttggagttgggccccagctgggctcagtgtcaacctgctctgttctccttttaactgagt

SEQ ID NO: 884552 - DNA, 645 bp, Homo sapiens
ctgcagaggtgggtatattgatcaaattagtaatggcaacactactctttcacaattttgaaaatagtgtctaggttggaatagccaacgaaatagtagatatttataatttttgcaatgcttttaaatgtgttgttaatactcgtttgactagttgactttattgtggctgaaatgcaggctcaaaagtagtaagaggcacttactgtttctaagttctattatggggtgtgaaggtcctttagttttcccaaggtctgataggcatgggggcttttaatttcacrtgggatgcttacaaatcgtcttctatttacacgtagcttttgaagtaattattttcccttttagtgtccaaatctctcaagcaaagaggctttttagtaaaaattgtgatttaaagagaataattgtttcagaagagtagtgaaaaatgttcaaattgacattttgaaggaaagcacaaacaaaagaaattaattttatttcaagaaaagagaaaaagttttttcccataacatagtaaacattttggcaaagaaaatagcaagtatgagtacatgcatgtgtatgtgtgtgtgcccttttcaagagaagttgacactaagatgatgcttcagatgccagagtgaagaggtttctagt

SEQ ID NO: 884553 - DNA, 618 bp, Homo sapiens
ttattttaggtttcactgatggaaaaatggagaaggaagatctgatgaaacagcaagtccttaagagtgggagccagaagtttaagttgtaacaggttttggataagattcagaacttagaggataacgaactgcagaaaaattctttggaagataatgactagagaaaaattctgggtcaaaggcagctattgtggtgcatagttattcagatttcaaatttgaaaagaaatcattgtttcataggccgaaaggtgagccactggtatctgtcatcagcaaacaggaaacatgaagaagaagtacatttattctataggttgcaacacacagtacaaatataccattagaatacctaaaatgcaagatgaatcagtcccgtgaattgaaactttgattttgttcttgagctagtaaagtttacagagttctatgaggaaggacatctgtaaaatatcttacaatacgtwgtcttctattttgagagaaagggaaagtatctttgcactgtgaatataccctttgtattattaactgtgaggacatgacaaggctaaacaattgcttctttcttgtcaaagtttcgtttgctttggttagtgccattgtttgagaaaa

SEQ ID NO: 884554 - DNA, 646 bp, Homo sapiens
gctttggtgacatgcccattccttgctctgaatcttttacaaggtttcagttagagtgcttttggctgagagttactgatacccatttaaaaatggcttaaataatgaggatgatataatactttacttacaagaagttatgaggttmatatagtgactcaggctaggcgcagtggcttgtgcctgcaatcccagcactttgggaggccaaggtgggcggatcaagaagtcaagagaccaagactgggctaggcgcagtggctcatgcctgtaatcccagcattttgggaggccgaggtgggcggatcacaaagtcaggagatcgagaccatcctggctaacatggtgaaaccctgtctctactaaaaatacaaaaaattagctgggcatggtggcgggtgcctgtagtcccacttactcaggacgctgaggcaggagaatggcatgaacccaggaggtagagctagcagtgagccaagattgtgccactgcactccagcctgggtgacagagggagactccaactgaaaaaaaagaaaaaaaaaaaaaaagagatcaagaccatcctggccaacatggtgaaaccccacctttactaaaaatacaaaaattagccaggtgtggtggtgtgtgcctataattccag

SEQ ID NO: 884555 - DNA, 646 bp, Homo sapiens
gctttggtgacatgcccattccttgctctgaatcttttacaaggtttcagttagagtgcttttggctgagagttactgatacccatttaaaaatggcttaaataatgaggatgatataatactttacttacaagaagttatgaggttcatatagtgactcaggctaggcgcagtggcttgtgcctgcaatcccagcactttgggaggccaaggtgggcggatcaagaagtcaagagaccaagactgggctaggcgcagtggctcatgcctgtaatcycagcattttgggaggccgaggtgggcggatcacaaagtcaggagatcgagaccatcctggctaacatggtgaaaccctgtctctactaaaaatacaaaaaattagctgggcatggtggcgggtgcctgtagtcccacttactcaggacgctgaggcaggagaatggcatgaacccaggaggtagagctagcagtgagccaagattgtgccactgcactccagcctgggtgacagagggagactccaactgaaaaaaaagaaaaaaaaaaaaaaagagatcaagaccatcctggccaacatggtgaaaccccacctttactaaaaatacaaaaattagccaggtgtggtggtgtgtgcctataattccag

SEQ ID NO: 884556 - DNA, 595 bp, Homo sapiens
aggacgctgaggcaggagaatggcatgaacccaggaggtagagctagcagtgagccaagattgtgccactgcactccagcctgggtgacagagggagactccaactgaaaaaaaagaaaaaaaaaaaaaaagagatcaagaccatcctggccaacatggtgaaaccccmcctttactaaaaatacaaaaattagccaggtgtggtggtgtgtgcctataattccagctactcggcaggctgaggcaggagaatcgcttgaacccaggaggcagaggttacagcaagccaagattctaccactgcactccagcctggcaacagagcaagactctgtctcaaaaaaaaaaataaaaaataaaaaataaaataatatatatatatatatatatatatatatatatagactcaataacatcagggtccctggtagacttctctgctgttctcttaactttcccttcaagggcaagatggctcctgcatatcctagaatcatatcaagtagcaaagtctagggcaggaagaaacaagtccttgacttgcatccatattaagggtgaggaaagtgtcccaggaaatatcctcttaaatttt

SEQ ID NO: 884557 - DNA, 595 bp, Homo sapiens
aggacgctgaggcaggagaatggcatgaacccaggaggtagagctagcagtgagccaagattgtgccactgcactccagcctgggtgacagagggagactccaactgaaaaaaaagaaaaaaaaaaaaaaagagatcaagaccatcctggccaacatggtgaaaccccacctttactaaaaatacaaaaattagccaggtgtggtggtgtgtgcctataattccagctactcggcaggctgaggcaggagaatcgcttgaacccaggaggcagaggttacagcaagccaagattctaccactgcactccagcctggcaacagagcaagactctgtctcaaaaaaaaaaataaaaaataaaaaawaaaataatatatatatatatatatatatatatatatatagactcaataacatcagggtccctggtagacttctctgctgttctcttaactttcccttcaagggcaagatggctcctgcatatcctagaatcatatcaagtagcaaagtctagggcaggaagaaacaagtccttgacttgcatccatattaagggtgaggaaagtgtcccaggaaatatcctcttaaatttt

SEQ ID NO: 884558 - DNA, 595 bp, Homo sapiens
aggacgctgaggcaggagaatggcatgaacccaggaggtagagctagcagtgagccaagattgtgccactgcactccagcctgggtgacagagggagactccaactgaaaaaaaagaaaaaaaaaaaaaaagagatcaagaccatcctggccaacatggtgaaaccccacctttactaaaaatacaaaaattagccaggtgtggtggtgtgtgcctataattccagctactcggcaggctgaggcaggagaatcgcttgaacccaggaggcagaggttacagcaagccaagattctaccactgcactccagcctggcaacagagcaagactctgtctcaaaaaaaaaaataaaaaataaaaaataaaawaatatatatatatatatatatatatatatatatagactcaataacatcagggtccctggtagacttctctgctgttctcttaactttcccttcaagggcaagatggctcctgcatatcctagaatcatatcaagtagcaaagtctagggcaggaagaaacaagtccttgacttgcatccatattaagggtgaggaaagtgtcccaggaaatatcctcttaaatttt

SEQ ID NO: 884559 - DNA, 629 bp, Homo sapiens
aaagaactccctttggcattatttgtaggacagatctggtattgagatccctctgcttttgtttgtctgggaaagcctttacttctccttcgtgtctgaaagatattttcactggatatactaatctagggtaaaagtttttttccttaggcactttcaatatgttatgtcactctctcctggcctgtaaggttttcagtgaaaagtctgctgccagatgtattggagctccattgtatgttgtttgtttcttatcycttgctgctttttggaaactttctttatcctttaccttcatgattgaattattagatgccttgaggtcgtcttcttcgggttaaatctgctaggtggtctagaaccttcttttacttggatattaatatctttctctaggtttggaaagtcctccgttattatcactttgaataaacgttctgctcctgtctctctaccacctcttcaaggccaacaacacttggatttgcccttttaaggctatttcctatttttttttcctttcttttatgatgtctttgtttggttttggtatctgggtaatactgacctcaaagaataccttggtaactgttccctcctattctttttctttaaaaaaaaaaataatt

SEQ ID NO: 884560 - DNA, 654 bp, Homo sapiens
aggaccagacattgtgcaacagatacaagctgtccttgccaagtcccaaccaaaatctgacccacagaacctgtcagacaaagagaatgactgttttaggccctgcagtttggggtggcttattacacagcaaaagataactggaactgggggtaacattcagaatgtgttccagtgatagttctgttctcagatttgcttccttctcttatacctcctgatcagcaggtggaaattaaaagagcattgtgagatgctggagagatccagaaccacttgccatcaacggctggggaatcctagccagtgagctcgcaggagttagagcagctttttcagttagagcagttagagcctctggccaggcccctcgattccgtacagatgccagttcctacagttgtcgatgctaaaaaggaagggatacaatraggtagggggttgaagtgttgcacaaggtagagtttacttggttgcattcaccacagtccagagatctggtgccttctcttattcagggtggtcagtactgaagccaaattataatagggaagttgtttggtgagcaaagaatcaaagggaggggtattcacaaaaatgcaaatattgaacggggattagattcaaataggctggcagatccagctgcacaaa

SEQ ID NO: 884561 - DNA, 570 bp, Homo sapiens
aggatgacactctaatttctctagtggtacagttgtgtgccccataaggacattttggtcaacaacagacaacatatatgatggtggtcacatgagattataatggagctgccctatacacgagtagcattttaaaaatcttttatactgtatttttactgtaccttttctatgkttaggtagatacacaaatatggaccattgcattagaattgcctatggtattcattcagtgcagtaacatgttgttcaggtttgtagcttaggagcaataggccattccatatagcctaggtatgtgtaggcatactctacgctgttctgtattagtcagtttttgcattgctatgaatacctgaggctgtgtaatttatttaaaaacaggtttgttttggctcaaggttctgcaggctgtacaggaagtgtgatgctggcacctgcttctggtgagggtctcaggaagctttcaatcatggcaggaggcaaaggggcagcaggtggtcatattgtgagagctggagtgagagagtgagggtgcaggtcccagactcctttaaacaaccagatctt

SEQ ID NO: 884562 - DNA, 659 bp, Homo sapiens
aaggggtgtgttgtgactgtctctatgtattgcaaaagcaatacatcacagtcagtctaattctttaaaaaatcagccaaattgacctctttggctgattagttcagagactggccagtcagtgagaggattactctgacagcatcaggccrctagatctttctggttccagggctcatagtctttctgtgagaccccatggcctactgcccattacttgcattgtaacacctccttccagtgaggattaccttttagtccttgtcattagcttacccatgaggatttacatacaacatttcagataatgtctgctttatttttacacatctcatcacctctggtagcacatacatttaaccggaaacagagtgaaccaaaaaacaaagaccaagatcttttcattccataatttgtagccatctaacatttctattatttataccttattgcacaatgcatctttttctgtgggttttctttgtatctagccacttaatgagctgtgcaaattgccactatatacaatttatgactaattttattcataacgtattttgaatttttcaccaaatcaaactcatccaaatttcagatgagttttagatattatatatatatttactcggacaaaatctgttgctgaggactgtcagatt

SEQ ID NO: 884563 - DNA, 659 bp, Homo sapiens
aaggggtgtgttgtgactgtctctatgtattgcaaaagcaatacatcacagtcagtctaattctttaaaaaatcagccaaattgacctctttggctgattagttcagagactggccagtcagtgagaggattactctgacagcatcaggccactagatctttctggttccagkgctcatagtctttctgtgagaccccatggcctactgcccattacttgcattgtaacacctccttccagtgaggattaccttttagtccttgtcattagcttacccatgaggatttacatacaacatttcagataatgtctgctttatttttacacatctcatcacctctggtagcacatacatttaaccggaaacagagtgaaccaaaaaacaaagaccaagatcttttcattccataatttgtagccatctaacatttctattatttataccttattgcacaatgcatctttttctgtgggttttctttgtatctagccacttaatgagctgtgcaaattgccactatatacaatttatgactaattttattcataacgtattttgaatttttcaccaaatcaaactcatccaaatttcagatgagttttagatattatatatatatttactcggacaaaatctgttgctgaggactgtcagatt

SEQ ID NO: 884564 - DNA, 659 bp, Homo sapiens
aaggggtgtgttgtgactgtctctatgtattgcaaaagcaatacatcacagtcagtctaattctttaaaaaatcagccaaattgacctctttggctgattagttcagagactggccagtcagtgagaggattactctgacagcatcaggccactagatctttctggttccagggctcatagtctttctgtgagaccccatggcctactgcccattacttgcattgtaacacctccttccagtgaggattaccttttagtccttgtcattagcttacccatgaggatttacatacaacatttcagataatgtctgctttatttttacacatctcatcacctctggtagcacatacatttaaccggaaacagagtgaaccaaaaaacaaagaccaagatcttttcattccataatttgtagccatctaacatttctattatttataccttattgcacaatgcatctttttctgtgggttttctttgtatctagccacttartgagctgtgcaaattgccactatatacaatttatgactaattttattcataacgtattttgaatttttcaccaaatcaaactcatccaaatttcagatgagttttagatattatatatatatttactcggacaaaatctgttgctgaggactgtcagatt

SEQ ID NO: 884565 - DNA, 662 bp, Homo sapiens
tgaagtacaggcttacccaattcaccctgtctgacgctcttccccagggggagcagctctggacctgaaagcctgtcctcccaaaccctatcgctggatccttgacatgacttggctgaatcttgtggagctgagtaaacttccacaatttgcagaaattatgaaccaggtaatacaataaagggctggttgaaagtgcagatctgcaaacccaaacatacctgggccgcttaaactggggcttcctggcagcaattccttcacccaaaaaagtcaacccaatagtttggatttgaggctctgtggctgtctgggagagatcttggacagatggacctcagggttaacctcttcatagttgcaggcaactatgttttcctcctgtgtggtgggcatgggtcatttttgtatgcctgttagagttgctgctggaatcagaaccagtagatggaccsttttattgtagacgactcatgcttttacactttaacttctgcctatgattaagtgatttgtacagatttgaatgtgagtcaaattaagaggttgaggtccctctaaaaaattaattattttagtggtgaaatataatggtgaaaatggagaaataggtaccgatttgcttgttgtttttttcttatttgaaaatgtacattgattac

SEQ ID NO: 884566 - DNA, 646 bp, Homo sapiens
aaacaatacagttcttccagcaaaaatggaagcttattattctttcttatgtaacagcctcaggggtttcaatcatctctcccttcttgccttttactataagcagtcaggaggaatcaagaccctctttcaacacttttcttagaaatctccttggctaaatacccaattttattgcttataagttctaccttccacaaagcactaaaacacagtttagccatgtctttgtcattttataacagggatcacctttttcatttcccaaaatatatttttattttcatttcagacctcacaggaatcacccttagtgtaaacatttctagcctgtaccwcaaaactctttcaacctctacccattacccagttccaaagctgcttccacattttttgatatttgttacagcagtacctccatctttgtatcaaaatctgtattagtctggttctccagagaaacagaatgtagtaggagtttttagtagaaagaaaattttatgtatgtatatacatacacaaatatatgtatttataaagagatttactataagatatttgttcatgagattatggaggctaagaagtcccaagatctgcagtcagcaagctggagatcaaagagaattgatgcagtagtcccatt

SEQ ID NO: 884567 - DNA, 688 bp, Homo sapiens
agatgatttagggtatctggtggaagaaatttctaaccagcaaagcattcaagaggttacctgggtgctgttaaaggcattcagttttataagggaagcagagcataaaagttcagaaaatttgcagcctgacaatgtgatagaaaagaaaatcttagtttctgaggagagactaaagctggctgcaaaaatttgcataagtaacaaaaagctgaatgttaatccccaagacaacggggaaatgtatccagggcatgtcagaggtctccaaagcagccgctcccgttacaggcagagagacctaaaagggraatatggtttacaagcatataagctgtatataagcattgtactatagttgataaagttatttctcctgaggatatgaatgatcagttctgatactgctaaacatgtggacaggaattgaacaattaagcaaataataaagtaaagtaagtaaataaataaagaatggtggtttctcactgtaggaatgggagtttacagataaacaagggagtagactagaatgatcctggtaaagaactcatgtttaatttaatatagatacagatggttatatataaaatatttatagagttcattattattatttatggtagttatattctataaagtcattacaaacactgaattagcaaatgaagaacaattgtccaagaca

SEQ ID NO: 884568 - DNA, 677 bp, Homo sapiens
catcactaggggtgacgatgagaggggcttctcacttctataactgtgattctccatgttttatggctaactaggaacacagtgatgtataatgtccattggttcaattatatatcagattttgaagaacagcaccccaagctgtcattctcaagttgtcatattaactgtatttgtaaatagactattgagaaattcaatcagcaagtgatatagtatattacaggactgaagaatccgtaatcatgcacccatattgaacctctttcatcaaagtcccaggtgatgatatgagggactccttgaaggtattcaggtagtcttaccccacaaacagtggattgggcaaggcgatgagggcaaagaaggctaactcatatccccaatttgtacaaaatacctgtgaggttagaatcctggatcttataggaaataagaattataatgtcattaaattacctctaaggagctagttggtttcctcaagggatggtacgatatcagcattattttctgttgctgctacattgaacattyggtagcagcagtagttaggtaactctgggtgagaaggagctcatgctttaaggcctaccaattgcctccatcactgccaccatgactgttgaaactctggagtggttgacgccaaaggctagctcacatctacagagagg

SEQ ID NO: 884569 - DNA, 630 bp, Homo sapiens
ccaaattcacttctctttacccagtgctataatccctcttccttaagtcattctctttgtcacattcttaccaacatatctccgctactagattggtacacataccataccctggacagtcatttacttttatacacattacagccctgagaacaaactgcaagacccataaagagtcaaataggtttgcattttcaattctaaattcagagagagagaggaaaaaaaaaaaactaaaagctcaaattacacyttatcttttgaagtaattttgaaaatgtattttcttcattcatacatagtctttaatttcattcagctgttaacatgaaatatgtggccaattatttaggttcaactgttaactggccacttcccttacctcattgccaagatttagaatatgaaattctatatcttttttcatatttgcaattttgcataccaaatgctctgcattttagttgctttacattgatggatgtttacaacttgcaaaactccccaatagactaaccaatgcagatttcaagatgatgaacaaagattagataaatgaatggaaactcactctttaagtgaccaactaattcattattttcctaccataatgatgtctgtttccccatg

SEQ ID NO: 884570 - DNA, 624 bp, Homo sapiens
ttctaaaacatgatttatttatttcaataaagcaagaaaattataccagtaattctagtcatataaatttcatgatctcttcaagagccattgttttccaaggcaaaacttcatgttgcaaccagttttttcctgactcttgcttcaaactcacgtgagccccaggttccctgaacagtccttttgtggctgtagctaggaatcaccagggagtcacgatccagtagcttacagggtgacttcttcctctgggcatgactgacccatcctgtcatctggtcacctagatactgcccagatagaaccaccctgcaggccgggtcactcagagcaccccagccctgmacagctgctccttcggatggctccctccttcctggtgccatgctactttgactggatcatgcaggccctccaggcattaccaccacaccactgatgcagtggagtcctggagctgacaaagttgccaggtattcttttttcttttcttttttttttttcttttaccaattatttgattttgttttatttttgaggcaaggtctggctctgttgcccgagctggatttcaatggtgtgatcatggctcactgcaacctctgcctcctgggttcaagcaat

SEQ ID NO: 884571 - DNA, 652 bp, Homo sapiens
ttatctgtaattacagtaactacttcataggatacaaaatttcagttagaaggagtaaattcaagagatctgtcatataatacggtgactaaagtaaacaacaatgcattgaaaattgctaggagaattttgtttaaatctgcaaaaaacttctcactaaattatttgatattggaaaacagttactttttcagaaaaaaatgttatattaacatctaatgggcttaatgttattttaaatgaatttaaaacattgtttaaaaataactgtcctggcagaacgtaagcattatgtgttcttygcgctgctgctgctgctattgctgttattattacgattattattactagagtttgggctattctgaggatgtgttttagaagggcttctctcccagccttgcatccagttcctcatcttcctctgtaaggcattaggatatctcctttcagcacccccctcagaaaaatcctacccccaaagataaacagttgccaaactcctctctcctagccaagtctgaattgaatccctttttcttcctttacatttgtaactttctccctcatctcttatctaggatgtggcacaacatctgataaaataatgacagtcataaagtaagaaaggcaaacactcttctttctagat

SEQ ID NO: 884572 - DNA, 652 bp, Homo sapiens
ttatctgtaattacagtaactacttcataggatacaaaatttcagttagaaggagtaaattcaagagatctgtcatataatacggtgactaaagtaaacaacaatgcattgaaaattgctaggagaattttgtttaaatctgcaaaaaacttctcactaaattatttgatattggaaaacagttactttttcagaaaaaaatgttatattaacatctaatgggcttaatgttattttaaatgaatttaaaacattgtttaaaaataactgtcctggcagaacgtaagcattatgtgttcttcgcgctgctgctgctgctattgctgttattattacgattattattactagagtttgggctattctgaggatgtgttttagaagggcttctctcccagccttgcatccagttcctcawcttcctctgtaaggcattaggatatctcctttcagcacccccctcagaaaaatcctacccccaaagataaacagttgccaaactcctctctcctagccaagtctgaattgaatccctttttcttcctttacatttgtaactttctccctcatctcttatctaggatgtggcacaacatctgataaaataatgacagtcataaagtaagaaaggcaaacactcttctttctagat

SEQ ID NO: 884573 - DNA, 628 bp, Homo sapiens
ttgttgctcttaattacaaattggagaagatgtcaatgaacaaatactttttccaactaccaatcatttccactttcatggtgacgaaaatatattactattatcactatactattaaaaagaacaatttgaactaatatctttggtgagccatagggctatccttgtcaaaatctaaagacaagcttgactttcactgacattaaaatgcaaataatttgaaaaattatcatatttgtagaataaccaccaaaaaactcacttaggtaactacttgacagccagagggtgcagagaaagattgattggaaaagcragcaaggtctcttttggcaaagacacttgacattcagaccagcacctctataaaaaaaattactgagttttctgtccctctgggcccagcaggcttcagatttcctatgtaactcccatgaggcctcatttgcaactcagattctcaagccattcaacaagctgctgctgtctaaaatcaacatgggcatttgtgaaacttgaccacagtccctctcctgttcctcattccttaccctccatccacatcacacagtccctgcaggttcctctgcactttgaataggccctgtccactggacaagcacactct

SEQ ID NO: 884574 - DNA, 569 bp, Homo sapiens
ttaggtttgttaattatctgtcttaccagctggagagtaagctatgtgagcgtatgtgcttttgcctgttttgttcactactatatccccagcacaaagcacagttgctgacacataacaggcactcaacaaatatttgttcgatcagtgaatggatagatggatggagtcacagcctcccctgaagcagagatctgacaagtgccttcctagaggaaaagtcccacatgagtgtatccmggaaaataaaggaataaggtgggaatgctctcctggaggggagctatcagggagaggtcagctgagcctaaagggaagcagaggctggatggggaacaaagtttacctgcaggctctgaagctgaacccaggtagacagctgccaggtttctagaggcagactgtagatggaaagtgcaagacagcaaggggtgcaggatgtaacgggctccaaacagaaatggggggtgccaagcaccatcatatttgcattaatccttagtaactaaaatccctggtgttgtgcctcctggaataagctccatagagttgcccatgtaagcagcagc

SEQ ID NO: 884575 - DNA, 585 bp, Homo sapiens
tcaagaatcttgattgtgaaaggaggtggattcttgtttgcaataacatggaaacatatacaatgtgatatcttctatgtgtggtagttgatttaggaatctatgaagcatctattttctttggtatttaaagtttatacacatttcactggcctcaacccttaaagacctgcctgaccctcatttacttctcttccctgacactggtcgataatattgagcacagagagtgaaagagaggaagaaaaatcaagggcaagatagaaggagaagagagaragaccaaacagtttctgaggttacttctagctatgaaattctgaatcaagccagtgtttcgtcttctgtgtcctgcattcagcctgctgcaggtagagaatcccacaccattgcactggcagagactcctccctgccaagttgtgtggcccagaacagctgcctctcccttcatgcctgctactgctaaaactctctacactgctgtgttttcaccttgtgtgcgtgcccccatttcccatgctacggaggaagctgaagtcatcaggcaggaactctaaatttctctgtagcccctcacccctta

SEQ ID NO: 884576 - DNA, 508 bp, Homo sapiens
ctctagaaactgggcctatataatacctagcccttggttggacatcatttatccataaatagatttatgtgactttgggtttttttttttttttcgagacagagtcttgctctgttgcccaggcttgagtgcagtggcgtgatctgagctcactgcaacytccacctcccgggttcaagcgattctcctgtctcagcctcccaagtacctgggattacagccgcacgccactacgtctggctaatttttgtatttttcgtagagacggggttttaccatgttggccaggctggtcttgaactcctgacctcgtgatccacccgcctcagcctcccaaagtgctgggattataggcgtgagccactgcacccggccattaggggttattttttaacaaagttatcctattgttaggattcatggcggaactgatctcaggtctatttctaattgatgtgacaaataggaagcaactgcaaatcatagcttttcctaacccaagtctttt

SEQ ID NO: 884577 - DNA, 508 bp, Homo sapiens
ctctagaaactgggcctatataatacctagcccttggttggacatcatttatccataaatagatttatgtgactttgggtttttttttttttttcgagacagagtcttgctctgttgcccaggcttgagtgcagtggcgtgatctgagctcactgcaacctccacctcccgggttcaagcgattctcctgtctcagcctcccaagtacctgggattacagcygcacgccactacgtctggctaatttttgtatttttcgtagagacggggttttaccatgttggccaggctggtcttgaactcctgacctcgtgatccacccgcctcagcctcccaaagtgctgggattataggcgtgagccactgcacccggccattaggggttattttttaacaaagttatcctattgttaggattcatggcggaactgatctcaggtctatttctaattgatgtgacaaataggaagcaactgcaaatcatagcttttcctaacccaagtctttt

SEQ ID NO: 884578 - DNA, 614 bp, Homo sapiens
tgaagtgttaataataaaatgataatattagtgtgtgatgttttaactttaagctatattgttttccaaaaaatatttacagaaaatttatagtttaattgaaaactcactgtaacttgcagccattgacagcaaaacgtttaagttgtttacacataaaggtggagcatgctgcaggggtatcttakcagttctcccaacaagatggagtcccctgttccccttgttcaaacttgggcgttatcattattatatttgccaaattattacatgtaaatgtttatgtgaatgtgaaaaacttataaggagagtaggtgatccacctttctaacatattctaatacattaggtacatttatattacatatttgttgtagtatagaagaaaaatattcaataccttagtgtatggttgttaacttcagacaaaatatgtaacctcattaagcattaaataattaggcaattagtgtcttaaatgctttacattatgcagaaaaccttggtgaattgttaagtatgtttaagaagattttagtcgtgttcgatgaaattggtttgagatttttggataggctttaaactctttatcatttttttcccatttaaaatat

SEQ ID NO: 884579 - DNA, 645 bp, Homo sapiens
cttgcaaaatgcctagcagagtgactgacatatacaaagagcgctgtagggattttttattatcctttctcatgcagactcacaggcattcatgttcacaatgcttttcccccctgccattacaggttttagcaacaaagagaaaatgtgtaacagaggcctactcaacaagccagttaacttcttggagtcacttaaaaccagaaagatgggtgtcctcataaaacacaggactggcccagtcctaaagatgaagctaaacatggcttggctgtgggaactgtagggcygaatggacagagctgaaaaccagatttcttcatctacagactgacaaaattgtctatgatcctttgattctggctcatgccatcttctttttccgtcttcctaagcatggacctttgcccaataccatcttctctgtttcctgcttcacactcttccctctggggacaatccacatccagggctcccttctagcccttgtctcctgaatctgttgcaccagccccaatctctctccaaattcccagggagctgcagatgtttccacccacgtcccaccagcacctcaacccagcaagtgggaaacagctcattatccgccccacacaccagctgtttttccattcattctcctcg

SEQ ID NO: 884580 - DNA, 617 bp, Homo sapiens
acatggcagcctgtctggagagctccaaggagattggtatgactgggggtacgtgacattatggaacgcaaaacctggctgctgagagggtggatgtgcttgcacttgcatctctagtcttggtgcgagccattggaggatttttcaggggaagggaaactgggctgacctggttccagcaaactctctgacaatcatgagaagcccagggtccagggggatgagtaagtgtgacctccaggaaacggggcaccactatcagactctatctgtcccatggcttacttctgtgagattcgaaatagtgtagaccttgtcagtccatgagctagtaattatgcccaccaattactgatttatttgcctttctgagatgtgcagtgatcccaaggacaaagatggatttaccttatgtttagaaacttctagaagttgaaatgttcctaacaacctttcctgtggaggttgtacctcacacktagagtgtgtgataagcatttcttttcctaattaaataaaatggagaaaagacacaagcatcagctataaagctcccagtcagtcacagtcaagagactgaatctcatctcttttatttattttttgtgttaactggg

SEQ ID NO: 884581 - DNA, 630 bp, Homo sapiens
cccaacaagtggtatcaggtaaggcctgtgataacaaaaggcctaaacaaaaatccaaagtctcacaacataatacctaaaatgtccaggatataatcaaaatcacttggtataccaagaactaagaaaattacaacttgaataaaaaagacaatcaacagataccaacattgagacaaatcagatgttgaaattatctgacaagaactgtaaagcatctgtcaccaaactacttcagaaatcaattgcaaacatgtttgcaacaaataaaaatccaggcaatcttagcaaataaatgggagatataaaaaagaacccartggaaattttagatctgaaaaacacagtaactgaaatcaacatctctctggatagactcaatagtagattggagatgacaaagggaaaatcagtgaacttgaaggtggaacaacagaatttactcaagctgaaaaacagagagaaaatttagtggaaaaagataaacagagcctaagggatctgtgagactataatgaaagatcaatattcatgtcatcagagtcccaggaagagaattaagaaaagaccatgagcctgaaaaagtatttggagaaataatgactgtaattttttcaaatttggcaaaaa

SEQ ID NO: 884582 - DNA, 589 bp, Homo sapiens
ttctctccaccctgtaaaaatacctgccccacaaaaacactggtccacactcctttctcctgactaaccttctacctatgcttcacgtatcagcaaaactatcacaacttaagggaaccctccgtccagattacttagggttcctatgatctccttcactcctgctgcactgggcacagtcctgtatggtacacgttataccaggtttataaataccctgtgtttgtttccccaaccagactggaaactcagtgagggtaggcatgtgcctactctcatascctgcactcctcagagagtagaattgaagacaaaggcttatgtgtgaatgttttgggaggaagatgactccagaaagcagaagtgagaggcaggggagcaatgcataggataaaaagccaatataagcatgtgttatcaagttgccctccatgaaaggcaactggctgcttgaatttccagggctacctaagaaaccatatgaaatgcatcttgggatcatccatgggggaagaaaaagagaggcagtcatcttatgggatgtaaaagcccccaaatgccaaggtacacataagtgggtgctgtgaga

SEQ ID NO: 884583 - DNA, 593 bp, Homo sapiens
taatgagtatcttggggaaataaatatattttgaggctgttagtatcctagtacacctcaaactttcactcactagtttagcatttattgatggtctgtgcctggggcaagatggtcagtgcattatgctggttgccaaataatgaatttctgattccatcatccattctacatttattagttgactttctactataagaaagaacttttctttcactcccatttatttacttatgcttttatttatattaggttgacttgtgcatttttactttgagttataatcctttcctatcattatttattttgatgctcaaattgyctgaggtttgtcccgtgggaactccttcaaactagttcctatgtctttctgacatgcccctaatcatcctctgagcgcgcccttaatttctggcacatctgctccaggctcatcttgtgctttccctgccttagccttaatatcagccattttcccatggaatcttaacttcttttagtgaagaatggtatttaaaaactaagatctgggtactaaaagcatgcgcatttctacagatgtggcattgttactaaaccctctcagtccacaa

SEQ ID NO: 884584 - DNA, 635 bp, Homo sapiens
tagttcacttgtttctgtttagattcctttttgtctgccccccacccctgaaccatctttctttgttaattttaattatttttctgtgagcatgtgaaataataacatagtttcaaaagttagaactgtacaaaaagaaatcctcagaaaagtgacatctcccattacttctgtcctttccacctcattccactcatttcctgtaagtaaccaacttcattagctttyctgtgtttccttttgcacaaatgaacagatatctgtgtattttcccataccccttccttacataagggtggcttaatagacatactcttttgagctttgcttgttcactcaaacgcatgtcccagaaatcactccatatagagatcttcttcattctttcattacagctgcatagtactgcattgtgtagatgtaccatagattattcaaccaacctcctatgtgtagccatttagattgtttccaatattttgcaattaaaaataaaacaaacaacccagtacatatgtattttcatattgttagaggtatatcttaaagagtacatttctataagtgggattaatgtgtcaaaatgtaaaaacaaatgtagttttgttaggtattgccaaattcccctccagaaa

SEQ ID NO: 884585 - DNA, 624 bp, Homo sapiens
tgttagtttaggtacatgaaatttagtactcaaagtttagtttaacttaaatatatcacatataaaagctgccatggttattccaaaatttttttgaaattaaatttattcttagtatttttctagcaaatgttaagtgcagcgcatgaaagtttttataacaaatttcaagtgcagcatattaaaatgttcggcatttcagtggtattttccatttttgyggcaactctattaacatcttgatgtattttcccttttttttttcattgagacagagtcttgctctgtgggccaggctggagtgcagtggcactatctcggcttactgcaatctccgtctcccgggcacaggcaattctcctgcctcagcctcctgagtagctgggattacaggcgtgtaccaccaggcccagagaatttttgtattttcactagagacagggtttcaccatgttggccaggctggtctcgaactcctgacctcaggtaacacacccacttcggcctcccaaagtgctgggactacaggcttgagacaccgtttttaaaatccccatagaaccatgagaaacaagaaacattattataaaacagagaatgtgttttgtacttaattcccatcac

SEQ ID NO: 884586 - DNA, 624 bp, Homo sapiens
tgttagtttaggtacatgaaatttagtactcaaagtttagtttaacttaaatatatcacatataaaagctgccatggttattccaaaatttttttgaaattaaatttattcttagtatttttctagcaaatgttaagtgcagcgcatgaaagtttttataacaaatttcaagtgcagcatattaaaatgttcggcatttcagtggtattttccatttttgtggcaactctattaacatcttgatgtattttcccttttttttttcattgaracagagtcttgctctgtgggccaggctggagtgcagtggcactatctcggcttactgcaatctccgtctcccgggcacaggcaattctcctgcctcagcctcctgagtagctgggattacaggcgtgtaccaccaggcccagagaatttttgtattttcactagagacagggtttcaccatgttggccaggctggtctcgaactcctgacctcaggtaacacacccacttcggcctcccaaagtgctgggactacaggcttgagacaccgtttttaaaatccccatagaaccatgagaaacaagaaacattattataaaacagagaatgtgttttgtacttaattcccatcac

SEQ ID NO: 884587 - DNA, 640 bp, Homo sapiens
cttgttatgccttatcaaagagcttggctgcattgtgtccaggtcctaaggaaccgtggaaggttgaacttaagagtgaggacttagggtactggtggaagaaacttctaagcagcaaagcattcaagaagtggtgtggctgtttctaacaacctatgatccaatatgggagcaatggaatgacttaaggttgggactcacatttaaaagcagagtccaaatgtttagaaaatgtgcagcctggccctgtggcagagaaagaaaagtattttcaggggaagaatccaagcaggctgcacagcaaccacttgctagagagattagcatgactcaaaagagagccaagtggtaatatccaacacartggggaaaaggcctcaaaggcattttagaagtctttgggacagcccctcccatcacagtcccagaggcttagtaggaaataatggtttagggggccaggcctggggcaccactggtttgtgcagcctcaggacacttcaccacccatccaagcccctctagcaccagctcaaagggccccaagtacagctccagccactgcttcggaaggtacaagccataagccttggcagcttctatgtagttttaagtcagcctaggtgacagggtgagatcc

SEQ ID NO: 884588 - DNA, 607 bp, Homo sapiens
agtgttaacatatttattgaatgtgaagcctggtagggaagagcaagaaaaactttctatcctttttaaaaaacacatgttaacacttactgataaagtttctctgtatggtttaagaagaaaacaacaacaacaacaaaacactacacattggaatcatagtagtgctataaaaccatggggagcgagaagggaaaagaatagctaaaccagtaggcccataggcaatgactgtgggctccctgccaggaagatacaagtctaacaagaaatgaggtgacttgcagtagaaggccttggaacktggaaacaactttatctccactacattgtgctgccaacgggagagtcatttctaaagagcagatttttttttccttctaaattccattatgaagcccctaagtggtgatttttaaatatcaacatcttaagttttcaaaaatgaccatttaattagctttctaagttttctccccaaagtaaaagaaaaggcttaggttattatcttgaatgagaaatgccatggtcaggaaaacaccattcttttcaataataataattcagtgatcaggagagacagaggaggtctaatgatagattttgc

SEQ ID NO: 884589 - DNA, 607 bp, Homo sapiens
agtgttaacatatttattgaatgtgaagcctggtagggaagagcaagaaaaactttctatcctttttaaaaaacacatgttaacacttactgataaagtttctctgtatggtttaagaagaaaacaacaacaacaacaaaacactacacattggaatcatagtagtgctataaaaccatggggagcgagaagggaaaagaatagctaaaccagtaggcccataggcaatgactgtgggctccctgccaggaagatacaagtctaacaagaaatgaggtgacttgcagtagaaggccttggaacttggaaacaactttatctccactacattgtgctgycaacgggagagtcatttctaaagagcagatttttttttccttctaaattccattatgaagcccctaagtggtgatttttaaatatcaacatcttaagttttcaaaaatgaccatttaattagctttctaagttttctccccaaagtaaaagaaaaggcttaggttattatcttgaatgagaaatgccatggtcaggaaaacaccattcttttcaataataataattcagtgatcaggagagacagaggaggtctaatgatagattttgc

SEQ ID NO: 884590 - DNA, 551 bp, Homo sapiens
ttcccgatcattcttccttcctggcagttaaaaagtagggagaatgttagtgcccccaaaaaaggggagtatgcagcattaaaggaccatgtaaggaaggcagaaagagcaacaatcttcaaataacttcctcatccagaaactgctaaaagtttattttggcatttctgaaaaccttggtcaataaataattctactaacagaaaaaaaagggaaaaaaaaggttgtgtaatcaagtttagagctgtgagtctgcagaatatcttagatctcattagtgacagaagaggggttgctaaggctcrgttttatggaaacacctttgttacaaccaaaaacaaaactccctcttcactggcttaacaagttcacagcaggccttcggtactgggacacataattaacacagaaagattcagttgtctcctggtttcagtgttgaggtaagggttccctccattacaatctaaacacataaaacaatatgaaggcccccaaatagtacagtgctgtcactatattaaataatacatattatattcataccccct

SEQ ID NO: 884591 - DNA, 640 bp, Homo sapiens
tataatccacaaagtgctaagaaaatacaaattatatggtttcactttttacattattaaaataaatcatttaaaaaggatttctctgctgcttcctataaataaaggcagcattgccctcctcccccgatctgttcctactgtgggtcatgggaggaaagatggagccagcgaactgacttctcgctcacagtgaaaatcaraagaggtccaatacttctctagcctgaatcagttgactttcatttgtttttattttttcttgtttgccttgatctacattgcaatcagtatgcaaatgtgtgcaacacactctcaggagcaaactcactcaacaaagcatattgggctacatcattgctatagtgataaccttgaatctgctctaatctgtgaaggagcacatcattgggacacttccacgctttgttattgttaacaaattacttatgactcacctcataaatgaccctaacaatacctgtgattgtgactaactgttcccagcctcagcctggtgatcaggaagagaattgttctgttttcctttgcattgattccagttctgggaggcttccagatccttttagttcaatagatttctacttaatttcactatacttaggcactcagatgggct

SEQ ID NO: 884592 - DNA, 493 bp, Homo sapiens
cctgcttgtagtcccagctactcgggtggctgaggtgggaggatcacttgaactcacttgaatggaggctgcagtgagctataattgcgccactgcctccagcctgggcagcagagtgagaccctgtctcttaataataacaataataggctgggtgcagtggctcaygcctgtaatcccagcactttgggaggccaaggcgggcggatcacaaggtcaggagattgagaccatcctggctaacgcggtgaaaccccgtctctactaaaaaaaaaaaaaataataataataataacgataataatttgaaaaaagtcaacctcagaaaaggttgccaagttaactcaagtctccaatataaaaaagcctggggatgcaggggagactatggggtttgctgggcctgctctgatattgaggacacaatgattttgtggctctaaggctatgaagcagcaccatttctcacatgtcagtccatggcttggtcatt

SEQ ID NO: 884593 - DNA, 493 bp, Homo sapiens
cctgcttgtagtcccagctactcgggtggctgaggtgggaggatcacttgaactcacttgaatggaggctgcagtgagctataattgcgccactgcctccagcctgggcagcagagtgagaccctgtctcttaataataacaataataggctgggtgcagtggctcatgcctgtaatcccagcactttgggaggccaaggcgggcggatcacaaggtcaggagattgagaccatcctggctaacrcggtgaaaccccgtctctactaaaaaaaaaaaaaataataataataataacgataataatttgaaaaaagtcaacctcagaaaaggttgccaagttaactcaagtctccaatataaaaaagcctggggatgcaggggagactatggggtttgctgggcctgctctgatattgaggacacaatgattttgtggctctaaggctatgaagcagcaccatttctcacatgtcagtccatggcttggtcatt

SEQ ID NO: 884594 - DNA, 493 bp, Homo sapiens
tgttggtaaactgccaaataacagcttccaacttaaatttcttaaatgtgttatcagaacaaaactatggcacactgacattatacagtttcccacaaatagagaaaaatgtactgtaagacacttaaatgtcaaacagggaatagaattccataccagtaaggtattttacctawttttgtcttcatgattttgccacattcagtaatataattgaaggattaatagtcttgcaagcctaatgatcataatgcaatttccaattcatgttatagctatattagttatttagctacacatgctaatagttgagccaacaccaaagggatctgagccagaactaaaatttaccatgtgccttgtgtagcaatattcccaaactatctactgacaaaaaacaacaagaaacatttgtttgcaacttgtaatgtctttcccacttttggatttaaagtctgtattactaataatagtttatgttggaaacactgcc

SEQ ID NO: 884595 - DNA, 610 bp, Homo sapiens
gtaccttgttctcaagatttaggtaaaaattaaatgagttattatgtgagatacttagcacatagtaactagtaactattcttgctgttgctattattattgtttagtgttaattttattcttatctatggattgttttcagtttccaagaacccagtaaaatatgaattttccattgattccccagaaaattgcatccaggctatgtagaaaaaagtcactgtcagcactggttgaagagcaattctcatcttatatttcaccatgaaaattgtaattttacatgaggtgatytacactgtcctgaagtcagagtagtttctcatactgatttcattcaataattttcctctttaattgctcttcccatttccctgcaaaataaagccccaccatgcttgaatttccaggagcctagaaaaagagatgtaaagctgctgccaatttacctatcacattatattgaatttaactgcagagttagcttggaaatctctggatcctaaaaccatctttaattgcgtttttttttttttttttttttttttttactaaaaatgtttgggagacagggccgagatgatgaactagaagcagttcatgtgcacgg

SEQ ID NO: 884596 - DNA, 610 bp, Homo sapiens
gtaccttgttctcaagatttaggtaaaaattaaatgagttattatgtgagatacttagcacatagtaactagtaactattcttgctgttgctattattattgtttagtgttaattttattcttatctatggattgttttcagtttccaagaacccagtaaaatatgaattttccattgattccccagaaaattgcatccaggctatgtagaaaaaagtcactgtcagcactggttgaagagcaattctcatcttatatttcaccatgaaaattgtaattttacatgaggtgatctacactgtcctgaagtcagagtagtttytcatactgatttcattcaataattttcctctttaattgctcttcccatttccctgcaaaataaagccccaccatgcttgaatttccaggagcctagaaaaagagatgtaaagctgctgccaatttacctatcacattatattgaatttaactgcagagttagcttggaaatctctggatcctaaaaccatctttaattgcgtttttttttttttttttttttttttttactaaaaatgtttgggagacagggccgagatgatgaactagaagcagttcatgtgcacgg

SEQ ID NO: 884597 - DNA, 595 bp, Homo sapiens
aatattatagcagaaagagctaagataacccttgtacaatgcttactatttatcaaggtgtttttaaagcactcttaatacttccaaccctgtgagtttggaactgttgttatcttcattttattgatggataaagtgagggacaaggaggttcagtgatttgccctaagcggtggaatggaacccasatagtctggcttcggagacagtatgcttatctgctaggttacattctgtcaggaacagttactttacagctctagattagtctcatcaccctccagagcttaaatagttaagattctgttagggtgttcttgctctacccagaagtcctcctttgccttcctcaatctaccacttcttctctgatcctataaaatatgtatatctctgccattgcatacatccttatgtgttagaattgtctatttatttgtctgtattattatagactgtgagatgtttgaagacagaaatcatgtcttacttatatttttatcactagggttaacttagcaggagtctgttgctttgtacatacttaatgtttggtgaactaagctgaactgaacacaagtcatatgtaatgaag

SEQ ID NO: 884598 - DNA, 676 bp, Homo sapiens
aaaccagactcaaaacgttactgatatggtttggctctgtgtcaccagccaaatatcaatttgtagctccaataattactacgtgttgtgggagggacccagcgggagatgattgaatcatgggggtgggtctttcctgtgctgttctcgtgacagtgaatgggtctcacgagatctggtggtttttaaaaaagggagcttttctgcacaagctctctttttttgcctgctgccatccacgtaatttgtgacttgttcctccttgccctccaccatgtttgtgaggcctccccagccatgtggaactgtaagtccaattaaacctctttcttttgtaaattgcccactcttgagtatgtctttatcagcagtgtgaaaatggactagcacagtaaattggtaccagcagagtggggtgctactgaaaagatacctraaaatgtggaaacaactttggaactgtgtaacaggcagaggttggaacagtttggaaggctcagaagaagacaggaaaatgtgggaaagtttggaacttcttagagacttgttgaatggctttgacaaaaagcctgatagcaatatggacaataaggttcaggctatggtggtctcagatggagatgaggatcttgttgggaactggagcaaaggtgactcttgttatgttttagcaaag

SEQ ID NO: 884599 - DNA, 602 bp, Homo sapiens
cattatgctggttgcccctagagagtatatgtgtgtggatggagaaaataaaatggaattttggatgaggataaagattacttcaattttacctgtaatatttgatttcctttattttttaaaaaagaatggcaaaatgttaaagtcatagtctgtttagtgttataaaggaatacttaaggctgggtaatttataaagagcagagatttatttggctcattattctgatgtctggaaaagttttagattggccattgtatttggtaggggccacaggctgctttctctcatggcggaaggtaaaaagaagctggcatgtataaatatcacatggcaagagaggatgcaaggggtgaggcgtaccacgctctttttaacaaccagctttcttggaaactaataatcgtgagaattcactcacccctaagaaaggatattattctattcatgaggaatctkcccccatgagccaaactcctgctactatacccaccttccaacactgccacacggagtattaaatttcaacatgagatttacaggggacaaacatccaaagtacagcagttaataatttcctattctgggtagtaggcttttt

SEQ ID NO: 884600 - DNA, 614 bp, Homo sapiens
tttatgatttgttggatggttctggagcagtgctcagtctaatatattccactattgagaagtgacgcttttgtgtagtctatccaatgccccatgaattatgagtctttccagtctggatggtgggaacaggtactattttccgctcttttcttctcatttttaaaatgtttctttcccagtcttggttagcttcctcatgcatatattaatatgtactctgctgaatacttaaggtaggccttctgaaaacttccggggttgtctctctgcacagctctctcctctttggtcatctgtcctrtgaactccagctgcattagattccctggactttgagctgcatctgctcaatccagggagtccactgtcctttgtcttaatcgccactctctatgccatattttggaaaatatcttaatatagtaagttgggataatcatagaactcaccttatttgtttctcatctcttggctatcactgttcttcactgactgattcccagcatcttaaaaactttttttcatgtattttgtctgtttttgtttttgtggtttgttttaggtaagaagataaatcccatccttgttcctccgtcttggttggaaatgga

SEQ ID NO: 884601 - DNA, 614 bp, Homo sapiens
tttatgatttgttggatggttctggagcagtgctcagtctaatatattccactattgagaagtgacgcttttgtgtagtctatccaatgccccatgaattatgagtctttccagtctggatggtgggaacaggtactattttccgctcttttcttctcatttttaaaatgtttctttcccagtcttggttagcttcctcatgcatatattaatatgtactctgctgaatacttaaggtaggccttctgaaaacttccggggttgtctctctgcacagctctctcctctttggtcatctgtcctatgaactccagctgcattagattccctggactttgagctgcatctgctcaatccagggagtccactgtcctttgtcttaatcrccactctctatgccatattttggaaaatatcttaatatagtaagttgggataatcatagaactcaccttatttgtttctcatctcttggctatcactgttcttcactgactgattcccagcatcttaaaaactttttttcatgtattttgtctgtttttgtttttgtggtttgttttaggtaagaagataaatcccatccttgttcctccgtcttggttggaaatgga

SEQ ID NO: 884602 - DNA, 646 bp, Homo sapiens
aaaagtaatttatattaatataataggtttattttttaagtgaattaagaaataaatatcttttgaaaatttccgagtttaaatttctaatatggcaaatatttatagatataaaccacataaaaccaaaagagcattttagagttctcaataatttttaaagtataaagaggtcctgagaccgaaatattgagaaccrcttgtctagatgaaataaattaacttataacattacagatctttcacaaattcctctataacagggatcagcaaactactgaccacaggccaaatacagacttccctttgttttcgtaaataaagtctaattgaaacacaatcacagccattttttatatattgtttatggctgcttcagtgctataatggtagagttgcatcattgagacagactatactgacatagagatgaaaatatttactatctggctccttacagaaaaagtttgccgatccttctctataatatagaatagctgtgtccaattatttaaagtaagatgcatttctcttatttgattcaaatattcctgttaccaatacatcccaaatcaatcctgataatcagcggagaaatagatgacatatctgtattgcacataactgctcagtaaatatttatcaa

SEQ ID NO: 884603 - DNA, 597 bp, Homo sapiens
ggtttattttttaagtgaattaagaaataaatatcttttgaaaatttccgagtttaaatttctaatatggcaaatatttatagatataaaccacataaaaccaaaagagcattttagagttctcaataatttttaaagtataaagaggtcctgagaccgaaatattgagaaccgcttgtctagatgaaataaattaacttataacattacagatctttcacaaattcctctataacagggatcagcaaactactgaccacaggccaaatacagacttccctttgttttcgtaaataaagtctaattgaaacacaatcacagccattttttatatattgtttatggctgcttcagtgctataatggtagagttgcatcattgagacagactatactgacatagagatgaaaatatttactatctggctccttacagaaaaagtttgcygatccttctctataatatagaatagctgtgtccaattatttaaagtaagatgcatttctcttatttgattcaaatattcctgttaccaatacatcccaaatcaatcctgataatcagcggagaaatagatgacatatctgtattgcacat

SEQ ID NO: 884604 - DNA, 630 bp, Homo sapiens
gtatagcaattataaactgtggagtcaattacctcagccaagcttacactaactaatgcatggatatagagatgaatcacagatagcccctctcttaaggaactcagtctagtggagaagctgtggataggaagagatacagggttgtgtagttagcaactgggccttgagggagaggtctgatttttgtcctggctcctaggaagtaatttctaaacccttaggatatcctgattaacaggagtgtctttgttattcatggtgggctcctgggaccacaactcacagcttatgctaaccagatggcttatagtgagtgctggccatgccagaaaaatcaaccacagggttaaaagattggggctttgggctatgtgatgtcagcctgacctttgggtgtggggaggggtatggaggttaagttcaaccatgtgggmaatgattcaatcaatcacctctacataatgaagtcccaataaaaactctggacactgaagcactggttagcttccctggttggccatactttgtcatactgttacttatcaatgctggcaaggtaacagataccgaggacacgggtgtttagcatttggaaccctcccagattccttcctatgtccctttccc

SEQ ID NO: 884605 - DNA, 514 bp, Homo sapiens
ttttgactttaatttttcaactttatgatcctgtgaaagagatacatgttcagtagaaaccgtattttgagtacccgtacaaccattctgtttttcacttcaggacagtattcaataaattacctaagatattcaacacatcattatacaatagrctttgtgttaggtgattttgcccaactgtaagctaatgtaagtgttctgagcgcactcaaggcaggctaggctaagctaggatgtttggtaggttaggcgtattaaatgcattttttttacttttttttttttttttttttttaaagataacttctcactctatcatccaggctggagtgctgtggtatgatcatagctcattgtagcctctaactcctgggcccaagacatcctttcacctcagcttcccgagtagctgggactagaggcatataccaccatgtgtggctaatttttcaaaaatttttttttttgtacaggtggggtcttactattttgcccaggttggtcttgaatt

SEQ ID NO: 884606 - DNA, 514 bp, Homo sapiens
ttttgactttaatttttcaactttatgatcctgtgaaagagatacatgttcagtagaaaccgtattttgagtacccgtacaaccattctgtttttcacttcaggacagtattcaataaattacctaagatattcaacacatcattatacaatagactttgtgttaggtgattttgcccaactgtaagctaatgtaagtgttctgagcgcactcaaggcaggcyaggctaagctaggatgtttggtaggttaggcgtattaaatgcattttttttacttttttttttttttttttttttaaagataacttctcactctatcatccaggctggagtgctgtggtatgatcatagctcattgtagcctctaactcctgggcccaagacatcctttcacctcagcttcccgagtagctgggactagaggcatataccaccatgtgtggctaatttttcaaaaatttttttttttgtacaggtggggtcttactattttgcccaggttggtcttgaatt

SEQ ID NO: 884607 - DNA, 514 bp, Homo sapiens
ttttgactttaatttttcaactttatgatcctgtgaaagagatacatgttcagtagaaaccgtattttgagtacccgtacaaccattctgtttttcacttcaggacagtattcaataaattacctaagatattcaacacatcattatacaatagactttgtgttaggtgattttgcccaactgtaagctaatgtaagtgttctgagcgcactcaaggcaggctaggctaagctmggatgtttggtaggttaggcgtattaaatgcattttttttacttttttttttttttttttttttaaagataacttctcactctatcatccaggctggagtgctgtggtatgatcatagctcattgtagcctctaactcctgggcccaagacatcctttcacctcagcttcccgagtagctgggactagaggcatataccaccatgtgtggctaatttttcaaaaatttttttttttgtacaggtggggtcttactattttgcccaggttggtcttgaatt

SEQ ID NO: 884608 - DNA, 623 bp, Homo sapiens
tggaataataacagattctaccatttagagttgttatgtgcatgtcatgcttgcaaagaacttagcacagagcctggctatagaaggggctcagcagatgtctatggaatgaatgttagaaatgctagacattagttcccatgaacttggaagttggattgattgatgcaatccctggggcctatgtgagrcctctctgcctagctgcaagaaggtctgggaaagtgagaaattggcattcttagcttttcttgtgggaggttgtcccaacctcataaagagaggggttgctgtgggtagcaaaaaagaaaggccaaaggccacttcacttcactgaacttggcccagttggcttcattctccatggatctcaatttttttaatctgcaaaatggaagaaataattgacggtagtggccgctccggatggcctgccattgctatcatgctggctgcagcagggagatgctcccagtgccataggctcagaggagcctgccggagctggggacaaacaggagccctgccccctccaagttggggcaggagctccccaggcacagctgcagccacccaacttgccgctgcagacccaggccttctgctccatgggcagggatatc

SEQ ID NO: 884609 - DNA, 582 bp, Homo sapiens
caaagttccagctcagagcacccaactaagtgaagcaatctgctcatctgaaactctgcacttgcagtccccttgcctggaatgttctccccagagactccccatcgctcccaccttctcccttcctcccacattgccatgagcatctggctgactccttcaggtctcaatctagtgccacctgctcagagaagtcctctccgtccaccctggctaaagtagcctctgagtcagtttaacatcttggtcattttcttcttagccggcatcatgacacatgacttgtttatgttyctattgcctgtctcccctgccagcttgtaagttccatgtgggcgggacaatgaaccagaacatgacaggttcccaataaatgtttattgaatgaataaatggaagaaggagtgaacaaagtaatgaacaaaacagaccccagatcagaggaagagatggctttcttgttaattctggagcagattcaagcagcaaatatttactgaacacttgctatgtgctggaaattgttctaggaactggagttacagcagtaaaaaaaataacatttgtattttcataaattta

SEQ ID NO: 884610 - DNA, 654 bp, Homo sapiens
agggaagtagagacaaggtgtgggggtgggggaggggcacagccatccagagtttgaatgaggttgtggctctttaatgctgcagtccccaacctttttggcatagggaccagttttgtggaagacaatttttccatggactggtggggaagggtggtttggggatgattcaagtatttacatttattgtgtactttatttctattattattactttgtaatatataatgaaataattatacaactcacctccatgtagaatcagtgggagccctgagctggttttcctgcaactagaccagtcccatctgggggtgatgagagacagtgacagatcatcaggcattwgaatttcatgaggagtgtgcaacctagatccctcgcatgtgcagttcacaacaaggttcatgctcctacgagaatctaatgccaccactgatctgacaggaggtggagctcaggtattaacgtgagccgtggggagtggctgtaaatacggatgaagctttacttgctcatccaccactcccctcctgctatgtggcccagttcctaacaggccagggattggtactggtccatggtctggggaatggggacctctgctttaaagcatttctccttgaacaaacagccaagttctccagcagaaac

SEQ ID NO: 884611 - DNA, 648 bp, Homo sapiens
ggaatttctccagtatggcaggttgaccaggggcggcttgggaacatgttgttctccaagaagcttctatagtactaactaaaacagtgtctccaagcctaaaaggtgagaaaactcaagcaatgcatataattttaatttccatcaaagctccccactgctgccaccaaaccatttctccatctccttgttcgagtcccagaccctttgaagttcctgtcatccagttcctacgccacccttcccagtcctcctcatctcctgcctgccccatgcacatccttcatccccaggcttggtctctgctcatccgtccgcttctgtcacaatcatggtgaygccaggatccatggagatgaccatccagagccgtgacctcatttttcctaatgatcatgctctctgcccctcctaagcattgccctttgttatcataaacgacgtcatgacatcagacatgctggtgttaagtatccatctctctgaactcctgcatctgtccaggccattcactctagaaccctcagggctccaatccctcttttcattacccaccgttcccttcctacttttactgcactggctgcccacaagatcccattgtctatccttccagtttcttcttttcaaatacactcacctccttgc

SEQ ID NO: 884612 - DNA, 542 bp, Homo sapiens
gggtctctgtctacagatggctcagggagcaggaaagacggggcatagttggtcaaacaggcagaggtatctactgcactggcctatagggtaactcagggcaaacagcacaacagacttcaaatccctggacccatatctttctttcagagccaggactagtgagaggtgcctgaagtacctggtgcgcaaaatttaagaagtcgcccacgctyaggtgcctgtccacacctgcaccaaccaagagggcaaacctccctaagagcagctggatgactctgagagcaggtgcctccctaaattttgtggcctggatgcatccctcgcctcaccctcaccctggcccacttcttttctatcttgctttccacgggccagcagtatcagcatcccctaggagcttgttagaaatgcagggccttgggtttagctccagacctactgtgtcataatctgcaaagtgacaagacctccaggagatttatagcggcacaattgatatttgagaggtagcagaggcaaggaagggcagaaccccaggc

SEQ ID NO: 884613 - DNA, 542 bp, Homo sapiens
gggtctctgtctacagatggctcagggagcaggaaagacggggcatagttggtcaaacaggcagaggtatctactgcactggcctatagggtaactcagggcaaacagcacaacagacttcaaatccctggacccatatctttctttcagagccaggactagtgagaggtgcctgaagtacctggtgcgcaaaatttaagaagtcgcccacgcttaggtgcctgtccacacctgcaccaaccaagagggcaaacctccctaagagcagctggatgactctgagagcaggtgcctccctaaattttgtggcctggatgcatccctcgcctcaccctcaccctggcccacttcktttctatcttgctttccacgggccagcagtatcagcatcccctaggagcttgttagaaatgcagggccttgggtttagctccagacctactgtgtcataatctgcaaagtgacaagacctccaggagatttatagcggcacaattgatatttgagaggtagcagaggcaaggaagggcagaaccccaggc

SEQ ID NO: 884614 - DNA, 639 bp, Homo sapiens
acaaaccctaggcaaggagggacggtgaggtcaggaatctctcaccactccaacgcagcagctaaatcacctgtggtgcctcccatgtgaggtcctgtcagtctctccacgctcatattctctcactctccaacaccaacacctttggtttctgctctctctagactccctgactctcacctctctgtgtctctgatcatgaggcttcccattcctgtgtggagtcccttttctccatgcttctttggaatctgcctgcactcttcaagaacagcaccacctggccttcctgacactgagttgcctcctctaagctcccacagcacagcacgctgtatagaccctcgtcagcatttggtgcatggcaggtgctgaccataagtggttctcttcacaagacagcaggttccttcagagtgaagccatgtcctgagcatctagaaggactcagcccagcactactctgcaggggctcaaaaartgctttctagatgtccaagtgcaggaagtctgtattttgcttcttgcagctttgacccatgcattcatctgtttcctgctggccagtcaaatgccagatgttacccttccagcagttcttacatccaatgatgtttgtttaaaaatttctgagcatcc

SEQ ID NO: 884615 - DNA, 578 bp, Homo sapiens
gcacgcagtgtttgggtccagagtggaaatctcatatctcagatgtcaaagcatcaggatgctaacggctgccagggaattccggatccaactcagtgcctggagctcctcagccttgcgacagggtagcctccttggtgccgaaggtgccatccatattaatggctcagtgcacacaacttccctgaaaggcagggagggctggggggttgcaaaggctctccttactcatttggtatttttagagaatgtccttgtagaaaagagacttttcatgctcccttttttgggagtgggagaccagttgargagttgattgattttacccagagtcaagatcaaggtggcctgtgggtcgtaagaggtcaagtgtcctcccagaagtgacacataaagcaaggccagcagaagtgggcttcaagcccatgtcttctctgactccacagcccaggctgtgcctgctgacctgctccagctgtgggttgaaagcaaggtctctgacccctccgttgaatcacagtgggctgtgactgtaatggtggaaatgacaccgtgggacttcaaggctaagtcaccct

SEQ ID NO: 884616 - DNA, 636 bp, Homo sapiens
cttagttctataaaagtactcaggtaaacgttggagctgagcctggcttctaccatctacaccctcaataaagagaaacattctctcaagcagtataaatggggctgacattttggagggtgcttgggccctaggtactccacaaggaaagaaagatatatgcacaagaatgttattgtagcttggtttataacaaaaactcagaaattggaaatgactaaatgatcactgacatggtgctggctgaatacattattactcagcccatctcattagatgtgaatggtgtgtgtgtgtgtgtgtgtgtgtgtgtgtgtgcatgcttcctgtgggcaccatgcattattactcagccaatcccattakatattatggtgtgtgtgtgtgtgtgtgtgcatgtgtgcgcgtgtgcacgcttcctgtgggcatgatgcattattactttcagcccatcccattagatactatgcatgtatgtgtgtgtgtgtgtgtgtgtgtgtgtgtgtgtgcatgcttcctgtgggcaccatgaattactacccagcccatcccattagatactgtggcgtgtatgtgtgtgtgcacatgtgcacgtgcatgctatctttaggcaccatgcaggggccaatggagact

SEQ ID NO: 884617 - DNA, 631 bp, Homo sapiens
tctccatgtggctgctcggcctcctcactgcacggtggtggctccatgattgagtatgcaagtgtccaggcagatgctataccacctcttaggattttgccttggaggttccacagcctcacttcctggtagttgtggtcccacccagattcaaagggaggagtgtgagcatcatgccrtgcacagagcagggcgtgggataaaagctggtgcagccagcttaggagaatccaatctgccacagcagctcagaggctttcctgcaggccccatggtacagagttggctgctcctcagctgtgctgttgaaagatgtcagagtagtttagtaagaggagagctgacatgtggttctggacttagctggggagacaagaaatgctggtgtcacataacagttagggcaaattgtcctttgtgcctggggtatgtgtggctgttggggaccaggaggctgcacacccctttctctcaagcctttacacagctcagatgggaggctaagacctcagactctggagaaagaccaggccatttgctagttagtgggtgtaggtccctgaccttagccccagaaaacatctgcagaggctgagcctcttcactaatgctttggacacaatgccattta

SEQ ID NO: 884618 - DNA, 631 bp, Homo sapiens
tctccatgtggctgctcggcctcctcactgcacggtggtggctccatgattgagtatgcaagtgtccaggcagatgctataccacctcttaggattttgccttggaggttccacagcctcacttcctggtagttgtggtcccacccagattcaaagggaggagtgtgagcatcatgccatgcacagagcagggcgtgggataaaagctggtgcagccagcttaggagaatccaatctgccacagcagctcagaggctttcctgcaggccccatggtacagagttggctgctcctcagctgtgctgttgaaagatgtcagagtagtttagtaagaggagagctgacatgtggttctggacttagctggggagacaagaaatgctggtgtcacataacagttagggcaamttgtcctttgtgcctggggtatgtgtggctgttggggaccaggaggctgcacacccctttctctcaagcctttacacagctcagatgggaggctaagacctcagactctggagaaagaccaggccatttgctagttagtgggtgtaggtccctgaccttagccccagaaaacatctgcagaggctgagcctcttcactaatgctttggacacaatgccattta

SEQ ID NO: 884619 - DNA, 601 bp, Homo sapiens
ggagcagtcatcactctgcataatcactgctgtttacttgtccttttgggcagggccatacctgccaggctcacctgctcctgtgcccccaacagctgctctgtatctgtccagtagcagacaccaacaaacactcgccaagccaactgacaaacacagaggcaaggaaagaatacatctggggactgggcctcccaaagtgtgactctaccactgtggatacaacagcttcttcgttattggttaaatcactttgttttgctatttttttcgccatggctgcgggtgagaaaagctttatgtacatttgacaaggtctatcttagctgatgagtcctctttcaatcaattctgtattttcaggtggctcttgaacagaaggaactcttctttatgctgctggccagggcaaatgtgtcctgtacccccaaattggatagatkatgtgaggccatgcttaatacatgctatgggaggagacccttgtgggacctgggtgcctgatagcaagcaaactgcattaaaggaatgcccctaaggaccagctgccatgccagctgtgcagaagcaaaataagggttctttgtgggccagtgctgat

SEQ ID NO: 884620 - DNA, 593 bp, Homo sapiens
ttctgccacgctgtgtgctcgaggaggatacatgcagaccacgaggctaactccagacttgcaggtttctggttaggtctgaccaataggcaccagaagagcactggagagcaagagtagagagaaaccaggtgtttcttcctgaatacttccccgtcccagtaccttgtcctgatggtgactgtgtcatctgcacatgcagctcccactggatgaccttttccacagctcacagctcaccaggctacagtaaacttctctcactttctgttcacgaggccttaaggacagtaacataacctcctgtcgctgctggctgcaggtgcttaaccacacctgattwtcttccataacgctgttccttacctctaaatggtcctttcactaaagtctcttcatttaaaccaactgggcgaactctgtattgttccctaaacctttccagcttcctgctaccatcacacctaactttctatgggaagaagcccactgtgcattaggctgtagccctggggggccactcacgtcaggtcccttgcattaattcctctccatctggcagtgaaagaagtgagaaagaggtgctctcttct

SEQ ID NO: 884621 - DNA, 593 bp, Homo sapiens
ttctgccacgctgtgtgctcgaggaggatacatgcagaccacgaggctaactccagacttgcaggtttctggttaggtctgaccaataggcaccagaagagcactggagagcaagagtagagagaaaccaggtgtttcttcctgaatacttccccgtcccagtaccttgtcctgatggtgactgtgtcatctgcacatgcagctcccactggatgaccttttccacagctcacagctcaccaggctacagtaaacttctctcactttctgttcacgaggccttaaggacagtaacataacctcctgtcgctgctggctgcaggtgcttaaccacacctgattttcttccataacgctgttcctyacctctaaatggtcctttcactaaagtctcttcatttaaaccaactgggcgaactctgtattgttccctaaacctttccagcttcctgctaccatcacacctaactttctatgggaagaagcccactgtgcattaggctgtagccctggggggccactcacgtcaggtcccttgcattaattcctctccatctggcagtgaaagaagtgagaaagaggtgctctcttct

SEQ ID NO: 884622 - DNA, 631 bp, Homo sapiens
ttgaattgttcattattatctgctctatgagattctcttcctcaaatgaatttacatgatttctttctacgttctagccattaataccttgtaatgtatttcacaaggatttttctccctgcctctcatcttttaggattatttctaatatagattttagttctagagaaaacattaattttgatgcaatcaaatttattaattttcctttcataacaattgtgttaagcatacttaaaaaaaaaaaaactttctttagcccmagtgatataaatgttctgtctctttactgatttttatttgtctagagatggggttagatttgtttcatttatttttacttttagatttttaatgcacctggtatttgtttttacaagtcatgttaagtaggactgtagcaaaagagaagccatttatcccaacattattcttataaagtttagtaggtcaagtccacattcattgtatattgtttgaaaattgtttcaaatattcttgtgccttttcttttctatgtgaattctggaattagcttgccaaattgataattactattatgattttcactgggattacaatgaatttgaaactaattttggaagccagttatgctcaccattacaccacc

SEQ ID NO: 884623 - DNA, 631 bp, Homo sapiens
ttgaattgttcattattatctgctctatgagattctcttcctcaaatgaatttacatgatttctttctacgttctagccattaataccttgtaatgtatttcacaaggatttttctccctgcctctcatcttttaggattatttctaatatagattttagttctagagaaaacattaattttgatgcaatcaaatttattaattttcctttcataacaattgtgttaagcatacttaaaaaaaaaaaaactttctttagccccagtgatataaatgttctgtctctttactgatttttatttgtctagagatggggttagatttgtttcatttatttttacttttagatttttaatgcacctggtatttgtttttacaagtcatgttaagtaggactgtagcaaaagagaagccatttatcccaacattattcttataaagtttagtaggtcaagtccacattcattgtatatwgtttgaaaattgtttcaaatattcttgtgccttttcttttctatgtgaattctggaattagcttgccaaattgataattactattatgattttcactgggattacaatgaatttgaaactaattttggaagccagttatgctcaccattacaccacc

SEQ ID NO: 884624 - DNA, 552 bp, Homo sapiens
ggctcctccaacccgcacctgggaggctgtaaccaggtggaggccacagggccaaacatacttcaggtgtgcatcttcgctgattaaattgaaggggctccacttaatttccagaatactgcagttgtttgatggacccactagcctgctccaccgtctggagccagccccagttctgcccattgtgctagtgccacagcaggggacaggctcccaatcgtccagagctggacagcccagagccggggttcaactgaacctttctttctcagcctctgtttcaaccctgaatagggaagagcaacgtctttctctctgactcatctagttatatattcaatgtctgcttwaaatggctccattctgcaggtccaaacatgcatgtctgagctccccaggaagcagttccacatgctgcctccctcatccaaagtgaggtcaactccatccgtcctgttacgccacaaagcttggagtcatcttgatatatttccttctctcacacccaacagctaatccattaggaaagcctatgtgctccaccttcaaaga

SEQ ID NO: 884625 - DNA, 637 bp, Homo sapiens
aactatagtacactatcacaaccaggatcttgacattgatgcaattcagtaatcttacttagatatctctggttttgcttgtactcatttctctctctctgtctctctctctctctatatataaaatatatattacatatatatgtatagatctatatatataacatatatgtatatatacacacacacatatatataattaactacacacagagagagaaatacataatacataaatacatatatacacacacacatacacacacatacatatatacacacacacatacacacacatacatatayacatatgtacaggtgcgcaccaccacacccggctatttttatatatgcatatgtattttatgtatatgtatatgtatatgtatgtaggtatgtgtttctctctctctctgtgtagttatataattacaacccatgtgtagttcatacagtcaccatcacagtcaagacttagttctatcaccacaagatacctcctgtcgctattttataacaacatccaccttcctcctgcacctctcattccctccttaaccccgacaactaccagtctgttctacattcataaaattttgtcttttcaaaaatgttatatagatagtatataaccttt

SEQ ID NO: 884626 - DNA, 637 bp, Homo sapiens
caaaatcttttcatcaaaaaaatcccttggtttataatattccataaatcttcctgtatagaaagagataaaaatataaggttataacaagtaggataagttgacagatatactttttcaagtatcatccatatgtggatgatagcacagaagctactttaaaactaaattgtatttaatcttattaaaattaaataagaaaagaagctaaaatgtgcctgcagtaatctctcaacttcagaaaacggttttttttcatatagagagataagtttgaaacatattcccttaaaggtaagaaaaaagcatgatgagatcagaggtggggttttctatctatctgcggcaactttaataatatacattgaccrcttgctgaggaaatcattatacttaaacctccttacaactcccttctttctaccttcagattttagtaagttatccaatgatactgacattgtcaaggtttatatttatgttctgatttaaaactgccaaacaccagtggtttagtcttagatttattttaaaataaatatgattatcattatcacatttgaccacagcttcatcgttcatgagatttatgttttaaatttatctcttagttgtataaatttgataatgaagtaga

SEQ ID NO: 884627 - DNA, 642 bp, Homo sapiens
gcaatgtaaaactagatcagcccaacaagctgaatgccaggtctctgagatgccatttcttcctgccctacatctatgcttagatacctgcagaggtgtctctggtaggtggtccttcccagttcacctgaacacctccagtaacagagattcactatccttgggaagcctggataattttttatcttctctaaaagctgaaattctgtctccctctggcatccacctcttgttcttagctcagaggtgtgggcccattcagagcaagccagattcctcctccacaagcaatcttgaaactacttaaagacatctttcttgcttcttgtgggtttttgcttctttaaatactaagtatgcttttttatgtcattaatctcttcgtgagcacccctgaggagctaagagtgagagaaaatggtatgaaacaaaaarctttttgtgcaaagaaatctccagatttctagatgtaatagaaggtgaaaaggcaagatgtgaaattatgtattcactagaattataattatgtaaaataaacctatgaaataggcttcaaggaaatatccccaatagaaatatttaactgaaagtgtgatttgctgcctgattttcgaaactttttataccattgttaaattactt

SEQ ID NO: 884628 - DNA, 623 bp, Homo sapiens
aatgagagaaccaataacatactaccactggttcaaaagagaattacaagaacttaatgtatataagtagtaaggaatgctgaaaagaattttcagatggatgcagaattgatctgtctatagggaatagctaattacattccacagaacataaatcatttgcacttctatggacaaaaatcatttgttttattatcagttttctacaacttacagagttataaactacctcaaagtcaataaaaggcaggcaattccagaagcaggctctgaaaggacaccgggaatctgcatttctcctatttcaaagtatgacatgattttmtcaagtaacactcagtaaatatttgatcaatgaataaatagtgaaccagaaacaaaggaagagcatatttcaagaagaaaagtgtgatcaactgtgtcaaatgctgctaagagggcaggaacgatgagaattaagaactgatcaccgatttggtaacatggaggcttcagtggaattcggggaggcaaaagctcaattagagtgggctcaagtgccattggaaactgaggaagcagagagaactaggccgttgtttgggagtagctttaccagaaaagggaacagagaaatgagggtt

SEQ ID NO: 884629 - DNA, 615 bp, Homo sapiens
ccgttcacctgatggaattccttttgtatgtgatctttcccttctgtctagcagcctttaatattttttttttcatgttggccttggagaatctgatgacgatatgtcttggggatagacattttgtatagtatctcgcaggggttctctgaattttccaaatttgcatatcaatctccctagtaagattgggaaaattttcatggataatatcctcaaatatgattttcaaaatgcttgccctcttttcctctctttctgggatgccatgcattgtatgtttgatctctttgcataatctcatatttcttggagcttttttctatgttttacattcttttttctttatgtttgtttgatggagttttttttttcttttttttaraactggtcttctagctcagagacttttatcctcagcttggtctattttgctgttaatacctctaattgtgttataaaattcttgtaatgaattttttaagctctagaggatgttttgttctttcttaaaatggctattttgccctttcagctcttgtattgttttactggattccttagattccttggattggtttcaactttcccctgaatctcaatgattcttgttgc

SEQ ID NO: 884630 - DNA, 484 bp, Homo sapiens
tccaattttaacctgtctgcattccataaggctttgtttatgaaactgacactgtcccagagggccccacggcccttcagtgtcccttgcgtaaattccatttcatcactgtgttattattaatttgaggcttctcattgttgattacttatgcatttgccctcatcttggaacccctgtaggtggggagctgtggacagtccgcctggtgtcctttgtgcttcttgtaacctgtactcctgcatgagcagagcatgctccataacgagctgatcggatgggagcagctggccacacgtccattttcaccttccatcagtctgcgcatccatattgyctcttttttattttctctccttgattatgttttttctgagctgtgtagtgtagcacttcgagattgacaagtatgccatcaagaaagcaggcagagagggagaatgtcttaaatttttaattttgaaatgctctgcaccaccagaaa

SEQ ID NO: 884631 - DNA, 626 bp, Homo sapiens
atgatgctgtgggggataagggtgagcttcacaggtcactggaggtgtgttcctaggaggtttatggctgcctctattgtgtcatgcaggttgttagggaattgggtgaaagctgacagtcatgggcctcactcatctcccatgcaacccaaagggccactctcactcccaccctgcctccaccaatagcaccaagtctgtttccaggcagtgagcaagcagggctgagaacatgccccaggctaccagcctctcagctgcaaaagtaagtagggctttcattcttcccctgcttgtggagtctgcccatcagagtcatgccttcccctgagttctggccaggagacttcttgatcgattcmagttgttacgaagttcagccggaggttttcttctccatgtgacctttgcccagtgcctctggccaccctccctaaggaccccttcgaggcagggcagaaatggtttgtgctgggggatccagtgagccctcagggcttttcctgtttcttcctctacccctgtatttacttggctctctaaattgactcagctccgggtaaggtcagaatcttctcccataatctagaccttcaggttccccagttggggtggtggatgatctc

SEQ ID NO: 884632 - DNA, 616 bp, Homo sapiens
atagatctttctcctttgcataaaatagttttttttcctctgaagaaaatagtatttaaataaacattattggcaaattttaatattcatctttttggaatataacaacataagctgtatatcagtaaggaattttagtgaactattgttacaacatggttttaacctagtcaggcattagattgtatttcataatgaaaacagctataaaaacaaatgtcaattggaagagtggcccattttacaaagcctgcctctaacatgaataaatcttgccttcatgtcacaagstattattgcagtcccctttatctgaaacaatcaaatcattcacaatgaaatatagtgagtggtgtcagagaatcaaagaatttacagacgagaaaacaagcaaaacaccggacccaacccctcttaaactacagatggaggggagcacatgagctattcttttcattcactcaaccctctctcctctcattctagctcagtaaaatcaatctcttttcctcatctgggctcattctctcctcttagacagctaggcccaatcaagcaaccggatgatttgaaagtgtttaaatgctagaaaacaatgtttaaagccatctatata

SEQ ID NO: 884633 - DNA, 657 bp, Homo sapiens
aaattaaatgaaagtaagtaattactttaggaataagattttgatttcagtatcttatttttctgaaacattttatattaattgctttgtatgtgttttcaatgtttttattactctttagactcacaacgacccagaaagcattctcaaagatgatgaatgtactcaaacagaacttcaattaattgctgaagcattttgcagtgccctagaatctgttgttggctctttagaacatgatggaggtgaaattctcactgacatgaagtatggacacctttggtcagttcaggcagattctccctgtgttgctaactggccagatttgctttcacagtgtggctgtggattatacaatagccaggaagaactcaactggtctttcttaagaagcacaygtcgtccatttgtgccacaaagctgccttccacatgaagctgtgggctcagccagcaacctgaccttggactgtttgactgcaaagcttagtggcctacaggtggctgtagagacagccaatttgattttggatctttcatatgttattgaagataaaaactaagagaatagcatgttcgtattacaagagaaacaaataaactagtctgttggcaattgagaaaaattgtgagtgtatttgttttctcccaaagccct

SEQ ID NO: 884634 - DNA, 657 bp, Homo sapiens
aaattaaatgaaagtaagtaattactttaggaataagattttgatttcagtatcttatttttctgaaacattttatattaattgctttgtatgtgttttcaatgtttttattactctttagactcacaacgacccagaaagcattctcaaagatgatgaatgtactcaaacagaacttcaattaattgctgaagcattttgcagtgccctagaatctgttgttggctctttagaacatgatggaggtgaaattctcactgacatgaagtatggacacctttggtcagttcaggcagattctccctgtgttgctaactggccagatttgctttcacagtgtggctgtggattatacaatagccaggaagaactcaactggtctttcttaagaagcacacgtcgtccatttgtgccacaaagctgccttccacatgaagctgtggkctcagccagcaacctgaccttggactgtttgactgcaaagcttagtggcctacaggtggctgtagagacagccaatttgattttggatctttcatatgttattgaagataaaaactaagagaatagcatgttcgtattacaagagaaacaaataaactagtctgttggcaattgagaaaaattgtgagtgtatttgttttctcccaaagccct

SEQ ID NO: 884635 - DNA, 634 bp, Homo sapiens
ggggaccacttgtggctgatgtatgaagtgaagttgatattgtggaggactaacccactaacctgtggggtctatactgttaaaaagaaaagccttagacaaattaaatttaacagagtttaatggagcaaagaacaattcatgaagcaggcagccttccaagccagagtagcctccaagagacttcagtgtagcyatgtggaagaagaagatttatggacagagaaaagaaagtgaggtacggaaaacagaagtgaggtagagaaatagccacgttggttgcagcttggtatttgccttatttgaacatggtttgaacagttggtcacctttgattggccaaaacttggtgattggcacaaaagtaggttagtctgtttacacatccagttaggtttcagtttattatgtacagagaaacctttaggatgaacttaaaatatctaaggaggccgctttaggctaaacctcatttaactgtgctcactcttggttagtagcattaaaattgaattgcaggacacacagttggtgtcatagaattggtgtgataacactcattcatgtgaccttcttcagttatcaagttttctttttattattctcacttgtcttaaaacggaattttatatat

SEQ ID NO: 884636 - DNA, 634 bp, Homo sapiens
ggggaccacttgtggctgatgtatgaagtgaagttgatattgtggaggactaacccactaacctgtggggtctatactgttaaaaagaaaagccttagacaaattaaatttaacagagtttaatggagcaaagaacaattcatgaagcaggcagccttccaagccagagtagcctccaagagacttcagtgtagccatgtggaagaagaagatttatggacagagaaaagaaagtgaggtacggaaaacagaagtgaggtagagaaatagccacgttggttgcagcttggtatttgccttatttgaacatggtttgaacagttggtcacctttgattggccaaaacttggtgattggcacaaaagtaggttagtctgtttacacatccagttaggtttcagtttattatgtacagagaaacctttaggatgaacttaaaatatctaaggaggccgctttaggctaaacctcatttaactgtgctcactcttggttagtagcattaaaattgaattgcaggacacacagttggtgtcatagaattggtgtgakaacactcattcatgtgaccttcttcagttatcaagttttctttttattattctcacttgtcttaaaacggaattttatatat

SEQ ID NO: 884637 - DNA, 571 bp, Homo sapiens
agaggcattctctctttgtaactttattttgtagagacagggtcttgccccattgcccgggctggagtgcagtggcaccatcacagctcagtgcaacctggaactcctgggctcacgtaatcctcctgcttcagccttctgagtagctggggctacaggtgcatgccaccacacctggccaagacattctcttttactagatttctattagctgctgatcttgcytgacttaactacttgaaagctttaaattattgattttgtaggtaaaatcctcagctttcacaatcactaattatagtagcactttaaactcctacaataatgaatatatatttatactccaacttactgatagcattttaacatataaaggttacaaggagatttttcacaccaggttatatctaaatgatctagatgcttacctctattcaaaaatgaatattcagatattaatgatagatctgaaatatgtacaataattatatataaataaaaataaaaataaataatactcctgaaagaatggcatgcttgttttatttaattttttcttgaaaacactgaa

SEQ ID NO: 884638 - DNA, 608 bp, Homo sapiens
tgtttctgcagcagaggaacagggcgggtggtcaggcaggcctggtggatgctgaggttgggtcctatagaagatgtgattgatgtcttcccctcagatacccgtggtcccccccatccccgcatccacttgctgctgtggacagttccctttatctcttgcttaagagtctcttttttcccatgccttggggcwttccctggtcccagaggaacttgctcagcctccaacaggccccactttgaagtgtgtgtcggggaataatgccctgggcatgaccatcaacctgcccttagttggcttttctctctcacttttgctttctgggctcacctcccagtcaagagacctccttccaaggcctcgtcttagggactccatttgggaggatctcaagctaacaccagccttgtctgagatgaggagagagagggtcttgagtcggccccttccttgattccatctcattgtgttacttctgagagtccagatgccatgtgttctgcctctgaccccgggaacaatctcaatgcctgagacagcagagtatttttgtatccaagcttttcatcaccatcagtagaacaaaaatcctgcgtatttggttt

SEQ ID NO: 884639 - DNA, 608 bp, Homo sapiens
tgtttctgcagcagaggaacagggcgggtggtcaggcaggcctggtggatgctgaggttgggtcctatagaagatgtgattgatgtcttcccctcagatacccgtggtcccccccatccccgcatccacttgctgctgtggacagttccctttatctcttgcttaagagtctcttttttcccatgccttggggctttccctggtcccagaggaacttgctcagcctccaacaggccccactttgaagtgtgtgtcggggaataatgccctgggcatgaccatcaacctgcccttagytggcttttctctctcacttttgctttctgggctcacctcccagtcaagagacctccttccaaggcctcgtcttagggactccatttgggaggatctcaagctaacaccagccttgtctgagatgaggagagagagggtcttgagtcggccccttccttgattccatctcattgtgttacttctgagagtccagatgccatgtgttctgcctctgaccccgggaacaatctcaatgcctgagacagcagagtatttttgtatccaagcttttcatcaccatcagtagaacaaaaatcctgcgtatttggttt

SEQ ID NO: 884640 - DNA, 692 bp, Homo sapiens
cctctgggcttggtgatgcaagagccatagttgtttagtaatgtctgtcatgaataagagagagagaaatggcagtaggaatattacatatttggtatccatggtttaatgactgaacacacttaaattttcaatgctttcttccacttcttcaaccagcttccttccacagggaactgtaccttctggtcagatctcatgattcttgatcttattcagaagttgtggccatttctattttccctggaaaactttatcctaagtcacaattctcttctttctcactttcctctttcctataaatgagcatctacatctctttttctttttgatcgttgtagcttattgactcatcttttcactagaatcttggctgactggcttccacagaccttcctttgctgcgacatgttcagaaacttagaggtattgctagcatgactatacttccttttcmtcctgtcctaggcagcggctatctctcccaataaaatatttaaattgtctttagtcaattactggttaactttaactcaacaatgtttattaatcatttatgttgttctatttgcattccatcttactttgtccatcttttcttgtgttctgttgttttaaaatatcctcctggggagatttttgatttggtcatgatgggactggatttcccttcttgctttaaataattaaac

SEQ ID NO: 884641 - DNA, 623 bp, Homo sapiens
tgagtaaatgaaccagggattcaaatcccttccatggctcccgatttccctcagcatgaaatccaaacttcttacttttataaggccttgcatgatcgggctgcttcctctctctccagccttattccaagctcctcttcccttccttcactacactccagcctccatggcatcctttcagcgtcagccacatcaagctcttattgccttgaaaacttggcacatcttttctgtgtgcctagaatccytttcccccagtttccacagctggctcctttccatcctgcaaatctgttcttattatcttctccaacattccagctaaatgatccacatcacagtgctgtgttcatcctcattccatctttcttattttgtaattacatatctatttggctgtttcccatatattacctatctttcccactagactataagcaccatgagggcaataattgtgtctgtttctatcactccttgtacctagcaatacctccattaatgtttgtcaaagaattatgtgtatagttgaaaggtcagtgtggtttcaaaggttgatgaacaagcatatgcattgtggagggaaaattatttcttcatcaattcattcattcacacaaaaa

SEQ ID NO: 884642 - DNA, 674 bp, Homo sapiens
ggttgtagctgtgtgtggtttctgcagccctctggccttatggatttctactgatctttaagaaggactgagtctctcactcacatatggcagtagtcccagaaggggtgaggttcacagttcctagagccagtgttcctgagttcaaatccagtgtttgctttttactgctgggtgaccttaggcaggtcactctcctgagcctttgtttgcctacctgtaaaatggggctgttgtgaggtttgcctgagctagtataggcactgagaactcatagttagtgagtgctggcaacaggtttcttacaatccttgcttctcttagtcacctctagctcctgtttcctgatttttctgatttctcacctttattcctcttccctttgtcctggccaatccctgatgtccccaaagcagagggtgatcaaatgtccagatatgccagggatggtcatggcttatgcatgttgtcccattgtattatctcccctctcactttctgaagtgttccagttaggtgaccctatcaaagcccycctcatgaagggcagttgtgtttgcaacagttcttaaaaaaaggtttattgaaattaatgaacttagaacaaattgcacatatttgaagtgtatactttgaaaaattttgacagatattcgcttgtgaaactgtcacca

SEQ ID NO: 884643 - DNA, 591 bp, Homo sapiens
tcttctgaggtgggtttacatctcttcttcccaggaagtctgtggtggtgttatccttcctgaagtggtttcagtgatacctcatgctgaaacttggccaatgtctctttgggcattttttttaaagatcagatctgttttggtagagaaccaacatagatttgaacaaaaaagagagaaaaagaatttgattaattgaaaacaaattkctgttcagagatgaattcacagaagaggtaaggtttgagggaggctgagaagtggttatgggtagttgagcaaaggtggtgggtaaggaaacaaatagcagagacagggggtaggagaaggatctctactttctgggaattcaacatcatttgtgtggagattgggaagaggatatgggggacaggcaaatggaggaaggggagaggatgcaggggctggtaagggagttgtgggtgcaggactcagcctaaattgtaccatgtaggccagaggctctcctgttggggaacttccaatccttcagggttgggctgtcaaatgctggcacacctgagttctacttaggattattttgattgtaagggtcagaaaatccatttc

SEQ ID NO: 884644 - DNA, 591 bp, Homo sapiens
tcttctgaggtgggtttacatctcttcttcccaggaagtctgtggtggtgttatccttcctgaagtggtttcagtgatacctcatgctgaaacttggccaatgtctctttgggcattttttttaaagatcagatctgttttggtagagaaccaacatagatttgaacaaaaaagagagaaaaagaatttgattaattgaaaacaaatttctgttcagagatgaattcacagargaggtaaggtttgagggaggctgagaagtggttatgggtagttgagcaaaggtggtgggtaaggaaacaaatagcagagacagggggtaggagaaggatctctactttctgggaattcaacatcatttgtgtggagattgggaagaggatatgggggacaggcaaatggaggaaggggagaggatgcaggggctggtaagggagttgtgggtgcaggactcagcctaaattgtaccatgtaggccagaggctctcctgttggggaacttccaatccttcagggttgggctgtcaaatgctggcacacctgagttctacttaggattattttgattgtaagggtcagaaaatccatttc

SEQ ID NO: 884645 - DNA, 593 bp, Homo sapiens
ctgtgctttggaaacattaaggagatggtggtaatggaataaaaaaaaagggagtcaggtccctgttgtccccacttctggcccatttttgagtagggcaatactcaagggtgccttgcatttatattcctaccatgttctggggactcaccatgtgcctttttgaaacactgtctgttgacttcttagcatagctgagaggcagatactattatctgcaatttacaaataaaaaaaatgaaagttcagggaagggaagtgacttgtccaaggtgtgctgggcctcgagcgggttgtcactgaagctgctgatctgtattgggaaatgtatttggggacttggtggtgccaagcatgcaattgcyctgtggcatggtgtcttagggagcaaaggggtccgaatacccagtggtgatagggcctggctggcaggtggatttcttaaccctttgcacctgcacctccactgggggcaaagttttaagcactgtgcatcttatttagtcacctcctagtccctaacaaagatgctctgtgagtcccctcatcagctctcaggaatctgctccatggctcctggccctgctggggag

SEQ ID NO: 884646 - DNA, 643 bp, Homo sapiens
gccaagcatgcaattgccctgtggcatggtgtcttagggagcaaaggggtccgaatacccagtggtgatagggcctggctggcaggtggatttcttaaccctttgcacctgcacctccactgggggcaaagttttaagcactgtgcatcttatttagtcacctcctagtccctaacaaagatgctctgtgagtcccctcatcagctctcaggaatctgctccatggctcctggccctgctggggagggggaccatagayctgctccccagtctagagaagccagttctgctgactgggcagatggggcccacgcactgggacctggggagattgagaggagaaagtggctgagcacagctctgcgaggcctggtgatttatgaggagcagcttccgtgggccatctggaccaggaacttcaggaagcacatcctgtgtggaggcgcaggcagcgtgggagccctgccagggaggaggagggctgcaagggagtgggaggagggaggggatgggaggcaggagtggggcagaggcaacgtggaaagagcccaggcagtgaaatcagacagatccagatgcttccacttgcagaaactttgggcaggaccttaatccctcagggcctcagtgtgattaactttga

SEQ ID NO: 884647 - DNA, 643 bp, Homo sapiens
gccaagcatgcaattgccctgtggcatggtgtcttagggagcaaaggggtccgaatacccagtggtgatagggcctggctggcaggtggatttcttaaccctttgcacctgcacctccactgggggcaaagttttaagcactgtgcatcttatttagtcacctcctagtccctaacaaagatgctctgtgagtcccctcatcagctctcaggaatctgctccatggctcctggccctgctggggagggggaccatagatctgctccccagtctagagaagccagttctgctgactggrcagatggggcccacgcactgggacctggggagattgagaggagaaagtggctgagcacagctctgcgaggcctggtgatttatgaggagcagcttccgtgggccatctggaccaggaacttcaggaagcacatcctgtgtggaggcgcaggcagcgtgggagccctgccagggaggaggagggctgcaagggagtgggaggagggaggggatgggaggcaggagtggggcagaggcaacgtggaaagagcccaggcagtgaaatcagacagatccagatgcttccacttgcagaaactttgggcaggaccttaatccctcagggcctcagtgtgattaactttga

SEQ ID NO: 884648 - DNA, 570 bp, Homo sapiens
ttcagtgactgtcattttaatttttttctccagttccctagtttctatgagaatttggtcttgctaataagattttctccaattatgaaatttgtcaacaacatagattcttgaaaagtaattataatcctttacttaaaatttttattgtttcctttaaaatgtcttctgcatagtaaaattcaaaatcaaatatctgtcaaagaggtgagtgtgccttattacctcaaagaygttaaattgcttttgcaaattactttctcattctcttttctagtctcatcttaattctccatggttttaatagcaggtgctcttgctggcttcatttggtttattgctttgtctaaaaatagttttcatagcttaaataggcttgcaaatttgattctttctaataatttcacttataagcagtcacattttctctctgaaaaataatttaatatttatattgccagttgggctaggtttggtttttaagttgtgcatttgtttccatttgaaactactattgttaataatcaacattggctgaggcaagatgtagtagacgccacccttaccaat

SEQ ID NO: 884649 - DNA, 642 bp, Homo sapiens
cacagtctacatgaacttcttcactgtcacatttcaattaatgtccatacgtagtacttgataaatatctgtctccaacccatccctttttctttgacactccaaattcacatctctgaagctatgtcttcgaatgtaattgtcacaaaccaaattcatactctactactccatttctgctcttcctcctttctttcttatctatgattcttatggtaacagtgcaaaggctgggagaggaaaaatagaaatgtattaatgtaaagttgtcatactactcttgaagtgatataataccactttctgttagactccaataygttgaaggtttatgctataagcactaaggtaaccaaaagatgctgcagactattatagcatctcttcaaacagacttcacagaaacttgcaagcagcctgtgtctatgacatcagttggcatgagcaacaggtttttgattttggagaactatgtttacctgacactgcaacaaaacaaaagcagctatacatgataggaatgaatacaaatattaacaactgataccattgaatttttggagggtgaggagcccctcaagacaaatagagactttcaattttaaaagagcagatattgtgtttgttcccctgacttatttc

SEQ ID NO: 884650 - DNA, 604 bp, Homo sapiens
ctttattaatttggcaatgactgggtcaaatctaaaatgaagaaaaaaatgctgtaaagttagacagctatcataaaggagataataagtaattgttttatttgttgtctttaaacatgtaaaggcttctgggaagaatccttaaatattaatttttagtaatggaaattctggaaattaaaatatatcaaacatcaaatgttattaaaaattttaaatcaacaaaagtctgcatttgtaagtcaaatttctacctaagattacaaaggctttggttatagatccccttaaaaggatttggatgattctaagaagaaaacaaaattacttagatgtaatcctagcttttggctctgtcaatgcagaagacatttcatcatgtgattacacagcaatagggtgtttttatagtacctattcttatagaaaatgttctttgargttctgtgcacactggtaaagacaggatagttgccatatttcagcacctaaccagaacaaaagatgtgcattcattttacattcacaagtcttattaatttttacaaatttgcatgacttattttaaatttgtactgcgtgagttggagaaattctcaatgat

SEQ ID NO: 884651 - DNA, 652 bp, Homo sapiens
ctattaaaaaatgtttctgatttttgagtgtttgcctcccaaaaaacactttagaagttttttcagaaacacaacttaatgggttaatcctgctaccaaaacagactctcttgggattcacaggctgagaatccaaacttttaccaaacatgatttcttataaagaygtcttatagcttactgagagaaaccatttggggaacactgcaaaaatacagtgtagtagaatctggggagcaactttgttcagaattttgggctatggtatttcaggaatttaaaaaaaaacaaagcattagaataaaagtctaaatggactccctctttggccagggcactctaaaatgtaacctgaaagactggttcaggccatgatgagaagtggggttcagacatgcctcatcatacccttccagcagtaacatcaatgcctaccttaagtctgataagaaacatttacaattctctctaaagcctgctacttggaggcttcatctttaggataaaaccttggtgtcttcaacccctaatcatagcaaagacatctctttctactgataataactctttcaaccaattgccaatcagaatatatttatatctacctatgacctggaagccccctgcttcaagttgtcctgtcctttcagat

SEQ ID NO: 884652 - DNA, 436 bp, Homo sapiens
gatgaatgaataagggaaatgtcaattaatttttcacaaaaaggaagcagattccataattcacaaacagatcagctattctcagatggtgaacctagaaaaagtcaagaatggatttttaagctaatggttcatgactgttaacaaaggaatgtggtggttactgggagtgaacataggttcacagggaatgtcatgttatgctagcttaatttattttattgtttttgaaatagagctacttcataagatcagaggattgactaggatracttaattttcataatatcataaaaattgcaaccactgttgaacgtttactctatgctaggctctgctttatttacccctcacaatagttccagtaggtaagtactttgtttatctccctttttaaagataagaaacagagaatcagtaagatcaagtaatttac

SEQ ID NO: 884653 - DNA, 626 bp, Homo sapiens
gaaaagaattaaataaaaatcatcataaaacaccaaatatttagtttttatatatgaatcttttagtaagtaaaacaaactttgtatggtcatacttgaattttgtttctgaagaaatgcgggagtgatccttacaagatataatccaacaactaggaccaacataagagagacaaaacagttaagttctcaatatgggaattgaattagagctaaaactaaaaasagctgtcatctgagaacacattaagatgattctctgagagaaatattcactttgactccattcacaaaacgagggccaaaaaatacacatgtgttgtgcttggtagagtgacaggtaactaagactgtgtttacatgaagagtttgggatgactattcagctgctgaaaagcaacagctgctctggccctgggtactccatgtaggctaagctcctggtggtgagaaatgtagcttccaaccaatctagggcagaagctttctagggaacccaaatcctgccttaggagagcacacacactcttttccttgagaagtgaaaaagttagtggaaacttagagaaagtgtgatccataagccagtgagctagctaagttgtgagttcaaattctaaaggaaa

SEQ ID NO: 884654 - DNA, 588 bp, Homo sapiens
ttattatctttttaagttctgggttatatgtgcaggatgtgcaggtttgttacataggtaaacatgtgccacggtggtttgctgcacctatcaacccatcacctaggtattaagcccagcatgcattagctattttttatgatgctcttccactcccaacctccctcccctactaacaggccccagtgtgtgttgttcctctccctgtgtccatgtgttctgattgttcagctcccacttataagtgagaacgtgtgatgtttggttttctgttcctgcattagattgctgaggataatgacttccagctgtatccatatccctggcaaaggacatgacctcgttsttttttatggctgcataatattccatggttctttttgcagtctatcactgatgggcatttgagttcattccatgtcttttctattgtgaatagtgctgcaatgaacatacgtgtgcttgtatctttgtaacagaatgatttatattcctttggatacataccgagtaaagggcagatttttttaaaaccaaaacatagtatagttaaataggcttataaatgtttctgcagctatttttaag

SEQ ID NO: 884655 - DNA, 621 bp, Homo sapiens
gggcttttttatcagcactttgaatatgacatgccactctctcctggcctttgaggtttgcactgaaaagtctgctaccaggtgtgttgaagctccattgtatgttatttgtttcttttatcttgctgcttttaggatgctttctttatcttgacctttgggagtttgattattaaatgtcttgaggtattcttctttgggttaaatctgcttgctgtttgtattagtccattctcacattgctrtaaagaactactggagtctgggtaatttgtgagaaaaagatgtttaattgacttatagttctgcaggctatacagaaagtatggcttgaaggcctcaggagacataatcatggtggaaagtgagagggaagcaatcacatcttactatggcagagctggagagagagagagagagtgaagagggaagtgccacacacttttaaactatcagatctcatgataactcactgactataataagaacagcaaaggggaaatccacccccatgatccaatctcctcccaccaggtccctcccacaacattgggaattacaattcaacatgagatttgggtggagacacagagacaaactatatcactgttctataacctt

SEQ ID NO: 884656 - DNA, 621 bp, Homo sapiens
gggcttttttatcagcactttgaatatgacatgccactctctcctggcctttgaggtttgcactgaaaagtctgctaccaggtgtgttgaagctccattgtatgttatttgtttcttttatcttgctgcttttaggatgctttctttatcttgacctttgggagtttgattattaaatgtcttgaggtattcttctttgggttaaatctgcttgctgtttgtattagtccattctcacattgctgtaaagaactactggagwctgggtaatttgtgagaaaaagatgtttaattgacttatagttctgcaggctatacagaaagtatggcttgaaggcctcaggagacataatcatggtggaaagtgagagggaagcaatcacatcttactatggcagagctggagagagagagagagagtgaagagggaagtgccacacacttttaaactatcagatctcatgataactcactgactataataagaacagcaaaggggaaatccacccccatgatccaatctcctcccaccaggtccctcccacaacattgggaattacaattcaacatgagatttgggtggagacacagagacaaactatatcactgttctataacctt

SEQ ID NO: 884657 - DNA, 621 bp, Homo sapiens
gggcttttttatcagcactttgaatatgacatgccactctctcctggcctttgaggtttgcactgaaaagtctgctaccaggtgtgttgaagctccattgtatgttatttgtttcttttatcttgctgcttttaggatgctttctttatcttgacctttgggagtttgattattaaatgtcttgaggtattcttctttgggttaaatctgcttgctgtttgtattagtccattctcacattgctgtaaagaactactggagtctgggtaatttgtgagaaaaagatgtttaattgacttatagttctgcaggctatacagaaagtatggcttgaaggcctcaggagacataatcatggtggaaagtgagagggaagcaatcacatcttactatggcagagctggagagagagagagagagtgaagagggaagtgccacacacttytaaactatcagatctcatgataactcactgactataataagaacagcaaaggggaaatccacccccatgatccaatctcctcccaccaggtccctcccacaacattgggaattacaattcaacatgagatttgggtggagacacagagacaaactatatcactgttctataacctt

SEQ ID NO: 884658 - DNA, 629 bp, Homo sapiens
ctacaccaactcatccagcatcaaggcacaatgatgcaagacataaaagtcatgattcagaaatgtcctgtggcatctggcaccggaaatgtgtgggtaataaagaagaaacaaaattattcagtttacttgtgaccatatgaatatcttagatgaattcatgcataattgaatctaataaaatggcaatgtgtttttaaattgttccaatattttaaatgtattatcttaataacatccattagatgttaataaagtacattgtgtgttattatttgtagctracattttcactataccagacatagttctaatcactttgcgtttgcttgactctcaaattaaactgaggagataatattattatcccattttacaaacagagaaacagagtgacttagcttgcctgaaatcacacatttttctaatacaaaatggaactaaatttgaacacaactttcttactagtattcgtttactggtaatatttgtttttctttttctttctgccctttgctaccatagcacttctcacctcctgaaataacaaacaggggtaataaatataagcgataaaatcagtagagagtcttctaacattcaaaaggaagcttttttttaattagatc

SEQ ID NO: 884659 - DNA, 671 bp, Homo sapiens
ggccaatttatccagttggaagatctttccccagtagagccttcagatgagaccctagccctggccaaaaccttgaatgcatcataaaaaaccctgaagcagaagatccagtgaagtcatacccagactcttgacctaaccaaagtgtaatgtaataaatgtatgttgttttaagccactacatttgcactaatatattatatagcaatggataactagtatggaaggggtgaagatcaattcataagaactcattcttttctgggaatctctttaacatacagatgtgagtgttctgaaatcatttttgggctaagagaccagacaccctgaccatattattaattaattcataggtagtcttctgacctgaactgggacattaagaacctggcttccaagaatttaatgctygaaagagagagataatagggtagaagtaagtcacatcactagggtcactccagaaaaaaaaggctgaagaacttctatttctgaaggtataatttagaaagtaacatttctgccactggcaatgtaggtgaatttcaaaaaaaatcttctacagatttagacaaaataaaaagaaaaacatagaatctatccataaaatcatttcaaccataattcaggtataagataatgattgcagaaatttatgccccctaatt

SEQ ID NO: 884660 - DNA, 620 bp, Homo sapiens
acatcactagggtcactccagaaaaaaaaggctgaagaacttctatttctgaaggtataatttagaaagtaacatttctgccactggcaatgtaggtgaatttcaaaaaaaatcttctacagatttagacaaaataaaaagaaaaacatagaatctatccataaaatcatttcaaccrtaattcaggtataagataatgattgcagaaatttatgccccctaattaaatttctctaactcaaggaatatgccagttctggctgagcacagaggctcatgcctgtaatcctagcacttttatgactctacaaagaactcacaataagaaaaaagaaaacaaaagtgagaaaacaccattatctatggtgctgccacttgattcttctacagaatagggcagcactaaggaatagggatggaagacagacacagtaagccttttaagttcctggagaccaagttacatgaatattgtaattaagccaagttaaaagagatattggatccaagaaaaactccgataaaatatttagaaatctactttttgacataatacagggggataaacctggattataatttactatgacttttcatgaatcctgaatcatctatcaatg

SEQ ID NO: 884661 - DNA, 661 bp, Homo sapiens
gagtagacacagacataagtaaaataaggtttacttatctaagtaagacattcttatcctactatagaaaaaagttagtgcaatcagaatatggcaaagggatcaggacaattgtcctttaataaatgttggtatgttggtataaatgtccatgttcccctaaaaaagaaaataattgcaggtgaaaaatctgattgaaacttatgtcaaggtttctggaagcccaaatgctcctcttccaccccagtcgaatatatttaaacctagakaagttcttcacacagactaatctggataagtgccagtgactatactacccaaacctggtagattatattaatctggatgctatacaacataaaatataagactagattacagtatagttcaatctgcaattccattatcaaggactcgttgatcacccttggcatctctagttttagtgccctcctgaaatcagggttaagaaactggagcaatgttgtatctattgaagctattcctgttgaccctgaaagtgtactgctgtctctgctgggtggaagcaactctttcagaactagttattgaaatgaggggtggggatgggagtggtgagaatagcatttttcagatcaatcaactatgaagggcgtgttaatttgatctggtaaagact

SEQ ID NO: 884662 - DNA, 592 bp, Homo sapiens
cctgataggcccactgtgacatggtcttgagccaaaagtccatttatttccatttagtaaaccctagatgtagttttatttatttttatttaatcttcacaaccagtattaagcccgtattaagttcacttgtctgaagtcagaaagttggaaaactagggccataactcaagtttcctgatgcttagttcttttctctttcactttatcaagcattagtgatgactaattattatgacttttgaccctagagaagaagggccatttacatgtaatatgatgtagtcttaagtaccaggaaagccraaataaggttacatcttttccaataagtgctccagtcagaacaccatttacatgtctttatcatcttccattgagaagagtaataaaaatgggagaactcctgatctataaatgatgttcagcctgaagatttttctaattaaaatttcacacataagaatgaatatctctaactttcatgacaagatgttgacttgatgatgcctactgcaattgtgcctttttagtctgactggcagcctctatccagtgcaagttcctatagcacaactgggatttaaacaag

SEQ ID NO: 884663 - DNA, 603 bp, Homo sapiens
tgaacgggacaaagatgggacgaaatgaaaggaggctgttagagttcctggactgtaccggcaagaaagggactgactgaggtacccagctgtgaccatttcttcattttcgagacagggaagaaggactccaaagttgggtcagaggttggcatggccgtcactgcccccaagaaccaggggcacggtactaggggactgggccatctctctcttggtcccagaaacggaggtcacctcctgagttccaggcatttgtcccacctcctcggtttcagagggatgggctgcagcagcccaggctggggggagagcccccaccccgctgcccagggcttagggtgtgaagctgttaccccattgggcctgaaggacagagcactgagcccaggcagaatcttttccatccttrgaatgtaacggaatttgcccccattaggtttcaaaagtgcttagagcccacgtactccagtagtttttcagatttcctgcttttggtaggataagccctatccggcaccagtcccacaactgtctttcagaagcagacaacgtgtctagcttcacaggtgcagtggtggagagaattcccgcctcagcatg

SEQ ID NO: 884664 - DNA, 589 bp, Homo sapiens
atttacacaaatcagtagttctgctatataccaacggcaaccaagctgagaatcaaatcaagaactcaaccccttttacaataactgcaaaaaataaaaaagaaaatacttaggaatatacctaaccagggagatgaaaacttctacaaggaaaactacaaaacactgctgaacgaaatcatagatgacacaaacaaatggaaatatgtcccatgctcatggatgggtagaatcaatattgtgaaaatgaccatattgccaaaagcaatctacacattcartccaattcccatcaaaataccatcatcattcttcacagaactagcaaaaacaatcctaaaattcatatggaactaaaaaagagcccgcaagagcccacatagccaaagcgagactaagcaaaaagaacaaatctggaggcaacatattacctgacttcaaactatactataatgccatagtcaccaaaacagcatggtactgatatgaaaataggcacatagacctatagaacagaatagagaacccagaaataaacctaagtacttacaaccaactaatcttcaacacagcaaacgaaaacataaag

SEQ ID NO: 884665 - DNA, 604 bp, Homo sapiens
tattgtgagaagtgaagcatgtgtcttggtcactatcagtaacatctgcaactccaaatgaggtaaggagagacctgatgaggcattttattatggccttaccatatgtagatacacctgtacctttggtttacattttgggcatctgtgagtcaagatattccccagacttatctactacaaagggagtaaatcttkggaaatagtccaagagtttgtaaaaatgcttggacggatctatttgttggtcagggtatccagtgctgagatgaatgacttaagtttgaccaattgtgttgatgctaggaccctgctctttatcaggaacatcctgattaaggggatggaaatggccacattctactgggcaacatcacttatgatggtgctattaatatagtgcatgccatccataaagtgtataccctcccttgttatctacccagttaatcctaaggggctccctgggtagccaaggggtctcggggaggaataagctcctctagcaccatagcacctatcaaggcacttgaggacaggggaggctaccccgtactgcaagtagaatatgtcagagggcccatatttgcctccatattgtagc

SEQ ID NO: 884666 - DNA, 604 bp, Homo sapiens
tattgtgagaagtgaagcatgtgtcttggtcactatcagtaacatctgcaactccaaatgaggtaaggagagacctgatgaggcattttattatggccttaccatatgtagatacacctgtacctttggtttacattttgggcatctgtgagtcaagatattccccagacttatctactacaaagggagtaaatcttgggaaatagtccaagagtttgtaaaaatgcttggacggatctatttgttggtcagggtatccagtgctgagatgaatgacttaagtttgaccaattgtgttgatgctaggaccctgctctttatcaggaacatcctgattaaggggatggaaatggccacattctactgggcaacatcacttatgatggtgctattaatatagtgcatgccatccataaagtgtataccctcccttgttatytacccagttaatcctaaggggctccctgggtagccaaggggtctcggggaggaataagctcctctagcaccatagcacctatcaaggcacttgaggacaggggaggctaccccgtactgcaagtagaatatgtcagagggcccatatttgcctccatattgtagc

SEQ ID NO: 884667 - DNA, 656 bp, Homo sapiens
cgctccttctatggccagtttttgagggtttctattataaaaagatatagaattgtatcaaatgcctttttaatatcaattgaaatgattatattgattttgtccttcattctgcggatatgatgttccacatttattgatttgcatatgttgaaccatccaygcatccctgggataaatcccagttggtcatgatgaatgacctttttaacatgttgttaaatttggtttgctagtatttggctattttcacatcaatattcctcaatgatattggactgtagttttctttttttgatatgtctttgtatgattttagtatcaggataataatggctttgtagaatatgtttgaaagtattctgccttcctccatttttttggaatagtttgagtaagattggtacaatttgttcttaaatgtttggtagaattcagcagggaagccattgcttcctgggcttctctttgctggaagcttttttattatggctttgatcttgttacttgttattgatctgttcaggttttgaatttcttcatggttcaatcttggtagattgtatgtgtctaggaatttgtccatttcttctagattttccaatttattgtcatgtagttgcacatagtaaccactaatgatcctttaaatttct

SEQ ID NO: 884668 - DNA, 599 bp, Homo sapiens
ggcctgttactcaaggtgaccagtgctacagtgcatgtatacaccagaactctccgtgggatcagcctaaggcttagagttcagctgaagttactgttttgtttgactccttcctctgtcccatcttgcttctcttagtccctttcttctgaatgcccttcctcaatcattcacttgcacaagaatctgcatcccaggctctgcttctagggactctgagctaggacagaccttatttcaccctttagggtttacactcaatatcacctctccaggtttgctattttttttccattttaattacagttcaggatccccttggcttcacttcctttagctttaaattaagatatcccacctggtccaacccaaataccagaacgtcttacctccatgaataccacctacytgaggaattcaataaacacttatggaccaaaagaagagtatcaaattcaaccagtcacatattataataacaataataacagcagcagaaagtgcctccttgagactagctgaacttatcaaataagaaaatgctggcttgggaactgtgactcacacctacaatcctagcactttgagaggccaaccta

SEQ ID NO: 884669 - DNA, 603 bp, Homo sapiens
cgtcttaggtctggttccttaaaagcagagcctgagatggggatgcttggcaagtaatggagtgctctcaggagggactgctgtggagggagaaaagcagaataggacaaatctaggctcatcctggtcccacaggaagttttaaagtgtgaatrgcaccaggatcagtctgtcattgtttgaaagctgcctcaagaaaagggcacaacctgtagacatttgcagcagctcccggaagcctaaggcaattgccttagagaaggaggaagctgtgagtcaacacccaacacacagcagcttggaggagacagggctccatcctggttaaggggatttgtacaggataccactcctggtatgaaaaataacaggcacattagagaaataaaaaaaaaagctatagaatgcttagaattcagggattatatcttatacatttgttcaactttccaccaataatattgattcttaggtgaaacaggtgctcaataaatgattaaactaaatagaaactttcgcgatataaagtgagctggagaaaaaatggttgttaatttaaaaacgggatcatctgagttaatactacatggagattttgacttc

SEQ ID NO: 884670 - DNA, 642 bp, Homo sapiens
gggcgtaagacatttgttattcatctgagcccatagatgaaaacttgagagccactgaccgccactatcatctggaaccagccctcagtacctctccagtgggcaactgcaacatccttctcactggactcctcacttctactcttcacctttcaacaatccgttctacacatggtaactagagtgatccttttaggtaacaaatcagggcagatcaccttcatgctctaaaacctgcagtacttccccaatgcactgagagcaaactcttccatagcctacaaagtcctacacratctgcccctgtggcctccacagtctcatctatcactctccccgtcacttgctgaaccaacaccctggacttctttctattcctcaaaaatgcattcacaggacccacacgtggctgatcccacagctgcccccaatcaccatctggacttttgcataactgtctggctccaccaggtccccctcaaatgtgacccctcagagagcccttccccaatgtcattgaaaactaacactgtttgcaagtttgtttccttgactattgcctacctccccaactggagtgcaatctccatgagacctgagacccaagcttactctctgtacatcttcaacatccaaaacagt

SEQ ID NO: 884671 - DNA, 630 bp, Homo sapiens
cttgtgggcagatactttgagactatgcaactatcttgtttctagtcctttttcctccatacatcttagcatccatcaatggttcttgcctgagataattattatttgtgattgcttgatgatgactttttaatttttttcattccctctatatttggtatttggtggtttaaattctttttttttaagacagagtttcactcttgtcgcccaggctggagtccagtggcatgatctcggctcactgcaacctccgcctcttggttcaagggattctcctgcctcagcctcccgagtagctgggattacagaagtgagccaccacacccagctaatttttgtatttttagtagagacgaagtttcgccatgttggtcaggctggtctggaactcttgacctcacrtgatctgactgtctcggcctcccaaagtgctgggattacaggtgtgagccaccacacccagcctagtgatagaaattctacagtaaaaaagagctgtcctttctccttttttattatttggctatttatttgtgttacttccatggatacttgttttgttctgtgtgttataacttaatatatcatgttttgggctcatactagtgccagtttttgctgagaact

SEQ ID NO: 884672 - DNA, 618 bp, Homo sapiens
tgtgtcaggaactactgtagccactcatagggcaaatattaataatcaattttcctgcatttgaagaatttacaacccaatgagtaagatagttgataaatgactcattatgatgctaatcaaactaacataaatgctatcttagaggcaaatgaccaaatctcaataggtttgggaaagttttcatcgataaacttttaattgggttatagataacatgaactttaacaagcaaaaaataattctcctgagaatcatttgaataagatgtaatcgtgttttgaaatttgagaaaaatgtatgatatgtatatgtagattatatatatcattattgtgtatgtatacatacatatgtgtrtatatatatacatatataaatatattcttgcctatatttccatagctgaaaacatggaaccttatgccttattatagtttacattatataaagtatatgaaagatccagctgaaactcaagtctcaggttctggaagcactggagcatctagccataagtatttgatggtccagccatgtttttaacatgttcacctgtatgtttcaacagcccttttggaaacaaaaccatttttacttttttgttcttgagtcaca

SEQ ID NO: 884673 - DNA, 605 bp, Homo sapiens
acatttattaagtgccaattatgtgcctacactgtgctaaatgctttacatggattatcttatttaatgctcaaaacaggtctatgagtgaagtcactttgttagcaccatattccatgtaaagaaactcattgccccagttcttttccytgtctgtatccaccccttggccataggggttcttcccagtagatgtaatgcatgcttccctgttcattgtcttgagtctcagctgtgtgagttgctttggtcaatgggatattcatagccatatgtcagacaaaccttgacatggatttgcacagggagtttttcctctagtgcttccaccattgccatgagaatacactccagtcagactgcagatccaatggggatagcagacatggaaagtagacctgagcccagctgccagcctagaacccaggccagctagatcggcaacttgaagcctaggttcccagctgactagctgcctcttgtgtagtcacatgaacaagaataaatactagtcattttaagtcactgagttttgaggtggtttgttactcagtgatagtttaccgatacaggaacccaccaagaggttgttacttgtccagggt

SEQ ID NO: 884674 - DNA, 595 bp, Homo sapiens
atttacatgaaaacattccaattatttaaaaaaatgtatttttttttttttgtagaagcaggatttcaccatgttgcccaggctggtctcaaactcctgggctcaagcaatctgcctaccttggccttctaaagtgctgggattacaggcgtgtgctactgcacccagccatttttcaaaaattttaataagaraaaagtgaggttcagttgccagacttgatccagtcatggcacagagtgtgctggccaaggctgggttgctcccaaccacactcccggccatgctcaccagggctgccttgaggcccagcgtggcagcgagggtcagaggagctaagagagccgccaaggctcctgcgggtgggatttggaagggctggccccagaaagcacaacccattgcatctgtcttgcagtcccaaagcaccacagactgctgagtaagccaggtttctgtttgggccgtgaaatccactctggtgccaagttccatactgctgcctccacgacgcagggattccagtggcggctgagccccatggaagcagcagagcctcccgggacaggccaagcaggacctggatctgggttcc

SEQ ID NO: 884675 - DNA, 565 bp, Homo sapiens
ccaaaacatttctaagaaaaaagtttatagtttgaaatacctacaccaaaaaagaagaaatatttcaaataaacaatctaatgttacacctcaaggaactagaaacataagaacaaacttaacgttagtataagaaaagaaataataaagawcagagcacaaacaaaataaatagagactaaaaaaccgagagaagagttcagtaaaacaaagatttagttttttgaaaagataaacaaaataaagctttagctagactaaaagagggagacaactaaaataaaatcaaaaatgaaaaaggaaacataacaactaatatcacagaaataaaaaagattataaaaaactactataaacaattatacaccaacaaactgtataacctagaaaaatggataaatttctagaaatacaacctaccaaaaccgaagcatgaagaaacagaatatataaacagattaataagaagtaaggagattaattcagtaacaaaatatctactatgaacaaaaagtccaggacctgatgacttcactgccgaattctaccatacatttaaagaaaa

SEQ ID NO: 884676 - DNA, 565 bp, Homo sapiens
ccaaaacatttctaagaaaaaagtttatagtttgaaatacctacaccaaaaaagaagaaatatttcaaataaacaatctaatgttacacctcaaggaactagaaacataagaacaaacttaacgttagtataagaaaagaaataataaagatcagagcacaaacaaaataaatagagactaaaaaaccgagagaagagttcagtaaaacwaagatttagttttttgaaaagataaacaaaataaagctttagctagactaaaagagggagacaactaaaataaaatcaaaaatgaaaaaggaaacataacaactaatatcacagaaataaaaaagattataaaaaactactataaacaattatacaccaacaaactgtataacctagaaaaatggataaatttctagaaatacaacctaccaaaaccgaagcatgaagaaacagaatatataaacagattaataagaagtaaggagattaattcagtaacaaaatatctactatgaacaaaaagtccaggacctgatgacttcactgccgaattctaccatacatttaaagaaaa

SEQ ID NO: 884677 - DNA, 718 bp, Homo sapiens
atcttctgacatgcccccatcattgtggggcttttgtttgtttcctaacatttactttctggtactaaagtatgctccagattcatcttgtatattttctctgccagtcctaggtgagtgatttcaccaaagaactctggttccttttctcagagaatggtgttagaaacaaagatctgggcgctcattktgctttttgctcctggtgtgctgccgcttctaggctctctcagctgaacatttctgtatgtccctgtatgtatctatatcaagataaacataaattgatgctgatgtcacatggatcattctagccctctccacttgcttatttgaagcctccctccctgttggagcattttcaaactgggaagtgttattggcatttagagggcaggagtcagggaagtcaaattccttgccacccaagcaatagtttcatataaatgaagaattttctctgctcaaataacaatggtactccaatggaaaacactgatgtttgtggacatcaacagccccaagaatccaacagaaatagcattgtgtagagtcacagtgagtggaaaaagaagcttcaagttatgaggggaatagctactagctgggtgaatgctttgagggtacaaagtaagagaaacaatctgctgataaaatcaactggtttgattgtattagtggcctccgttcctcagcgcccccagcccctgtattcagg

SEQ ID NO: 884678 - DNA, 613 bp, Homo sapiens
ggatgcctaagaagagggcatcttttgtgattgatttggggagcatatttggtttgctctagttggtcttgagttgaaagcaagggcacatttaaagaacttagcagttattaacaaagtcttgacctttctgggtccactgctacagaggtgatggtttggcttcgtggctggttgctgcggaggttgtaggtcagcaatctctttccatgtgacatttagacactgtccatttgtatattcattctggggcttcaagccagctgtggagtcagagtagaagtctgtctctcagattccccactgaggttcacaaaaagaggattatggttatatcaccactgacctgatatatacacagtggtcttgaatttttccaaccrttgatctgccaacgcattaatctgagatttaaaaatgctttcaaaactgtgagtttcacagattgagggctctctaagttccagttctaaagatcttattcactattctaatcctggtaagtgtggtcttcactttgccaggctctttaccatgaaatatgtaaagagatagaaaatacattgcctgtcctcaaggggttattctagcaagcacctggataagggtaaaa

SEQ ID NO: 884679 - DNA, 613 bp, Homo sapiens
ggatgcctaagaagagggcatcttttgtgattgatttggggagcatatttggtttgctctagttggtcttgagttgaaagcaagggcacatttaaagaacttagcagttattaacaaagtcttgacctttctgggtccactgctacagaggtgatggtttggcttcgtggctggttgctgcggaggttgtaggtcagcaatctctttccatgtgacatttagacactgtccatttgtatattcattctggggcttcaagccagctgtggagtcagagtagaagtctgtctctcagattccccactgaggttcacaaaaagaggattatggttatatcaccactgacctgatatatacacagtggtcttgaatttttccaaccgttgatctgccaaygcattaatctgagatttaaaaatgctttcaaaactgtgagtttcacagattgagggctctctaagttccagttctaaagatcttattcactattctaatcctggtaagtgtggtcttcactttgccaggctctttaccatgaaatatgtaaagagatagaaaatacattgcctgtcctcaaggggttattctagcaagcacctggataagggtaaaa

SEQ ID NO: 884680 - DNA, 564 bp, Homo sapiens
agtacaaaggcattatattgcatagtgatgaagtctgggcttttaatgcacccatcacccaaataggatacattttatccagtaggtacatttttaaccctcacccgactcccacccatctgcattatttttcagtgcagcaatttagataaagatcctctacattatatccaaatatcaagctaatattgtcgcaattccataaactaaaatatctatcaattcacaatgatttgaaatctcattcttatgaaatagtgaattcaaactcatttgtgagcccttttctctttcattcaccctgyttttgtgcatgcccctgtaccaaaatgatttcattattgtagcattatggagaccagtagacctaggctactgaattgctcatataaatagatgagaatatatcatttacatatatttatattttcaaaagaagtttacactagtccactctaaagaaagtacatttttatagggatttacaggtcaattttggagtgacaccataaagtagggaaccgtccacaccacaacatgtacgtcttctccatgtcccctagg

SEQ ID NO: 884681 - DNA, 564 bp, Homo sapiens
agtacaaaggcattatattgcatagtgatgaagtctgggcttttaatgcacccatcacccaaataggatacattttatccagtaggtacatttttaaccctcacccgactcccacccatctgcattatttttcagtgcagcaatttagataaagatcctctacattatatccaaatatcaagctaatattgtcgcaattccataaactaaaatatctatcaattcacaatgatttgaaatctcattcttatgaaatagtgaattcaaactcatttgtgagcccttttctctttcattcaccctgcttttgtgcatgcccctgtaccaaaatgatttcattattgtagcattatggagaccagtagacctagsctactgaattgctcatataaatagatgagaatatatcatttacatatatttatattttcaaaagaagtttacactagtccactctaaagaaagtacatttttatagggatttacaggtcaattttggagtgacaccataaagtagggaaccgtccacaccacaacatgtacgtcttctccatgtcccctagg

SEQ ID NO: 884682 - DNA, 564 bp, Homo sapiens
agtacaaaggcattatattgcatagtgatgaagtctgggcttttaatgcacccatcacccaaataggatacattttatccagtaggtacatttttaaccctcacccgactcccacccatctgcattatttttcagtgcagcaatttagataaagatcctctacattatatccaaatatcaagctaatattgtcgcaattccataaactaaaatatctatcaattcacaatgatttgaaatctcattcttatgaaatagtgaattcaaactcatttgtgagcccttttctctttcattcaccctgcttttgtgcatgcccctgtaccaaaatgatttcattattgtagcattatggagaccagtagacctaggctactgaattgctcatataaatagatgagaatatatcatttacatatatttatattttcawaagaagtttacactagtccactctaaagaaagtacatttttatagggatttacaggtcaattttggagtgacaccataaagtagggaaccgtccacaccacaacatgtacgtcttctccatgtcccctagg

SEQ ID NO: 884683 - DNA, 689 bp, Homo sapiens
aaagcacacaagaagtattaattatgatgaatatgcatataattgtttaatcaagatttcttaacaattgttcaaaaacatttttcaagtcattattcttcaatgtatttgctttcaaaggctgtgggcttatccttcatagtgatgtatttatctagtccacagtcttcaactaaacagtgctgcaatgagcattctcatggataaatcacagtgcacctgtctgcttatttccttaggatataatgtgctaaatgtgaaattgctgagraaaattacatgagcatatttaaaacttttgatatgttttgctaaatggccttccagaaaaattatactgatttataatgctaccagcagtatatgaggtcatcttttccttatattcttattaatatcccatgttattggttttttaaaattatgccaatactttgtttgttaatttgaatttctttgatgactactgaagttggatgtcccagcttcaatatctcaggactttaaatattttttaaaatccctcaaagcttgtgtttacagaatgttaaccagcccttttctcctcaatgaatgaactctgtgtcttggcaggtctcttgtagtagcagaggcatcatctcacaggtagcagctgcttgatttaaatcccacctgtgctgctggtaacatacctcccatttaataga

SEQ ID NO: 884684 - DNA, 596 bp, Homo sapiens
tgacaactcaggactccttggagcccttgctgaagggcctttatcagcctaaagctgagccttcagcctgggtcccatctcagataagatcattaattttccattgcagcttctctctctctctctctctctctgagtcatctttacaagcccctgaaacaatggtatttaaggagggagctttctcaacacctgaaatccctacagaaaggttgagcttccttggtaaagcatttacctgctgggggagggtgcatggagtgacatggttttcacatttgagaaaggtaagtgggagggaatatcagacaactrcagagtgcagattatcatttaaataaaatccccatggggctcgctggcagcattaaaattgctcctgcctctgtggtgctgtcacagaacagcctctctcctttattctgctttaccatagaaagaggcagtgtggtgcagtggaaataccccagggctgaatcctaggattcaagtctgatccatcatctctgggctgtgtataactaactaggcaattcacttacctctctgagtaatgatgtttttatcaatagaatacagtgattaggagcaatgaa

SEQ ID NO: 884685 - DNA, 598 bp, Homo sapiens
ccaaaagccaaaaggaccttgccttgggttttcacacactggagcttcttgtctctgatctcagctcagctgttgtcttctcagaaaagtcttccctgaccacaggcttgaatggtgcctcatccacatctgtcccattgccctgatttactttacttttttttttttttgaaattttttttgagacagggtcccactctgtcgcccaggctggagtgcagtggcacaatctcagctcactgcagcctccctttcccggcttcctgggttcaagtgattttcatgcctcagtctcctgagtagctgggactataggcatgtgccaccacgcccggctaatttttgtgtttttagtagaaacggggttttgccatgttggccaggctggtcttgaaytcctgagctcaagcaatccacctgcctcggactcccaaagtgctgggactacaggtgtgagccccgcatccaggctactttctctattgtactaatcaatgtctagaattactattatttacctctctattgtttgtttccccaaatagaatataaattccctgagagtagaatttgttccctaatgtgatttgctcattgc

SEQ ID NO: 884686 - DNA, 629 bp, Homo sapiens
gtcacactgttgaggagttcacagtctatttgagagaacagtcacttaaataattatagcaaggccaaataggtgctgtagtagagatatgaatagaattctatgaggctgatactgccgcagggagtcagaaaaagtttcacagagtttttggctatagygaggtaacattacagggatgcatctacattgaaaagacaaaaagagaggaagaattttaataattcagactaccaagaagagttagtgagtgcagaattatgtgaacatgagacagcagaagtgcatttgtgattctcccatgggatcttagttccttacttttgcagttttaacatctcactgcactgctctgaatacgattctagtgcttaatgatacctatttttacctacatatttatgtacaaagttgtatcatgtactttgaggtatttaatacatttttcagagtagttatgactatatgtagttaaatattatattgctgcctctaacctgcatccctcatccccatccttacctcatcctggcaccttaaacaatgattttagagaaggagtggcagttatctaggtggaaaagtagacagagagattccaggcagaggaaccaaaattgtcagtacaa

SEQ ID NO: 884687 - DNA, 629 bp, Homo sapiens
gtcacactgttgaggagttcacagtctatttgagagaacagtcacttaaataattatagcaaggccaaataggtgctgtagtagagatatgaatagaattctatgaggctgatactgccgcagggagtcagaaaaagtttcacagagtttttggctatagcgaggtaacattacagggatgcatctacattgaaaagacaaaaagagaggaagaattttaataattcagactaccaagaagagttagtgagtgcagaattatgtgaacatgagacagcagaagtgcatttgtgattctcccatgggatcttagttccttacttttgcagttttarcatctcactgcactgctctgaatacgattctagtgcttaatgatacctatttttacctacatatttatgtacaaagttgtatcatgtactttgaggtatttaatacatttttcagagtagttatgactatatgtagttaaatattatattgctgcctctaacctgcatccctcatccccatccttacctcatcctggcaccttaaacaatgattttagagaaggagtggcagttatctaggtggaaaagtagacagagagattccaggcagaggaaccaaaattgtcagtacaa

SEQ ID NO: 884688 - DNA, 601 bp, Homo sapiens
cagaaccgtgcattttggttctgtggcctgcactcccatctgatactgcatctccagacacaatgatacaggttgagtattacttatctgaaatgggtgggagcagaaatgtatctgattttggattttattgtatttggaatattcacatatatataatgagatatcctgaggatgggaaccaagtataagcatgaaattcatttaggtttcatatataccttatgcacataacctataggtaattttatgcagtattttaaataattttgtgcatgaaataaagttttaaatatgcacgtgtagaattttccacttgtggcatcatgttggcaatccaaaagttttggattctggagcatttcagattttggattttcagattagggatgctcaacctgtattaagcacatctaacagatgwgaaactggtgttcagtggctgaggtgccacagtcactcagcagaaataggtcctaaattcagagtccctaaagttttatttttactaggctacctgaccccttaccatagagactgtcctgtggtttgggactttagttttcaaggccttttgtagttctgcctcgttgtcaaatag

SEQ ID NO: 884689 - DNA, 562 bp, Homo sapiens
ggaactgctgaagaaaatcaccagtgagtatcagtttctgcaagagaatctaatgcaggctttgcttctcatcggaatcccccagctggtgtcttggttgactgagagtctgggggagagggcagagaatggatttattctctgctaggtttttaacagtcaagaagggctgtggtcctaaggggcactggtcaaaccttagtgtgcatcagaattatctggataaggctaggcacagtggctcacgcctgtaatcacagcactttgggaggctgaggcgcgtggatcacytgaggtcagaagttcaagaccagcctggctcttttagtagagaaaccctatgtctattaaaaagtacaaaatttagccaggtgtggtggtgagtgcctgtaatcccagctacttgggaggctgaggcaggacagtcacttgaatctaggaggcagaggttgcagtgaactgagatcgtgccattgtgctccagcctgggcaacaagagtgaaactctatctcaaaaaaaaaaaaaaaaaatacctggagagcctgtgaacatgcatagtgc

SEQ ID NO: 884690 - DNA, 649 bp, Homo sapiens
tttgtttgtatttctgtggggtcagtagtgatatcccctttatcattttctattgtgtctatttgattcttctctcttttcttctttattaatctagctagtggtctattttattaatttttttcaaaaaaaaactggattagctattttcctgaagggtttttcatgtatctatctcatacagttccactctgattttggttatttcttgtcttctgctagctttggggtttgttsgttcttggttctctagttcttttagttgtgatgtcagaatgtcgatttgagatctacttttttgatgtgggcgtttagtgatatcaatttccctcttaacactgctttagctgtgtctcagattctggtatcttgtctctttcttctcattggtttcaaataacttcttgattttggccttaatttaattatttatgcaggaatcatttaggagcaggttgttcaatttccatgtagttgtgtggttttgagtgaatttcttaatcttgagttctaatttgattgtgttgtggtctgatggactgtcatgatttcagttcttttgcatttgctgaggggtgttttacttccaattatgtgatcaattttagagtgacatgtggtgccaagaagaatgtacattctattgttt

SEQ ID NO: 884691 - DNA, 698 bp, Homo sapiens
gttcacgtataactcacatgcagaaaagtgcacgtcaaaagtttacatctcaacgacttttcacaaagtgagcaatccatgtggatgtagccagcacctaagccaagctgcaggacgggagccacgccctctccttcttctcctctkccccctagttagccactatcctgactttggaaccgtagattagttttgtctggtttgttgaacttgatacaatggagtcatcctgtatgtgctatttatgtgcctggcttctttcactgtacattacgttcgtgagattcattcatgctctgtgcacttgcagcccattcactctcagcgtggatggtattcattatctgactgtgcggccactgaatcttccatgccactggggaggggccttcggggcatctacaggctggggattataaattgcactgctgagaacatttgtgtgcatgtcttttcatgaatatgtgaatgcatttctgttgagtatatactgaagagtggagttgacaggtcacagggcatgtacatattcagttttaggggctgccagatacttctggaaattaataagaaaaagactgaaaaccctatagaaaaatcagtaaaagagttgaacggtcacatcgcgaaagaagatgctcagttgtccaataaacatggaatggtggtgcttaaccactttagtcatctaggaaata

SEQ ID NO: 884692 - DNA, 698 bp, Homo sapiens
gttcacgtataactcacatgcagaaaagtgcacgtcaaaagtttacatctcaacgacttttcacaaagtgagcaatccatgtggatgtagccagcacctaagccaagctgcaggacgggagccacgccctctccttcttctcctcttccccctagttagccactatcctgactttggaaccgtagattagttttgtctggtttgttgaacttgatacaatggagtcatcctgtatgtgctatttatgtgcctggcttctttcactgtacattacgttcgtgagattcattcatgctctgtgcacttgcagcccattcactctcagcgtggatggtattcattatctgactgtgyggccactgaatcttccatgccactggggaggggccttcggggcatctacaggctggggattataaattgcactgctgagaacatttgtgtgcatgtcttttcatgaatatgtgaatgcatttctgttgagtatatactgaagagtggagttgacaggtcacagggcatgtacatattcagttttaggggctgccagatacttctggaaattaataagaaaaagactgaaaaccctatagaaaaatcagtaaaagagttgaacggtcacatcgcgaaagaagatgctcagttgtccaataaacatggaatggtggtgcttaaccactttagtcatctaggaaata

SEQ ID NO: 884693 - DNA, 612 bp, Homo sapiens
atgatgaggatgaggggggaaaacttgtactggaataaagagagaaaaaaagaagttcatgtagaatagtcaggtaatgctgttaaaatgccctttgaccaccccactccttcgccagggagtttctctgattcactcsatatttcttgctcctccgtcagattgttcctaaaactccaaactctcagggtatttgcaacctctgcaaggtccacgctctaacctaacaacaaatccatgaagacacagcaggcagcaaggcatcccttcaatggggcgtgcaccccttcaagagcagttgaagttacaagaggaatcttttatttctgttatgttttcaacaatcacatttactggttaattagtgaggtgagcgtatgtcctggcttatgccagttgttctagtgtgattattaagaatgcctgtgggcactgtccaattgtcccactttcgatcatgaattaaatggtcactccatatacttgctttactcattgcttatctggagtggcactatacaatagatatataatagaagccaaatgtgtaatttaaatttttctggtagtcctattaaaacaaaaggaaaaaggtaaaattacttttaataa

SEQ ID NO: 884694 - DNA, 612 bp, Homo sapiens
atgatgaggatgaggggggaaaacttgtactggaataaagagagaaaaaaagaagttcatgtagaatagtcaggtaatgctgttaaaatgccctttgaccaccccactccttcgccagggagtttctctgattcactcgatatttcttgctcctccgtcagattgttcctaaaactccaaactctcagggtatttgcaacctctgcaaggtccacgctctaacctaacaacaaatccatgaagacacagcaggcagcaaggcatcccttcaatggggcrtgcaccccttcaagagcagttgaagttacaagaggaatcttttatttctgttatgttttcaacaatcacatttactggttaattagtgaggtgagcgtatgtcctggcttatgccagttgttctagtgtgattattaagaatgcctgtgggcactgtccaattgtcccactttcgatcatgaattaaatggtcactccatatacttgctttactcattgcttatctggagtggcactatacaatagatatataatagaagccaaatgtgtaatttaaatttttctggtagtcctattaaaacaaaaggaaaaaggtaaaattacttttaataa

SEQ ID NO: 884695 - DNA, 612 bp, Homo sapiens
atgatgaggatgaggggggaaaacttgtactggaataaagagagaaaaaaagaagttcatgtagaatagtcaggtaatgctgttaaaatgccctttgaccaccccactccttcgccagggagtttctctgattcactcgatatttcttgctcctccgtcagattgttcctaaaactccaaactctcagggtatttgcaacctctgcaaggtccacgctctaacctaacaacaaatccatgaagacacagcaggcagcaaggcatcccttcaatggggcgtgcaccccttcaagagcagttgaagttacaagaggaatcttttatttctgttatgttttcaacaatcacatttactggttaattagtgaggtgagcrtatgtcctggcttatgccagttgttctagtgtgattattaagaatgcctgtgggcactgtccaattgtcccactttcgatcatgaattaaatggtcactccatatacttgctttactcattgcttatctggagtggcactatacaatagatatataatagaagccaaatgtgtaatttaaatttttctggtagtcctattaaaacaaaaggaaaaaggtaaaattacttttaataa

SEQ ID NO: 884696 - DNA, 612 bp, Homo sapiens
atgatgaggatgaggggggaaaacttgtactggaataaagagagaaaaaaagaagttcatgtagaatagtcaggtaatgctgttaaaatgccctttgaccaccccactccttcgccagggagtttctctgattcactcgatatttcttgctcctccgtcagattgttcctaaaactccaaactctcagggtatttgcaacctctgcaaggtccacgctctaacctaacaacaaatccatgaagacacagcaggcagcaaggcatcccttcaatggggcgtgcaccccttcaagagcagttgaagttacaagaggaatcttttatttctgttatgttttcaacaatcacatttactggttaattagtgaggtgagcgtatgtcctggcttatgccagttgttctagtgtgattattaagaatgcctgtgggcactgtcyaattgtcccactttcgatcatgaattaaatggtcactccatatacttgctttactcattgcttatctggagtggcactatacaatagatatataatagaagccaaatgtgtaatttaaatttttctggtagtcctattaaaacaaaaggaaaaaggtaaaattacttttaataa

SEQ ID NO: 884697 - DNA, 633 bp, Homo sapiens
agctaggcagtcattctttttgggccttattttataaaatttataaattttgataaattcaattacaaaatcaagttggtatattacaggattattgtgaagattaggagtcatatgaaagggctcagaatactgaatgaatattttaacttaccaagtcattttaaccttggtaagtgtcttctttcttggtaaatcttcaactcaagttcggatgaacaggaaaaatgaaagctttarctctggggaaattctatcatgctcagctctgctcctcaagcactgcagcaggaactctgtttcttttcattgcatgctgtccaggtgcatttgtaccaaataaaatggtcatggtgcccctcatagccattgtcttgcagctggtagagcacttcctaaaagaccaggtgtaaggaacagcgtgggtatcttgtgtgcctggtgaggagtgcctatgagatctgggatggacactacccaagaacagcccaacctgagtggactggcatgatgggttctgctcagcagggagtgggaacctaaatatcagatggggtcaccccgcctcttgagttcttgacaaaattatctcaagaacagataagaaacctgatgccctccccctatctccac

SEQ ID NO: 884698 - DNA, 600 bp, Homo sapiens
aacctgcctctgagtgtcggttaggagggtggggaggagagaaggtggcactgagcagaattttaatcaggttttagcggtctctacctgctcatgtaactaatcaaatactcctgtcccgagggcagaaattcacacaatgcatttccattaaaaaattactctttaatcaacttcctcctactcarggccatccgaggggcaggaggaccaggcattcttgccaaggtcatcctgattgtggaagcttgccaggacagagtcccatctctggaacaaagtcttctttgtgcgtggtgagatggagttggtgtcttttggttttattaacctagggactatttacccatctcactatttcccttgcatatgtctaaaaggcaaaactaggaaagggctaggtggtctctgaatcctctcctctctatctccctaaaagaggtggctgtttctgtcaagaccatttggtggctggagagacccacggcagatagctacttactcagctatttccgtgtgtgtgtgtgtgtgtgtgtgtgtgtgtgtgtgtgtgtgtgttgcggaggtcttcatatttgaaaaaatattttctttatatat

SEQ ID NO: 884699 - DNA, 636 bp, Homo sapiens
gaagaaatgtatattccagacttctgcgcatatgacctaaatgtctgacaaagaggtcgagccaatttacacctcaagcaacaatgtattaacagtggctatttttctggatcctcatttgacactggatattatctaactttttttaactgctatcaatctgattgattaaaacatgacatctcattattgtttattcgcctttctttaattaggaaggcaaagatggtcctcttacgtttttattgtccatttgtatttctttttcagcaacttgtccattttcccttsggttaagtgtattttttccttactaatttgtataaaattttgcaaattaagaaaattagtctcgacctgtcacatgtttagactgtatttttattagttcagatttttttttagttggttgtaactttatagatttgttaatgttttctcttttgtgctctgtgtcttgtgtccttcatggaaagactttccactaattccaaaattttaaataaattcactcatgtttttcctcaaactgtcatagtttaatttttactttctgtaatttactttggtaagagaaatgagactaccatccaatttttgtttttgcatgcagttagtaccttgtcccggcaccac

SEQ ID NO: 884700 - DNA, 622 bp, Homo sapiens
atgagtcatcaaggcaatacaaatcaaaaccacaataatataccactacactccaatcagcgtagctattatcaaatgaacagacgaaaaaaagaaaaagaaaaaaaagtgttgacaaggatgcagagaaaagggaactcttataaactattggtggaaatataaattagtatagccattatgcaaaacaatatagaggcagaactaccatatgatatagcagtcccactactgattacttatcaaaaggaaaggaaatcaaatattttaaagggatgcctgcactcacctgtttattgctgcactgttaacatagtcaaggtggggaatcaaccttactgtccattaacgaatgaatggataaataaaatatgtttatatacacaatggaatactgttctgtcataaaaataatgaaattctgttatttgcaagaaacaggaatagaggtggaggcattattttaagtgaartcgcccagacacaaaaagacaaatactgtgtgttttcactcatatgtggaagctaaaaaattaatcttatggaggagggatagaatgatggttcccagaggctggaaagtgtgggtgggaggaggaatgaagggaggttggttaatggg

SEQ ID NO: 884701 - DNA, 622 bp, Homo sapiens
atgagtcatcaaggcaatacaaatcaaaaccacaataatataccactacactccaatcagcgtagctattatcaaatgaacagacgaaaaaaagaaaaagaaaaaaaagtgttgacaaggatgcagagaaaagggaactcttataaactattggtggaaatataaattagtatagccattatgcaaaacaatatagaggcagaactaccatatgatatagcagtcccactactgattacttatcaaaaggaaaggaaatcaaatattttaaagggatgcctgcactcacctgtttattgctgcactgttaacatagtcaaggtggggaatcaaccttactgtccattaacgaatgaatggataaataaaatatgtttatatacacaatggaatactgttctgtcataaaaataatgaaattctgttatttgcaagaaacaggaatagaggtggaggcattattttaagtgaaatcrcccagacacaaaaagacaaatactgtgtgttttcactcatatgtggaagctaaaaaattaatcttatggaggagggatagaatgatggttcccagaggctggaaagtgtgggtgggaggaggaatgaagggaggttggttaatggg

SEQ ID NO: 884702 - DNA, 596 bp, Homo sapiens
ctccacttagtgcagttttaattaaactgaatacattataaaacactctcctaatgtgctttgcctagaaaatgttttttaaagtgttacaaatcaatcaactaattgagctatgtagtaggaaatgcagatggcatctcgttactctgtgttttcactctgccaaccaagtgcctcttcatagacagggtttgtattgaggctggcaatttgcataacatagtaccagtggcgggctgtcataggcagtggcagaggttaccaaggaacagcaacacaaaatgcatggaccaagagcagggatggtgtgtggacaatgtggcaaggggacagaggtggcataaccaggatggctccctgcaacctgaggtaccatctattctacaytggaccaagagcagatggttttatctgcccatttggagtggctcaacaggaaacaagatcatacctgctttggggatttattttttcctggtacctaatacaggaagaggttagagtttgtttcctgctgtttcctttcagtttaatccaataaatattaattcagtatgaggcactccacccagtgccaggaagacatgttgactgat

SEQ ID NO: 884703 - DNA, 577 bp, Homo sapiens
acacttgtgggttttaaaaagtatttttaattatagccattctcactggagtgaggtggtatctgatggtggtttagatttgtgttttcctgatgattagagatgctgagcactttttcatgtacctattggctatttgaatgccttcttttaaggaatgtctattaacgtcttttgcccacttttaattggactatttgttgttttgctcttgaattgtttaagttccttacatattcttggtatcagctccttgtcagatgtatagtttacaaatmttatttcccattctgtaggttgtctctttactctgtttttcctttgctgtgaaaaaggtttttagtttaatgtagtcttatttgtctacttttgtttctgttgcctgtgcttttgaggtcttattttaaaagtccttgcccaggccaatgtcttaaagcatttcctgtgtgtcttcttctggtagtttcatagttttgagcctcttatttaagcctttaatcatttgagctgatttttgtatgtagcgagagataggtgtctagtctccttcttctgcctttcgatagtcagtattccc

SEQ ID NO: 884704 - DNA, 575 bp, Homo sapiens
aacaccaacaatgaattagctaaaaagaaatcaagaaagcaattcaatttataatagccaataaaataaaaggaaatatgtaggaataaatttaaccaagaatgttaaagacttctgcaataaaaactagaaaacactaatgaaagaaaatgaaaggggcacaatcaaagggaaagacatcccctgttcatgaatcagaagaactgatataataaaaatgtccacactacacaaagctrtctagagattcaatgcaatgcttatcaaaatgccaatgatatttttcacagaaatagaccaaaagccttaaatttatataggaccacaaaagaccctgaatagccagagcaattctgagcaaaaagaacaaagctggaggcatcatacaatctcacttcaaaatatactacaaacctatagtaacccaaacaccatggtactggtataaaaacagatgcgtagattaatggaagataatagagactccagaagtaagtccatgtatttcagccaactgattttcttttttttttttcatgtttgatattaatttattaaagcattctggaagttcc

SEQ ID NO: 884705 - DNA, 487 bp, Homo sapiens
tggccttttggagccttaattttctcatttatataatggggtattactctctccctcatggagttgctataagaattaaatgaaacaaggagtgtaacatgcttggtatagatgaacatgtaggtgttcaataaatgggaggagyattatcgctaggctgtgagtctcatgagggtgaggaccctagaggttgagagtgtagccgtgagctagggtgctgggttccaatcctggctcctctccttattcactctgtaaacttagacaaggaacttgacttctctgtctcagtgtcctcatctacaacatggtaatactaatagtacctaccttatagagtcataaaagattaagggttaaatgattagatatataatataacatttatgtatatattataattatgattatattataaaataattataataatataattatattataatatattatataatattataattataatatattgatataa

SEQ ID NO: 884706 - DNA, 588 bp, Homo sapiens
tgccagttcagtgtaggaagaaaaagaagtgatgaggcatatttttaaagacaaaaaacttaaaaaaaatggacaaaattatgactgcagacatgtggagagtcctatctacaccctgtcagatggtccaaacactccactcccaaccatttagccamactttgcatctgtttatggctacatctaggaaatcaaaagcagatgacaacatcatcactgcagccaatgtttgtagcaaatattccttctctccaaaggcttagaaatttgtgaacgtggagccaggaagacggaatcataattaaatgcagatgtgctatcatgttatgctattatgcacctaaaagaaacaatgacctggagtgcaaaaccagtgtctccctgagagagccccagatggcacagtcgggctaaggacagatttcactgtggggacctggctgtgaaggaaggcctagaaggaaactaaagagataaacattgagattagagagtctaccttcgtcaatttaaaaaaagaagaaacaaagatattagagaaaactcatattgatcaagactagatctcagttctgaaattcggaggaa

SEQ ID NO: 884707 - DNA, 590 bp, Homo sapiens
ttccagaaaacaaaaacaaagaggggaaagtaactgaacttccaaacactggcagtgcaatccaaagaggtgaaaagcaaattcacatgagctgaataaagaaactagcaatcaggaaggaagcacaggggaaatcacaaaagaaagcagaagagcagcccttgagataagaaaarggaggcaaacatgagaagggttcttcagaacttggagatcactgtagataacagcagaagcacggcccggcaccgtggctaatgcctgtaatcccagcacattgggaggccaaggtgggcagattacctgaagtcaagagttcgagacccacatggccaacatggtgaaaacccatctctactaaaaatacaaaaattagcggggcatggtggcacgtgcctgtaatcccagctactcggaaggctgaggcaggagaatcacttgaacttgggaggcagaggttgcagtgagccgagatcacgtcactgcactccagcctgagtgacagagtgagacttcatctcgaaaaaaaaaaaaaaacaccaagcagatgcatgaagaaagagaaacaaaggtataggaaacaaatgcag

SEQ ID NO: 884708 - DNA, 590 bp, Homo sapiens
ttccagaaaacaaaaacaaagaggggaaagtaactgaacttccaaacactggcagtgcaatccaaagaggtgaaaagcaaattcacatgagctgaataaagaaactagcaatcaggaaggaagcacaggggaaatcacaaaagaaagcagaagagcagcccttgagataagaaaaaggaggcaaacatgagaagggttcttcagaacttggagatcactgtagataacagcagaagcacggcccggcaccgtggctaatgcctgtaatcccagcacattgggaggccaaggtgggcagattacctgaagtcaagagttcgagacccacatggccaacatggtgaaaacccayctctactaaaaatacaaaaattagcggggcatggtggcacgtgcctgtaatcccagctactcggaaggctgaggcaggagaatcacttgaacttgggaggcagaggttgcagtgagccgagatcacgtcactgcactccagcctgagtgacagagtgagacttcatctcgaaaaaaaaaaaaaaacaccaagcagatgcatgaagaaagagaaacaaaggtataggaaacaaatgcag

SEQ ID NO: 884709 - DNA, 607 bp, Homo sapiens
tttagttctctgagtatctttaagatagttgtttagttattttaaagtctttgtctaggagatctttcattaggtctttaaaagatactttatattgacttgttattttcctttaaatgggccatacttttctgcttctatgtatgtattatgatttttttgttgaaagctagacttttgaatcaataagttgactttctctgccttgtatctctggttggccctaggttgaagataatttcctgacaatcagctctcgtacacctgcatcactaaggagggatgtctccagttttctattctgccaccaagctttcttatcagcacccggtagaggtctatgaaaaaatcttattaataaatgcaacctctctccctcccaccctggtctggacctcctagctatgccacactgtcatgctaatccatacttacttggmctttatgaattaagattttagctaaattctttttttttttttttttttgagataatggctctttcacccaggctggagtgcgttggcatgatcttggttcacagcaacctctgcctcctactctcaagccatcctctcacctcagcctcctgagtagctgggactac

SEQ ID NO: 884710 - DNA, 622 bp, Homo sapiens
aaacaactttttgtttcattgatcttttgtattttttttttaaatttcaacttcatttatttctgatctgatctttatttcttttcttctactaattttgggtttgtttttcacttgcttttctaattttttaatatgcatcattagatgatttatttgaaattttccttcttttttgatataggtacttttagctataaactttcctcttaatactgctttttgttgtatcccatgggttttggtatgttgtgtttccaatatcatttgcctcaagaaaatttaaaatttccttcttaatttcttcattggcttacttgtcattcagaagcatatttttwaattcccatgtatttgtatagtttccaaagtttctcttgttattaattctagttttattccattatggtcagagaagatacttgatgttatttcagttttttgagtcttttaagatgtgttttgtgacctaacatatggtctatccttgagaatgatccatgtgctgagggaaagaatgtgtactctgtggatgaaatgttctataaatatctatcagattcatttggtctatagtgcagattaagtctgatgtttctttcatgattttctttctgcaaga

SEQ ID NO: 884711 - DNA, 536 bp, Homo sapiens
ctttctgattaaagtactttctttagcatttcttgcaggactggtctggtgttgatgaaatctctcagcttttgtttgtctggaaaagtttttatttctccttcatgtttgaagaatatttttgctaagtatgttgttctagggtgttatggtttggcyctgtgtccccacccacatctcatctcaaattgtaatccccatgtgttgagggagggacctggtagaaggtgatttgttcatgggggtggtttctcccatgctgttctcatgatagtgaatgagttctcatgagatctgatggttttataagtgtttggaagttcttcctttactcttctttcccctgctgccttgtgaataaaatgcttgcttcccctttgcctcctgccatgactataagtttcctgaggtttcccccaccatgtggaactgtgagtcaattaaacctctttcctttaaaaatcagatatttctcagatatttctttatagcagcatgcgaacagactaatacaattaattggtaccaagagtttg

SEQ ID NO: 884712 - DNA, 669 bp, Homo sapiens
gcagcccctcccatcagaggcccagaggcctaggaggaaaaaatggttttgtgggctgagcccaggaccctgctcctgtgtgtatccttgggatttggttccctgtgtcccagccactccagctccagccatggctaaaaggggccaaggtacagcttgggccattgctttagaggatgcaagcccaaagccttggtggcttccacatggtgttgggcctgcaggtgcacagaagtcaagtattgaggtytgggaatctccacttagatttcagaggatgtatggaaatgcctggatgtctaggcagaagtctgttgcaggggcagagccctcatggagaacctcttctagggcagtgcagaagggaagtctggggttgaagcccccacacagagtctccactggggcactgcctagtgaagctgtgaggccaccaccctccagatgctaaaatggtagacccaccaacaatttgcactgtacatctggaaaaactgcaagcactcaacatcagcccatgaaggagctgcccaaggctgtgggagcccaccccttgcatcagcatgccctggatatgagacatggattcaaagaatatcattttggagctttaagatttaatgactgccccctggattttggacttgcatgggggcctgtgcccctttg

SEQ ID NO: 884713 - DNA, 576 bp, Homo sapiens
tggttgctttgctgtgtagaagctttttagtttgatataatcccatttgtctattttttgcttttgttgctgtgcttttgaggccttatttaagaaatctttgccaagcccaatctcatgaagcatttctcctgtgtttccttctaagagttttgcagtttgggtttttacatttaagtctttaatccattttgagttgatttttgtctgtggtgagaggtagaagtctagtctcattcttctgcatgtaggtatggaattttcccagcactcttattgaagagactgtcttttcttcaacatgcattcttggcacgtttgttgaaactcaattggccatagaagcatgaagttgtttctgggctttgtattctgtttccctygtctatgtgtctgtttttatgccagtagcacattgttttggttactatagttttatagtataatttggaggcaggtagtatgatgcctctagctttgttatttttactcaggattgcattggctatttggggtctttgtggttccacatgaattttactttattattttatttcattattattaccttttgag

SEQ ID NO: 884714 - DNA, 622 bp, Homo sapiens
catatgaaaaaaagctcatcatcactggttattagagaagtgcaaatcaaaaccacaatgacataccatctcatgccaggtagaatggcaatcattaaaaagtcaggaaacaacagatgctgaagaggatgtggagaaataggaatgttttacactgttggtgggagtctaaattagttcaaccattgtggaagacagtgtggcgattcctcaaggacctagaaccagaaataccatttgagccagcaatcccattactgggtatatacccaaaagattataaatcattctactataaagacacatgcacatgtatgtttattgcagcattgttcacaatagcaaagacttgaaaccamcccaaatccccttcagtgatagactggataaagaaaatgtggcacatagacaccatggaatactatgcagccataaaaaggatgagttcatgccctttgcagggacatggatgaagctggaaaccataattctcagcaaactaacacaggaacagaaaaccaaacaacgcatattctcactcctaagtgggagttaaaaaatgagaacacatggacacaaggaggggaatattacacactggggcctgtcagggggtgggggg

SEQ ID NO: 884715 - DNA, 622 bp, Homo sapiens
catatgaaaaaaagctcatcatcactggttattagagaagtgcaaatcaaaaccacaatgacataccatctcatgccaggtagaatggcaatcattaaaaagtcaggaaacaacagatgctgaagaggatgtggagaaataggaatgttttacactgttggtgggagtctaaattagttcaaccattgtggaagacagtgtggcgattcctcaaggacctagaaccagaaataccatttgagccagcaatcccattactgggtatatacccaaaagattataaatcattctactataaagacacatgcacatgtatgtttattgcagcattgttcacaatagcaaagacttgaaaccaacccaaatccccttcagtgatagactggataaagaaaatgtggcacatagacaccatggaatactatgcagccataaaaaggatgagttcatgccctttgcagggacayggatgaagctggaaaccataattctcagcaaactaacacaggaacagaaaaccaaacaacgcatattctcactcctaagtgggagttaaaaaatgagaacacatggacacaaggaggggaatattacacactggggcctgtcagggggtgggggg

SEQ ID NO: 884716 - DNA, 556 bp, Homo sapiens
tgaaattatctttaataatatattttatataacacaatgtatccaaaatgctatcatttcaacaggtaatcaatatacaaatattaatgatgtattttatattattttttaaattccaagtctttgaaatctggtgtgtatttaacttttgcaacacaactcaattggaatgctaaatttttgatagataygtgctatttatttagatttcataaaatttacagttgaaaaagtggattcatgtacccaaattgttttgagactatttaaaagtttctcaacaagtgaattgaatagcagtgtattagtccatttttatactgctatgaaaaaatacccaacactgggtaatttataaagaacatgaggtttaatggactcccagttccacaaagctggggaggcctcacaatcacaatcatggtggaaggtgaaggtggagcaaaggcacgttttatgtggtggcaggaaagagaacgtgtgcagggaaactacccattataaaaccatcagatcttgtaagatttattcattatcaccagaatagcatgggaaa

SEQ ID NO: 884717 - DNA, 652 bp, Homo sapiens
aagacagggatgccctctgtcaccactcctattcaacatagtgttggaagttctggccagggcaatcaggtagaagaaagaaataaagggtattcgattaggaaaagaggaagtcaaattgtccctgtttgcagatgacatgattgtgtatttagaaaaccccatcgtctcagcccaaaatctccttaagctgataagcaacttcaccaaagtctcaggatacaaaatcaacgtgcaaaaatcacaagcattcttatacaccaataacagacaaacagagagccaaatcatgagtgaactcccattcacaattgcttcaaagagaataaaatacctaggaatccaacttacaaggaatgtggaagacctcttcaaggagaactacaaatcactgctcaatgaaataaaagaggacacaaacaaatggaagaacattccatgctcatggttaggaagaaccgactttttattttaatgaaaagaataccaaatgtcagkgtctgcttgtatatgtacactgtcaaatatactttcccggagaactaggattgtgtcttactgatttctggatatggggttcccagtaccctgctgggtacaatatgtttattgtatcaatgactgtaaatggtaaatttttttctaatttttt

SEQ ID NO: 884718 - DNA, 658 bp, Homo sapiens
aatgtatttgtatatatcagtctatatcagggaacactagcgatcaggatgagtttcttggagacatttggttttgtgcagagtttctcagtggatagaagcagtgatttttagtttatttttctaggtcctagaaaaactaaaattttatggaaaaactccctgaatttcttttaaaacctctctgaaagggtactacagttatatcattctctcttaggtgcttgtaggtaacttgttttatgggaaaagttgtatttgggagcaagttcttgttttaagcaggctrttttcttaacctcagattaaaaaacaactttaaaagtaaacattatactacttatactattgatagtaatgctatattttgtttgaaaagctgaaaagttatacacttataaagtaactaaaaaactttattatagaaaatgttaaaaatacaagaagtggacaaaagagtaaaacaaggccctatgcatccatcttagtttcaacaatgataaactcgtggccaattttattttatctatttaaaccattttgagaaaaaatatcacttttctgctattcattctttctttcttcaattgtttaatggtctcatttaacagtagttttaaaaaaatgttcttattgagattatatagaatatttagga

SEQ ID NO: 884719 - DNA, 658 bp, Homo sapiens
aatgtatttgtatatatcagtctatatcagggaacactagcgatcaggatgagtttcttggagacatttggttttgtgcagagtttctcagtggatagaagcagtgatttttagtttatttttctaggtcctagaaaaactaaaattttatggaaaaactccctgaatttcttttaaaacctctctgaaagggtactacagttatatcattctctcttaggtgcttgtaggtaacttgttttatgggaaaagttgtatttgggagcaagttcttgttttaagcaggctgttttcttaacctcagattaaaaaacaactttaaaagtaaacattatactacttatactattgatagtaatgctatattttgtttgaaaagctgaaaagttatacacttataaagtaactaaaaaactttattatagaaaatgttaaaaatacaagaagtggacaaaagagtawaacaaggccctatgcatccatcttagtttcaacaatgataaactcgtggccaattttattttatctatttaaaccattttgagaaaaaatatcacttttctgctattcattctttctttcttcaattgtttaatggtctcatttaacagtagttttaaaaaaatgttcttattgagattatatagaatatttagga

SEQ ID NO: 884720 - DNA, 718 bp, Homo sapiens
gactgacaatctctagactttgaagggaaatcgaataattaggtaaatccactttttctatatctacaacctaaattttttcagctcatgtatcttctcccaaagtcagaaccattttcattagaaaatggaatttcaggctaggtgcggtggctcatgcctgtaatcccagcactttgggaggcagaggtgggcggatcacttggggtcaggagttcaagaccagtctggcaaacatggcgaaaccccatctctactgaaaatacaaaaattagcctggcrtggtagcaggtgcctgtaatcccagctacttgtgaggctgaggcaggagaatcgcctgggaggtggaggttgcagtgagacgagatcacgccactgcactcctgcgcgacagagtgagactccatctcaaaaaaagaaaatggaattacaaatcccagaagattggatttgccatctaaaagaagacaaagcaaagagtaatcaactttcccaacctagtctttcttcactgcacttggcctatagatgaccacctttgggtttagcttcatccctagaccatttagctgtggtaggtgtggttgcatcacttgacctacattgtgaggcaacttctgtgcaatcagttccagtggctgcttttcttatgagggaccttatgtgtggcaaaacttgggaaatcagagttgactataatatgtctcttcaccctttt

SEQ ID NO: 884721 - DNA, 582 bp, Homo sapiens
acctattgggacaaaatacacattactaaatgattcttcattaaagaaacatagtttacctaggctaggtgtggtggctcagacctgtaatcccagcactttgggaagctgaggcaggtggaccacttgagctcagaagttcaagaccagcctgggcaacatggtgaaacctcatctctactaaaaatagaaaaaattatccaggcatggtggcccatgcytttgtttccagctacttgggaggttgatgtgagaggattgcttgagcccaggaggtggaggttgtagtgagccaagattacgccattgcactccagcctgggtaatggagtgagatcccacctcaaaaaaaaaaaaaaaaaagaaaagaaaaagaaatatagtttaccaaaagaaatacttcacatggcaaactcctctcacacattaatatgtaattcagttaatagacattttactcacacatcgattttgtgaagcaggacagtttgagttaggtaggaaggtctggcttatcaacctgctgtacctactgacatgtctcccaaagtacttcctaactgcacattttgttgatcgtgt

SEQ ID NO: 884722 - DNA, 582 bp, Homo sapiens
acctattgggacaaaatacacattactaaatgattcttcattaaagaaacatagtttacctaggctaggtgtggtggctcagacctgtaatcccagcactttgggaagctgaggcaggtggaccacttgagctcagaagttcaagaccagcctgggcaacatggtgaaacctcatctctactaaaaatagaaaaaattatccaggcatggtggcccatgcctttgtttccagctacttgggaggttgatgtgagaggattgcttgagcccaggaggtggaggttgtagtgagccaagattacgccattgcactccagcctgggtaatggagtgagatcccacctcaaaaaaaaaaaaaaaaaaraaaagaaaaagaaatatagtttaccaaaagaaatacttcacatggcaaactcctctcacacattaatatgtaattcagttaatagacattttactcacacatcgattttgtgaagcaggacagtttgagttaggtaggaaggtctggcttatcaacctgctgtacctactgacatgtctcccaaagtacttcctaactgcacattttgttgatcgtgt

SEQ ID NO: 884723 - DNA, 668 bp, Homo sapiens
cagtgtctcttctatggtactgccttccttgtcagccaggctgatcttcctggacactttcttagccactaaaagggaatgagaattatcttggctcctcaactggaagtattccaggtagctttttgaatgaaatatatgtacttaagttgtgaatatatgcagcaagtatatctgtctatgaaaacttaatattgaggacaccaccaccaagtattatgtcayatatgagatgaatttctggttactgagtctataactgacttacggaataaagaaaccctgaatctaacttatttacatttgtaaataaacaaaagatggtaagtgtgtctgtctagcgctatcctttcagagagatgttttaaatgcttttgggtaagtagggaagtaaagactatttagattaattaaataataccatgcaagcattttttatgggtgcaaataaacacttctttttttattatactttaagttctagggtacaagtgcacaacgtgcaggtttgttacatatgtatacatgtgccatgttggtgtgctgcacccattaactcgtcatttacattaggtatttctcctaatgctatccctccctcctcccccaccccacgactggccctggtatgtgatgttccccttcctgtgtccaagtgttctcattgt

SEQ ID NO: 884724 - DNA, 635 bp, Homo sapiens
atgaacttggctccatttttatgacatgtttccttggcagcctcaatgtcagatggcaggacagtctttttgcctcccaggaacctcctcaaccacctttctgctaatattgcagaccagagttctcaaatcagaactatctagggagatttaaaaataaactgtttaagattctgatctggagtgtggcctggtcagccacagtttagaaccacggtcagccattatcyggatcctagagaataactgtatgggctggcgtgggagtcacatagggtctcctgcaaggaattggacatctggactgtgtcttagcattaaaaatactatgctgatggtgttgacttagaagccaaagaaggctgcaaaagacaaatggctgcatttctcccaacctcagagctttttgttatatttcatgattactgaaaatctttcattgaaatgtggagatgaaagaattaaatgtaaagtttcttgttgacacaatttaatacattttaatcttatttctcacattgttttggtactacagaaatgtttgtctcttcttagatatgctatgcttcctgttattaaataattaaaaagatgtcttggtcaatgattctctgtcttctgtcttgactctcagg

SEQ ID NO: 884725 - DNA, 635 bp, Homo sapiens
atgaacttggctccatttttatgacatgtttccttggcagcctcaatgtcagatggcaggacagtctttttgcctcccaggaacctcctcaaccacctttctgctaatattgcagaccagagttctcaaatcagaactatctagggagatttaaaaataaactgtttaagattctgatctggagtgtggcctggtcagccacagtttagaaccacggtcagccattatctggatcctagagaataactgtatgggctggcgtgggagtcacatagggtctcctgcaaggaattggacatctggactgtgtcttagcattaaaaatactaygctgatggtgttgacttagaagccaaagaaggctgcaaaagacaaatggctgcatttctcccaacctcagagctttttgttatatttcatgattactgaaaatctttcattgaaatgtggagatgaaagaattaaatgtaaagtttcttgttgacacaatttaatacattttaatcttatttctcacattgttttggtactacagaaatgtttgtctcttcttagatatgctatgcttcctgttattaaataattaaaaagatgtcttggtcaatgattctctgtcttctgtcttgactctcagg

SEQ ID NO: 884726 - DNA, 705 bp, Homo sapiens
ctgctgaacccttgaacaagttgttggcagggaattcaggtagagagtacatgtatgagggccatttgcgggatggttgggcactggagggtaagctctgttgctgctcctggcaggaagtttcctatgtcactccctgttaatgcagatggtacacagagggcttcatgttgaccatttgcaaccttatatgcaggcaaagatatgttttctytgcccacatcattctctgcatgggataaggtgcctcaagcaaagtcagaaagacattggttgttcaagctatggctatgagaagttcattggatttggatgagaaactgcaccccccaatttgtgagactttaaaaaaataactcatctctatacaaaattattgttttcttctaggcagaatatcttttagacctgatttgactttttggacacctagaatctgttgggagcaaaggtaaaggaagtgcccccaccaaacttgactcaattcttggcttttttttaggtttgtggagaaaggttggctagtcagacaaatttccggaatgttaggtcatgatgtaggattgctaagtacggcagctgttatggctgaattgtgtccacccgccaaattaatatgttgaagctttagagcttcaacctctgtacctcagaatgttactgtatttgaagataagtccttgaaagaggtgattaaattaaata

SEQ ID NO: 884727 - DNA, 606 bp, Homo sapiens
ttaccaagaaagtaacagacacaatttttcttaaataataattaagagttttgcagaagaaaaaccagggaaagaatataatctataagcaggtgtggcagatgtggttgttgcctactcaatagccatttcttttcctctttttcctcttcccatgataaagtctggaaatacccaataatttgccacattttcttgcagccaggwctgtccatgttaggcaattctggccaatgaaatataaggtcaagactgctgggttgaggtgaggggtgcttcttgaaaagagaaatagaaaaatgtccaagaagagccttctttccttccctctttctttggattctgctatgtgagtttatgatgtgaagctgaggcaaccaccttgtgaccatgagacaaagagcctgaggatgggaatgccaatctcctgaggatggcagaaagtcaggaagaagtaagccacttactatagccttttgtgaaaaatgaaatctgcttatcattaatccactgctggtgagagattcagttactaacaatcaaaggcagcttagctgattcagtgtggaaactgtatttttggtcattaaatttgacaaataagtt

SEQ ID NO: 884728 - DNA, 608 bp, Homo sapiens
ttaaagataacatgtcttgtttttaaattcaatctgataatctctgtcttttttggggtgttcagattccatcatttaattaagtcattattaagttggatttaaatataccaccttgttagttgttttctaatttcaccatcttttctttgttcatttttttcctgccttcttttttaatttcatttaatctccaatattggcttattgtttttttcctaacagtggttttcctatggtttataataggtattttaccttataacaatctactttcaaatagtatagtatataatatatagtgtactttccacagtatacttcatttcctctcctcctatgtgctgttgatatcatatattttacttctataaatgttataaggcccacaatacattgtttctattttttccttagtcaatcagcttttatttatttatttttaaatagagacagggtctcactatgttraccaggctgctcaaactcttgggctcaagtgatccacctgcctcccaaagtgctgggattaaaagcatgagccactactctcagctagataattaattaccttttagatgaataataataataaaaaaaaacagaag

SEQ ID NO: 884729 - DNA, 637 bp, Homo sapiens
tctcaggaaactatcacaaggacagaaaaccaaaaaactgcatgttctcactcataggtgggaattgaacaaggagatcacttggacacagggtggggaacatcacacaccagggcgtgttgtggggtgggttttgggggragggatagcattaggagaaatacctaatataaatgatgagttgatgggtgcagcaaacaaacatgtcacaggtatacatatatatcaaacctgcacgtagtgcacatgtaccctaggacttaaagtataataataataataaaaaagcctatttgtgtatcagtatagccaccactgctctcttttaattactatttgcatagaatatctattttcattctttcactttcaatctatttgtctttggagctaaactgagtcttgtagatagcatatagttgagtcatgtgtttttatccattctgccaatctctgccttttgattagagagtttaagctatttaactctctaaacctaaagtgacaactgaaaaggggaggcttttttgctattcattatctagcttctaaaaattcctgtttctgcattacagttttcttttgtgtttagttgactttttttggtagtgaaatgtttaaattcctttctcatttt

SEQ ID NO: 884730 - DNA, 614 bp, Homo sapiens
aaaattcctgtttctgcattacagttttcttttgtgtttagttgactttttttggtagtgaaatgtttaaattcctttctcatttttttgtgtgtattctatagctattttatttgtgattatcatggagattacatttataccctaaagttataacactaattggaatttatattaacttaacttccataacatacaaaaactgctcttttatagcactacccccaccccttttagttgttgatgttacagaattatatctttatacattgtgtgccccaaaacataaactaataattaatttaaatgcattattttattaaattatgtkccccaaaacataaactaataattaatttaaatgcattattttattaaattacgtagaaaacaaaatattttacagaccattgctacaataatattagcttttataattgcccaagtatttatctttattcaatctttatttttttatatagctttggttacttttagttactgtatagtaacctttttcagggaatgtctagggtaataaactccttcagcttttccttatatgggaatgtattaatctctccctcacttttgaaggatagttttgccaggtg

SEQ ID NO: 884731 - DNA, 615 bp, Homo sapiens
aaaataaaactacagcaagcattataactaatggtgaactattgatatctttccttctgagatcaggaaatcaggaatggggcaagagtgtctgctactattacttctttccaaaattatactggtgatattagccagtgcaacaaggcaagaaaaagaaacaaaacttataagaattgaaaagaaaaaactaaaactctcatttttacagatgagatagaaatttttttttaaagccaaagaatctacagatgaattactagaattaataaatgagtttggcaatgttgctggatacaagggcattatttaaaaatctatttatactatgtttcagacctatattgctaagtaacaaatcactccaaaactttgtggcttaaaataacaatartcatttattatctctcatggtttctgtgcattttggattcaagaagggctcatctgcacagttcagcctttttcatgtgggtacagtcagatagcagatggaacaggaacagcaggagctggcagagctggggactggctaggaatccctctttacttagtatcagggtctctgcatatgatttttctgtgtgggttagtttgggcttcttcaatgcatgg

SEQ ID NO: 884732 - DNA, 677 bp, Homo sapiens
tggggtggacacacccacacatggggggctctgtccgcagacaagaggctcgttgcacagggagccaggctttatatacataagggcaagcatttgcccaagtgatgcccgacacctatggggcagttgacctggaagggctcttggcgaccgtccccttggcgaccatccccttggcgactgtccccttagcgatcctctacacagagattcccagcctctttaaaccaaagtcacgaacattggttgttcttttggtatcttttgtttgagaaaatgcacactaatgaaaagctgttatggttttatttttgctttgaaatagatgtgtrttttattaaacacaatattagcatgcattagaaaaatagcttaacaggtatgaagaagactcattactatttaatgtaataaaggtgctttttgagcatagggatttgtggccccatggctcccaggatctgtggctccatgctgggaaccattggtctcctccttctttgcattacagaaggggaaactgagtcacagaggagtgtaactcacagattacacagcaagtaaggaacaaagatgaggcctgagcccaggtttgactcccagcaggacacttgtttggcttttttgcaagtctctgtcatggttcaggggtttagagcctgtaacatctttcttag

SEQ ID NO: 884733 - DNA, 677 bp, Homo sapiens
tggggtggacacacccacacatggggggctctgtccgcagacaagaggctcgttgcacagggagccaggctttatatacataagggcaagcatttgcccaagtgatgcccgacacctatggggcagttgacctggaagggctcttggcgaccgtccccttggcgaccatccccttggcgactgtccccttagcgatcctctacacagagattcccagcctctttaaaccaaagtcacgaacattggttgttcttttggtatcttttgtttgagaaaatgcacactaatgaaaagctgttatggttttatttttgctttgaaatagatgtgtattttattaawcacaatattagcatgcattagaaaaatagcttaacaggtatgaagaagactcattactatttaatgtaataaaggtgctttttgagcatagggatttgtggccccatggctcccaggatctgtggctccatgctgggaaccattggtctcctccttctttgcattacagaaggggaaactgagtcacagaggagtgtaactcacagattacacagcaagtaaggaacaaagatgaggcctgagcccaggtttgactcccagcaggacacttgtttggcttttttgcaagtctctgtcatggttcaggggtttagagcctgtaacatctttcttag

SEQ ID NO: 884734 - DNA, 631 bp, Homo sapiens
atcttaaatttatacaataaaatttattttttaaataaaacaaggctgctagtcacaaaataaaaacagtttaacaaattcatagcatgatgcaaagtgatttcctcaccttcagaagtatccctaattcttcagatgtagaggttatactctataaactcttatgtatgccaagtgttttattttaatatacaagtttaaaatattagttaagttaaaattctagactggaaaacattagttaacattgggtaataaagaagcagcaaaagtctgccaattttcatttcagtgaaaaaagaaaaaatgtcacccatatcaggtgaatggctcaggctagtgaacaagaatagmcaataatacagtttggacaacattggaagacccagtctctacaaataataaaaaatttagccaggcatggtgggtgcgcacctgtagtgtcagctacttgggaggctgaagtgggaggatcacttgagcctgggaaatcaaggctgcagtgaactatgattgtaccactacactccagtctgggtgacagagtgagattctgtctcaaaaaaaaaaaaaaaaaaaaaaaaaaaagaacagacaatagtatcattaatattaacaaaagcattgaatt

SEQ ID NO: 884735 - DNA, 564 bp, Homo sapiens
gtgctcaggaaagagcctccccacccccaaatccaaaggtggggttaaaaaaaaaagtctaagtcagtcatggcatcttcattatccttgctagtgagtaacttttagtctgagtttgagacataatttgaatcaatggtgtgtactacagcttttgagaatggttttctacctactaaaaagagacaaatgggaggaattcctctctttactggctgtcatcatgactgcatgtaatatcttgaactattgctattacagcaatatcaccactcaaacgaagataccacaaacaaactaakaatgacagaaccaaaagtttaaatactcctgtgttgcagaagatatcattaagccatggaattaacacataaataccaatttccagacttcctgttctatgagataacacacttatgattcatgctacttctggttgttttctgcaacatacaggccaaaggtatccaaactttctttcatcaaaatgtattaatgtaagtggtgaaatccaactcattcctgcctctgtttgactccagcatccatattatcattccgcca

SEQ ID NO: 884736 - DNA, 641 bp, Homo sapiens
ggagctactgaccatgacccaaacacctccatttggcccctcctccaacattaggaaccaaatttcaacatgaggtttggagaatcaaatattcaaacaacagcagggacttaaaaacatttcctactttttcactgagggggaaagcagtgacaaaggccttcattctggtgtttacrgtatatatgtggtcatcctatctctcatcactttcgtgggctatttggtgaaagaaatgggtgggactccttgagccctggcattaatgtaactacctattacccatgctgagttgatgcctcataacaagattaatacagacatggacaatatgcaagctgtgggagtagaaccttctctacgcaactcaaaaaaatgacatcctgatgcacaggtagagatgcccattcttctccttctgtggaaccaaagggggtctccctagatccagagtagaacactgtgactttaataaaagtaactggcaggggccaggcacagtggctcatgcctgtaatctcagcactttgggaggccgaggcaggaggactgcttgagcccaggagtttgagatccagcctgggcaacatagtgaaaccctgtctctacaaaaaatacgtttgtttgtttgcttgtttgtt

SEQ ID NO: 884737 - DNA, 641 bp, Homo sapiens
ggagctactgaccatgacccaaacacctccatttggcccctcctccaacattaggaaccaaatttcaacatgaggtttggagaatcaaatattcaaacaacagcagggacttaaaaacatttcctactttttcactgagggggaaagcagtgacaaaggccttcattctggtgtttacggtatatatgtggtcatcctatctctcatcactttcgtgggctatttggtgaaagaaatgggtgggactccttgagccctggcattaatgtaactacctattacccatgctgagttgatgcctcataacaagattaatacagacatggacaatatgcaagctgtgggagtagaaccttctctacgcaactcaaaaaaatgacatcctgatgcacaggtagagatgcccattcttctccttctgtggaaccaaagggggtctccctagatccagagtagaacactgtgactytaataaaagtaactggcaggggccaggcacagtggctcatgcctgtaatctcagcactttgggaggccgaggcaggaggactgcttgagcccaggagtttgagatccagcctgggcaacatagtgaaaccctgtctctacaaaaaatacgtttgtttgtttgcttgtttgtt

SEQ ID NO: 884738 - DNA, 693 bp, Homo sapiens
tagaggaaacttaagtgcatattactaagtgaaaggaacccatccaaaaaagctacaaattatatgactcccactatctgatatctggggaaatataaaacagtggagacaatcaaaacatcagtggatgctaagagtttgggatgaataagcagggcaaagattttaagggcagtgaaattactctgtatgatacaataatggtggatacatgtcattattcatttgtcaaaatccatagaaaataccataccaaaagtcaactttwatgtaaactacattctctgggtgattgataatgatgtgtcaacgtaggttcatcagttgtaacaaatgtaccattctgatgggggatactgatcatgggagaggctgcagatatgtgggggcaggggatatatggaacatctctgtaccttcctctcaattttgctgtgaatctaaacctgctctaaaaaataaaatctattttaaaaaatcactgtgagagaaataaaagaatcattttgttaattccgattttgaagaggataagacactatcaataagtaattttctgctaatgaatctctcaatataagtaaagccaagacttttaaaccaaatgctgaattactctggtactctaatggatctatattaacacaataaaaataagaaacaaaatagctatcttccaaaaacctggttact

SEQ ID NO: 884739 - DNA, 600 bp, Homo sapiens
atcaaaaaacaacttccacagaagattatagcaattcaaacttctaccagaaatgtatcagagtaaacaacagttccccatactctcaggagcactgggcctactgggaaaaaaaaaaaatctagtgggcaaaaaccaatatctcacttggtctgtatttccctgagcactggtaagaatgaaaatctttccatttttatttgcacatcctctttcataaattgcctgtttatgccctttggatattttctaattatgttgcctaatgtaaggagctctttaatagtatttatttaaacttataaacataatgtcatatataccttcacatccatattctcctgtttttcttttrtcttgttttgtgtgcttcaggccatatagaaattttaatcagtaagtggttaaatccaaatctttttggatataatactaattgggggggtgcaactgccattaagcaggccgaagtcagaggtgctagatgtcttccgctacacagatctatgctgtacagagaattccacacgacctgcatgagttctgaaagccccacttaacatgcatatacgtaaaaaatatatttataatatctcctta

SEQ ID NO: 884740 - DNA, 600 bp, Homo sapiens
atcaaaaaacaacttccacagaagattatagcaattcaaacttctaccagaaatgtatcagagtaaacaacagttccccatactctcaggagcactgggcctactgggaaaaaaaaaaaatctagtgggcaaaaaccaatatctcacttggtctgtatttccctgagcactggtaagaatgaaaatctttccatttttatttgcacatcctctttcataaattgcctgtttatgccctttggatattttctaattatgttgcctaatgtaaggagctctttaatagtatttatttaaacttataaacataatgtcatatataccttcacatccatattctcctgtttttcttttatcttgttttgtgtgcttcaggccayatagaaattttaatcagtaagtggttaaatccaaatctttttggatataatactaattgggggggtgcaactgccattaagcaggccgaagtcagaggtgctagatgtcttccgctacacagatctatgctgtacagagaattccacacgacctgcatgagttctgaaagccccacttaacatgcatatacgtaaaaaatatatttataatatctcctta

SEQ ID NO: 884741 - DNA, 600 bp, Homo sapiens
atcaaaaaacaacttccacagaagattatagcaattcaaacttctaccagaaatgtatcagagtaaacaacagttccccatactctcaggagcactgggcctactgggaaaaaaaaaaaatctagtgggcaaaaaccaatatctcacttggtctgtatttccctgagcactggtaagaatgaaaatctttccatttttatttgcacatcctctttcataaattgcctgtttatgccctttggatattttctaattatgttgcctaatgtaaggagctctttaatagtatttatttaaacttataaacataatgtcatatataccttcacatccatattctcctgtttttcttttatcttgttttgtgtgcttcaggccatayagaaattttaatcagtaagtggttaaatccaaatctttttggatataatactaattgggggggtgcaactgccattaagcaggccgaagtcagaggtgctagatgtcttccgctacacagatctatgctgtacagagaattccacacgacctgcatgagttctgaaagccccacttaacatgcatatacgtaaaaaatatatttataatatctcctta

SEQ ID NO: 884742 - DNA, 596 bp, Homo sapiens
gctatcagccagctgttgccagcacataatacactgccctctttcactcactctcttgcttaaaatggcaaaaacaaagcaactgttgatgtaacattaatcataaaatatgcaaaatactagtcttcaaaaagattttggatatctacaaaactcagttttgcattttaaaatggcctaccacctctgaactgctttttctgttgctgatttgcaaattaacttactaatcttttaactgtaagtttacagtttcatttggtttttttttatgtaaaccaggaattaaacactaaaatagactttcttttgtatttccaataaaactgctcactggcatacatcacatgataatattctgtctttyctctcactcatctccatgtttttccagagttagaagacaacttgaagcctccaataggaaatggtcagaagctgctctgaacatacataactctcaccccctactttacaaaaaactcttcatctatgtttctagaaaacttgctcctcaaataccattatcaactccaaacaaactcatgaggaaaaaattacaaaatcctcgcaacaacagaaaatagactaaacaa

SEQ ID NO: 884743 - DNA, 609 bp, Homo sapiens
agaaaatgctgttagtacattttttttttttttttgagacaggatcttgctctgtcacccaggctggagtgcagtggtaccatctcaggtcactgcaatctccacctcccaggttcaaagaattcttctgcctcagcctcctgagaagctgggactacaggtgtgcaccactgcgcctggctaatttttgcatttttggtagagacagggtctcaccatgttggccagactggtctcaaactcctggcctcaggtgatccacccacctcagcctcccagagtgctgggattacaggcgtgagccaccacacctggccagttttctagtattttgtcttgaattctgtatytctgcttattaatgggttgatatgtgatttttctttcttactgtcctagtatgcttttgctttaaagttctattagcctggtaaaataagtggttagtatttcttctttgtctattatctggaagtatttatataaattggaattacttgttccttgactgttttacagaactcaccactaaaatgtctgagtcttgggtgagaatgtatctgtgtgggtaaatttttatccttattcaacttatttaataattatagc

SEQ ID NO: 884744 - DNA, 612 bp, Homo sapiens
ccagcccagtgataaaagtctggtcgttcttccagccaacactcataggacctgaccctaatctctgcccacatttttctgttttgacccccatctaattttgacaacagcaaatgcttttatagcacctactacatgccagtacgccacatgagaaacccgcaataataaggtgccataattatccccgttttacagataaagaaactgaggtccagagaagttcggttctctgcccaaggttgcccaattggaagtggtgaaaccagaatttagacccaggaagttggttccatattcgtgctcgtgaccaccccagccctgaggtcaggatgtggacaacacccaattctaacaactaagacccacttgggccacatccccacccgtgatcccatgtgcccaacaaagaccacaaagatactgatcggcctcacytaggccacatccctgaaccccatcccagtcctgaccacatactcagccccgatcaatttcagaagtcacaacactgcctaaccaggcccccagttcagtggtttatcgggcctaatatcattttaataaatgttggtgcaacgtttaggatcagaaaatgccacctaaaaatcc

SEQ ID NO: 884745 - DNA, 578 bp, Homo sapiens
cctccaaatcagactcttagaacacaaagtgtctaagtagggcaggtcctggggatcctttagaaaaactgagtgcagggaagagaggggtgtgccagggctaccctgtgaaccagcagcattagcccctccaggagccaggctgatggccttccccagcatccgcccctcgagtcctgtgtggtttcgcgagtggggccccaagcgaaggcttcctagaagagaggatgttggcgcagagaagcctgggcttccgcgagatgcctcacctccctctygcccctgcaatcacatttactcaaaggatgtccaaaggtgcccgctctgagcagccccttcatgtccccaaaactgtgtcatcagctcccagcatggccgtaagaggcagcctgaggcgcagggcctcaaacccaagggcaacaaacaaacgtggctagagccagctcctactggctcactcagcttcaccgaaggcccagctcactcagccttatcccaaggcccaggagaggactgggggaagaacaaagggctcagaggaagaggaggtggtaaggagagaggaggatgagctgcag

SEQ ID NO: 884746 - DNA, 692 bp, Homo sapiens
gcagaaaatgaaagacatggacccaaatcttagtgaggtgacagggtctctctgtccatctccacagagatgaagggaagggactgggccagaaagcagggacaaatcggtttcttcccacataccaaccccagtcactgggtagtgccagctggaacactggtgaggaggattctggggccccacaggaagcctagagacagaatgctgtgattgattaggaatgtctgccacaggtgcaggagagggggtaacaagctcaccactggtttgtcattcctcatcccctgagcccccttctacgacaaggtctgcaatgttttcctctccttcagcctgtgggaagggcaggggcccaacgcttgaggcttggagaagttaaatttagcaaaggacaacatcccctctgcagcaccgtgcccagttcaatcacgcctgtgtcctttcatccagcctraccccagctgcatctcaggcctgagaccctgcaaatacggaaacgctgctcttgacagctcagagtccaagtgttccatttcctcctggaggcccgacatggggctctgattgctttgccaggaagaaacggacaaacagttgtgcatacacagatgtggtgggtacggaacatgtggctgtgggtttggggggagaaggggacagctgctggctggaaacagccaggggagggg

SEQ ID NO: 884747 - DNA, 522 bp, Homo sapiens
gagcccaccagtaccatctcagtcccttgcatgagaaggggagtagtgaacccgaactccaagaacagcaagcacttgccatatcatccattccccagtgacttccactagcaaagggagacttttaaaaagaaaaaaacccaggcaactccaaagtcatttgtaaaatgttatttactctcctcctaagtagaatgaccttcctaaactgtctggtttgggcttatcaaaaaaaaaaaaaaaatatatatatatatatatatatatgtatgtatttgcctccycaaaaacagggactttgaataagttttgtggccaggggaacaacactgagacgcaaactggaggcaaggatgtcaaatgcacccaatgagaatatctatccctctccctgccaatctcctctctcaccactcccaccacctcttctttccccaaatcataaagtgtcactcacaccttcaccctctgacatgacgattagagagtccaggtagtggggtcacatggagagaaccttga

SEQ ID NO: 884748 - DNA, 685 bp, Homo sapiens
gcaacacttgctaaagtttcttgctcagtggccctgcttctgtctgaactcagccaccaggcacagtttcttgttgtcctgggaacaacacagtcttttgttgtcctggggaaaccctgctcacctgtgctgctggtatccaggtgrgcaatgcctgctagagtttccagcctaggagtcccacttctgcctgaactcggctggtgagtgcagcttcccgttgtaccaggaggcacctggatgacagggtaggtgaccccacccatccccaccactggtagccaggcagacaaagcctgctagaacttctggcccagtggtccacttctgtgggaactcagccagcaggtgcagcctcctgttgccccaggaagcacctggactgcagccaggtgaccccaccctaccccccaccactggtagctaggtgggaaatgcctgctagaaatttcaagtccagtacttttgcttctgcctgaactctgcaagcaggtgcaatcccatgtcccctgggaagcactcaggcagcaagttatagctgaaccagcaagtatatggcctgtctgctaactgcagcccctgcctagaccggaacacccaacagaggaaacaggggcacaaagagagtaatcagaaagggttcctgcaagacccaggagtggactagaattgaagccagttgact

SEQ ID NO: 884749 - DNA, 666 bp, Homo sapiens
ttaacctgaatatgtttaatagaacattctattattaataatgtcagagaaaagagggaatactgtatataattttgactctaacagtgagtatatagaacatgtaaatttatgtatattaaattattttatgtttaagatccccaaacacttctttattgccaaagtcaatgagtaattttcagtctaatctgcttgagcactgtgatgtatacttgttatggtatcatttactggctcctctcttcaagaaaaaaactgcccagatgacttatagaactgtgagctaagtaaatgcttgttgtcataagccactaagtctggggcttatatgtcatacaacagcagttaatttcaagtttggggctatcccttgtgaataaaactggtatagacattcttgtatgatatggtttgactctgtgtccccacctgaatttcatgtcaaattgtaattcccaacgttgggggagggatctagtgggaggtgatckatcatgggggcagaattccccctttctcttctcatgagactgagggagttatcatgacatctgtttttttaaaagtatgtaatacttcctcctttaatctctctctactgccaccatgtgaggatgtgcttgcttctactttgccttccaccatgattgtaagtttcctgag

SEQ ID NO: 884750 - DNA, 572 bp, Homo sapiens
tgtacaatgtattcctcagaatgtatccccatcattaagtaatgtatgacatatattgtagataggatttaacatttaattttaaggtaaggaaagttcaaataaattgtgaaaatttttatctcaaagcatgaggtaacagatgatggtggaggcattcagcactcacattctccacaaagaaaaaccaaaatagcaagtatataatcacactatgaatagatcatctaatggataacactagaattcagcatagaagtgacaagaaatgcctgaggcacgaaaggagagggaagcaagatatccagcccattctagattgacyggagacctggagaggtttcctagtgcagtgaaagagtaagtgagagatccccagaggtccacattctcaccatggactcctgtaatcctagctttgagaaagcttctagaccctcatgggccttgagactagtatcaggagctgcccggagtccatacaatagtactgttccagaaagggtgcccatgctgcatcccacacacccaatgaaacccaagaaactgaagcatgacaccattttgagagc

SEQ ID NO: 884751 - DNA, 620 bp, Homo sapiens
gggagcatgctaagatttattgggcacctgttggctgacttctcgctcagtagctgtgagacttagggcaaatcattcactttctcttgccagtttcttcagttgtaacctggagtgatcatggttccttcctcacaggctggttgtgaggaggggataagctgatrtatgtcaagtgccgagaaccctatgtggcactgagctgagtagggatttgaataaatattaattattgctattaccggctgttacctcagcactttctaagtgacaggcccagtgctaggaactgtatatgtgataccatcccatgccattcctgtgccacctgtgtgggttgttgatatggtgtcagttacagcgatgaaaagtttaagttcagagagatgaagtgacctgtctgatatcacacagctggtgtgcaatggggaggagaccatctccttgaccgctagttgcttctaaaggccttcttccatgaagtgccacctcgacaggcatatggtatggccagagtgaatctaaactccagcaggacatttgggaaattatgtaatctgttcaacatgtatttgttgaacacctactatgtgccacataccataagccctgtgaaggta

SEQ ID NO: 884752 - DNA, 614 bp, Homo sapiens
gtggcatcagttttaatggctcctcttttacttctgattttgagtcttttctcttttttcttagtgtagataaaggtttttcaatttttatcttttcaagaactgaactcttagttttgttgactttattgttttttgattctctatttaaaaaaattttgctctaacaataaaggccatatacaactgatgtggtttgtctgtgtccccacccaaatctcatcttgaattgtagttaacataattcytacatattgtgggagggacccagtgggaggtaattgaatcactggggtggttacccccatgctgctattctcatgatagtgagtgagttcttatgacatctgatgattttataaggggcttcttcctctttgctgggcacgtctctttcttgccatcatgtgaagaaggatgtgtttgtttccctttctgccatgattgtaagtttcctgaggcctccccagccatgtggagctgtgagtcagttaaatctctctcctttatgcattacccagtctcagcagttctttgtagcagcatgagaacagactaatacaacaacaaacccacagttaacatcacataatgctgaaaaactgaaagctttt

SEQ ID NO: 884753 - DNA, 638 bp, Homo sapiens
tttctgcttcatagatgatgtttcttactgcattcccacatggcgaaaggggaaaaagggccaggcagttctctgaagccccttttacaagggcattaatcccattcatgagggtggagccctcatcacttcccaaaaaggtctacctctaatacccatcaccttggggtgtgagtttcagcatatgaattttggagggacacatacattcaaaccacagcagaggccattgcaggcagagkttgatgatggcagcttggtctaggtgttgggaagaaggcggtaaaatggggtcagtgacgtgatacattttgaaggaagaggcttgtggtttgctgatgtattggatgtggggaatgaggaacagaggaatccaggatgattccaaggcatttgcctgagtaactgaatgaacgatgttgcttctactgagaggagaaatactggcaggagggcagatttaagggagagaatcagttttggttgtagaaggggagaatggtaaagaaagagcaattagcagggaagcatatattgaacactatgttaaaattcatagtgctgcacttcactccgcctttctcttgggtagtggaggccatttgaacttccagggcttgattggcaactccccaaac

SEQ ID NO: 884754 - DNA, 647 bp, Homo sapiens
tggcaggaaactcttgtctctgtagggtcggccagtttcccccatgtttctactacaggagagcaaagcagaaaagtccccatccttggtaagtagagtccctcttggtcttgggtcccgccctggccatgcactttccttccttcagtctgaactgcccttgccccactcagtccccgggcttcaagcttcctgcagctgaagctgcacgatgagatcccaacagttggcactacctgagcctgccctgggcctgtttctctcttgaccctctgaacattctcttgggcatattcatccattccaaaaggttcagccagtctcacsacacctgccagtgactcccaaacccagaccagcagtctggtttctgtcctgagtcccgactggaatccagatgcctgctcagcacagacagctcagctcagtggtcaagcccgcccgccacctctgctgggtcacttctccccacgtacaccaggaatgcagtgcctacctgaactttccctgaaccccacatgcaattagtccccacatcccctcctaaccagctcttggggccatgcctcctcccagaccagggttaccacccattgcaggccccgtcctctcccttggattccatggtgcctcctacagtctccctg

SEQ ID NO: 884755 - DNA, 592 bp, Homo sapiens
aaactaacacaggaacagaaagcaaaatgctacatgctctcatttataagtgggagctgaatgctgagaacacatgaacacatagtgggaaacagtacccactgggacctcttggttgggggctggagggaaggagagtatcacaaagattagctaatgatcaaaacttgggaaaagtcctggagccaagatggccaaataggaacagctccagtctacagctcccagtatgagygatgcagaagatgaatgatttctgcatttccaactgaggtaccaggttcatcttactggggattgttggacagtgggtgcaggacagtgggtgtggtgcactgagtgtgagctgaagcagggtgaggcatcaactcacccaggaagtgcaaggggtcagggaattccctttcctagccaaggaaaggggtgacagatggcacctggaaaatcggatcactcccaccctaatactgcacttttccaatggtcttagtaaacagcaaacgagaagattgtatcccgtgcctggcctgcagggtcctatgcccacagagcctcgctcattgctagcccagcagtctgagatcaaactgca

SEQ ID NO: 884756 - DNA, 638 bp, Homo sapiens
caactgaggtaccaggttcatcttactggggattgttggacagtgggtgcaggacagtgggtgtggtgcactgagtgtgagctgaagcagggtgaggcatcaactcacccaggaagtgcaaggggtcagggaattccctttcctagccaaggaaaggggtgacagatggcacctggaaaatcggatcactcccaccctaatactgcacttttccaatggtcttagtaaacagcaaacgagaagattgtatcccgtgcctggcctgcagggtcctatgcccacagagcctcgctcattgctagcccagcagtctgagatcaaactgcaaggcagcggcgaggctgggggaggggcatctgccattgctgaggcttgagttggtaaacaaagyggccaggaagctccaactgggtggagcccaccacagctcaaggaggcctgtctgcctctgtagactccacctctgggggcagggcatagccaaacaaaaggcagcagaaacctctgcagacttaaatgtccctgtctgacagctttgaagagaatagtggttctccaagcacgcagcttgagatctgagaatggacagactgcctcctcaagtgggtccctgactcccaagtagcctaactgggagc

SEQ ID NO: 884757 - DNA, 638 bp, Homo sapiens
caactgaggtaccaggttcatcttactggggattgttggacagtgggtgcaggacagtgggtgtggtgcactgagtgtgagctgaagcagggtgaggcatcaactcacccaggaagtgcaaggggtcagggaattccctttcctagccaaggaaaggggtgacagatggcacctggaaaatcggatcactcccaccctaatactgcacttttccaatggtcttagtaaacagcaaacgagaagattgtatcccgtgcctggcctgcagggtcctatgcccacagagcctcgctcattgctagcccagcagtctgagatcaaactgcaaggcagcggcgaggctgggggaggggcatctgccattgctgaggcttgagttggtaaacaaagcggccaggaagctccaactgggtggagcccaccacagctcaaggaggcctgtctgcctctgtagactccacctctgggggcagggcatagccaaacaaaaggcarcagaaacctctgcagacttaaatgtccctgtctgacagctttgaagagaatagtggttctccaagcacgcagcttgagatctgagaatggacagactgcctcctcaagtgggtccctgactcccaagtagcctaactgggagc

SEQ ID NO: 884758 - DNA, 654 bp, Homo sapiens
ataaatttgtcaaaagtaatgaaacaacatcagtgtattattattaaataaactccacaattaattcaaatgttactagtttttcccatgtcctttttatgttccagtattccatccaagataccacattgcattgagttttcatgtgttcttagtctcctctgaactttgatagtttctcagattttcactgattttaatgaccttgtcagttctcatgtatactggtcagaatatcgtatatcctactatttgggtttctctgatatttttctcatgtttagatgggctttgcggagagaatattcaccacaaaatacataaaattagaacacaaatataatagtcaaaacacccttgagaaattataagactcatttcttcaaaaatyattaaacagtaaatctaaggaaatgttataaaatatttaaaacagactgctgtatattagaaccaatagtatgcacccttaagctgtaattaagggacaaatttatgattaattaactaatattcaaatccaaaaggtgaaaaaaaggaacaatacaaaatctaaaccaaatagaaagaaggaaataaaaataaaagacaaaagtaattaagtggcaaataaaaagtagagtggatcgttaagactaaacactatttttaaag

SEQ ID NO: 884759 - DNA, 569 bp, Homo sapiens
acaaaagaccctgcacagctaaagcaatcttgatcaagaaaaagctggaggcatcacatttcctgatttcaaattatattaccaagctataataatcaaaacaatatagtattggcaaaaatacagacacatagaccaacggaacagaataragaatccagaaataaatatacatacgtcgaaaagaaataatcactattttgaagagatatctgcactcccatggcatgcaacattattcaccatagctgatatatggaaacaagtttccattgacaacagatcaagaaaatgtggtcagattaacgagacagaaagttaacaagggtatccaggaattgaactcagctctgccccgagtggacctaatagacatctacagaactctccagcccaaatcaacagaatatacattcttttcagtaccacaccacaactattccaaaattgaccacatagttggaagtaaagcactcctcagcaaatgtaaaagaacagaaattataacaaactgtctctcagaccacagtgcaatcaaactagaactcaggattaagaagcacactcaa

SEQ ID NO: 884760 - DNA, 655 bp, Homo sapiens
atgtttcaaaccagaaattggtttaagaccattgcagtatcctattaggttgtgtttttagaatatgatgaacaaatggatcttcaaaatgaagttccaaaaatgacagttaaaaaaggaatacagactcattgaaggaaaaaacctacaaaagactctstgtgtgtgtgtgtgtgtgtgtgtgtatgtgtgtgtgtgtatgcatgtgtgggtgtgtgtgtgtgttgtaagtacattcaatatatatccatactgaatgaagtcattggtaaagtaaagcaaaattcccgttcttcagacttaattaggacatcattttgatggaggctaagttagcaaaaacacagctagaaactgggtacaaagggcaaattgattgtaaatcttggagattgtttgtatgactgggttgcatgactgaagcttaaaaagtaaaaagtgtcttacatagaattgcgagtgtgcttttggtcatggctagctataaagggaagaaatatgaaagtcattctcaaaatgtttggagatagaaactctgtgggggtaaatccaaggggtcagaatgcattcttatttattgtgtgagttttcaaattgtgaagaaatattatttctagaatgagttcaaagttgactcaaagtgataactaaaggc

SEQ ID NO: 884761 - DNA, 661 bp, Homo sapiens
gtagttgtacattatttattgtttttgagaagtgccaaacaacagcatagaatatgtgtataaaaatgttaacatatctagtaaaaataggttcaaaaataacatcctgtatgatgcattccttaccaatggtgaatcaaacatcagctttgttaatagacaactcatttttattatttttataaccaaaagcaattctttacaatatcctttgcccatgcttccttagtaggaagaaaaagagaaggaaaataatggctagtaagtggataatagcaagttagaggatcctttgcaatcctggctggctctgtcctgtgcgcctyctttccttatccttaaaggtttgtgaacttcttgtcaccagcagacaattgagattcaaacatatgtcagtgtcattctgaacgaaaaatggaagtgtgatccttaagaaaaatggctctgcatattatcatagcttcttagatttggaaaataaccctggtgtctggaaaaaattgagagaatcttactttcaggttaaatgccatatccctttcaactccaaatacattagtatttctaaagtaagaataaatgattctgagactccgttagtgaaaactaagtgtgatttcctgatccaacaaggctaacttacattgtactaacacagtga

SEQ ID NO: 884762 - DNA, 613 bp, Homo sapiens
gatcaaaaggcccactatgttacctccccacactgtctattttttagatatgttggggccagaccaaatgatcagctgcagaataccaaacaggattgtttgaaccaagaaaataagagtttgggggccatttgtgatttgcttcactggaatacgtttctatgggtcaakattggcatcaagaagctggaagactagtaaattgtcatggtgctgtggaagtaagaggatgtggcctgactacttgctgctacaaggagatatatgagggtgaaactcatgataactgtggcctttaaatggcaacatctctgttagtaaagggaatagttctactcactcagtttattttcaaggcctttgtaactagaggcagaattaaaacttaggactgaattctagtgctttaaatatttcaacaatcacattaaatcatatttaatcatattacccaactctgtaaataataacacaaattgtatttaaaacactgtagggcagtgtattagccttctccagaaaaatagaagtgataggatacgcatagatgtataataggatatttattatgggaattgacttacacaattatggaggctaagaagcatgctgg

SEQ ID NO: 884763 - DNA, 644 bp, Homo sapiens
ccaaagtagagcaaaaaaaggagcaatacctggacttttcccttcagtttctaccattcattctctatactgctcagatttctaacatgtatataatgtcattatcctgctcagtatccttcactatttcccaatcacctatgggcaaaatctaaattattttgcgtggtatatgtgctagttttctattgtcatataacaaattgccacagacataacactttaaaacaacacaaatttataatctcagcgttttcgtgggacagtycaggtacaggttaactgagtcctcttctctgggtctcaacaggctgaaattaaggtgtggcccagggctacaattctcacagaaggctcggggtcctcttccacactcattcaagttgttggaagtattcatcttcttgcatttgtaaggttgagggtcccattttattgctgtttgctggagaccatcctcagcatctagagaccacagctagttccttgccacatgcttcccaaaggcagttcacaacatggctatttgctatcttgctagccaggaggagtacatctctgactttttaatacccatttaagagctcatacagtatcatctccctttttatgaactctaagtcaattgattagtaacctaaaca

SEQ ID NO: 884764 - DNA, 661 bp, Homo sapiens
aggcaaaaatctattgataatgcgataaacttaggcatcaaccagaagatgctgactgtaaaacagaacaaaacaaaaactacaaacaaacagagattcaaaaaactattagaggtagtttcttaaattagacatttgaaactctggaattaaaattatttccttcttcttggggtttgcttatttttgttattgctgctggttctactgtttgtttagttactttcctggactaagtctgcaaattctgtactctgtcatgggtggccactgaagtctctgattggttagcttagttgtcagctaataattggatagagttttcaataaatgccttgagccatctgctacctgcccattagtyacttagtaactatgtcggttcttggttcaactgccataatatcatagtgcttatgttcaagtagtccttattttacttcgtaatgaccccaaagtgcaagaggagtgatactagcaattcagacatgtcaaagagaagccataaagtgcttcctttaagttaaatggtaaaaaatttttgactttataaggaaagaaaaaatatatatgctgaagttgctaagatgtacagtaagaatgaatcttctatccataaaattgtgaagaaaaaaataaatttatgctagttttgctattg

SEQ ID NO: 884765 - DNA, 610 bp, Homo sapiens
ccacttgatccagagctgacttcaagtcctgaatatccttgttaattttctgtctcgttgatctaatattgacagtggggtgttaaagtctcccactattattgtgtgagagtctaggtctctttgtaggtctctgagaacttgttttatgaatttgtgtgctcctgtattgagtgcatatatatttaagatagctcttcttgttgcgttgayccttttactattatgtaatgcccttctttgtattttttaatctttgctggtttaaagtgtgttttatcagagactaggattacaacccctgcttcttttttgctttccgtttgcttggtaaatcttcctccatccctttattttgagcctatgtgtgtctttgcacgtgagatgggtctcctgaatatagcacaccaatgggtcttgactctttatccaatttgccaggctgtgccttttaattggcacatttatcctgtttacatttaaggttaatactgttatgtgtgaatttgatcctgtcattatgatgttagctgcctactttgcccattagttgatgcagtttcttcatagtgttgatggtctttacattttggtttgtttttgcagtggc

SEQ ID NO: 884766 - DNA, 371 bp, Homo sapiens
tggaattccagtaaccaagaaaggaataggcagacaggtaggggtaaggtaggtgccaaagggagcatggaattgatttaaaattgtctgcagggggatgtaggaagtaagtttcttggtttccttagttttccttgcaatacctcaagaaaggcgttaggagccaccttatakgaagagaggtgaggaggtgacgcaggccctggaaaaggggtttgttgtcccagaggaaggagcagactcagtcatttagaggggctaagggtagagtagggaaaaaagataatttgagtagcccatagaaggtagcaatctgggaagacatggtacaactttcagccctaaccatgatctgtttcttcaatggtggg

SEQ ID NO: 884767 - DNA, 620 bp, Homo sapiens
ataaaacacatactggagtttgaagacggtagaaaaaaaaaagaatgtaaattatttcataatcatttaaaaattgataacatattgatcatattttgggtataccagttaaataaaatatattattaaaagtcatgtcacctgttcctttttacttcaaatgtggctaatagaaggtataaagttayacatgtggcttgcattagtttctactggacagagctggtctggatggaagattatttttttctttggtttgttttctcattccatttccccgccaccctccgttggtttggaagttaagctttctctgcttctgattttagtatagtagttgtagttctcaaagtgtggtccctggactagtagcatcagcagcatctgggaatttggtagaaatgaaaattctagaactgtaccccagatctcctggaacagaaactctgggggtggagcccagtggtctgcttcataacccaccagataattctgaggtattctcaagttctagaaccacggccttaatgattacccttgaaaagtcactatacctatttaccttaataaaacctagggttgttcaatatcctaatgccatcctaaatagtaagaattat

SEQ ID NO: 884768 - DNA, 570 bp, Homo sapiens
aattcaaatatatcaccctcatcgtctttcttcccacgccagacactgcactaagcacttacacccattctgtcccatttccacgtcaaagaggaaatggggctcagggagattcgctgttggcccgaagttgacagctagtgagggggcagagctggtacttgaacctggagcctatcctcttcaccactcacttgccacaaaggcgtggctttgtttcrcagccccccttcttgcttcccacactccaggtccctgtgcatctccacagggcagggaccggtgggaatccttacctaggtgacagtgaaaggctgctggtcgagcttttcctaaagtctacctctgagggtggctcactcatccccagctgattggggtggatagggttccagttactgacactgtgaaatagcctgacccttgacagccctccctcaaccccagcaggagagtccagccagccggagcagatagatcagctccccggagaagggcagggttcaaaatggaaggacaagaccagaggctgagtcacagccttggaaaatctagttacagggtcggggg

SEQ ID NO: 884769 - DNA, 570 bp, Homo sapiens
aattcaaatatatcaccctcatcgtctttcttcccacgccagacactgcactaagcacttacacccattctgtcccatttccacgtcaaagaggaaatggggctcagggagattcgctgttggcccgaagttgacagctagtgagggggcagagctggtacttgaacctggagcctatcctcttcaccactcacttgccacaaaggcgtggctttgtttcacagccccccttcttgcttcccacactccaggtccctrtgcatctccacagggcagggaccggtgggaatccttacctaggtgacagtgaaaggctgctggtcgagcttttcctaaagtctacctctgagggtggctcactcatccccagctgattggggtggatagggttccagttactgacactgtgaaatagcctgacccttgacagccctccctcaaccccagcaggagagtccagccagccggagcagatagatcagctccccggagaagggcagggttcaaaatggaaggacaagaccagaggctgagtcacagccttggaaaatctagttacagggtcggggg

SEQ ID NO: 884770 - DNA, 570 bp, Homo sapiens
aattcaaatatatcaccctcatcgtctttcttcccacgccagacactgcactaagcacttacacccattctgtcccatttccacgtcaaagaggaaatggggctcagggagattcgctgttggcccgaagttgacagctagtgagggggcagagctggtacttgaacctggagcctatcctcttcaccactcacttgccacaaaggcgtggctttgtttcacagccccccttcttgcttcccacactccaggtccctgtgcatctccacagggcagggaccggtgggaatccttacctaggtgacagtgaaaggctgctggtcgagcttttcctaaagtctacctctgagggtggctcactcatccccagctgattggggtggatagggttccagttactgacactgtgaaatagcctgacccttgacagccctccctcaaccccagcaggagartccagccagccggagcagatagatcagctccccggagaagggcagggttcaaaatggaaggacaagaccagaggctgagtcacagccttggaaaatctagttacagggtcggggg

SEQ ID NO: 884771 - DNA, 591 bp, Homo sapiens
cattctgtcccatttccacgtcaaagaggaaatggggctcagggagattcgctgttggcccgaagttgacagctagtgagggggcagagctggtacttgaacctggagcctatcctcttcaccactcacttgccacaaaggcgtggctttgtttcacagccccccttcttgcttcccacactccaggtccctgtgcatctccacagggcagggaccggtgggaatccttacctaggtgacagtgaaaggctgctggtcgagcttttcctaaagtctacctctgagggtggctcactcatccccagctgattggggtggatagggttccagttactgacactgtgaaatagcctgacccttgacagccctccctcaaccccagcaggagagtccagccagccggagcagatagatcagctcccyggagaagggcagggttcaaaatggaaggacaagaccagaggctgagtcacagccttggaaaatctagttacagggtcgggggagaggctggcggccgtcagtttgtaaatcggcagtcctccctgcaacctggacaaagccatttctcggaaaatccaattagaattc

SEQ ID NO: 884772 - DNA, 634 bp, Homo sapiens
gttacatactggaagtaattattgcttcagatgaaattgcttcagaccatttccaaaatgacttatgtaacattcctcacttcttttgattgaaaaaaaatcattgttttcaagggtgtataagaaaaatgtagcagaaaatctctccacatcagtttacctagtctagcatccacccagggttgaaattcaaattgtcttttgggtcattcagtctccactctagcaaacttatttttgagaagcygtaggagattttaactcatctcttccttgcttgcttcatttaaacaaaatttttgagacagggaatctccgtacccactcctggctactcagagccaccctggctgcagcttgtatcttgtgcatcccaaatccatcaaaatgactcagtatgtggtcctcataattggtgccaccatcggataactagtctttgctcagaaattaaaggttggtaacggctcattgtaatcaggcagcatattagaaagagctgtgtgtctggaatcagaaaatagtttcataatcttgcaccaccactagccaagttatcctggcaagttatttcaagcctttctgaacctccattttaacagtgtagctcaacgttattgagcacctatcatga

SEQ ID NO: 884773 - DNA, 641 bp, Homo sapiens
acctcaagcccttgcttaagggcctttttcagagagacccaatgcccagaaggctagatgcgtggggaggagccacatacgagaaactgcctccctgcttcgggtcagaacaagccccaggaagaaagtatttcaaacaacaaggtgcatctgccccaacmcatccagcctgcatgttggtgctgagaacagccttttatggggcttgcactgagccatgggcatgtctgaacacaacaaggaagaggccagagcagcaacagcacgcaaagggttgatgggcatttcttttaagacagagcagaaaactcttagatactttgcgtccttcctatttgactcagtctatgaaagccaggttagcttgctttcttcctccctaaatcctccatcctcatgaccaacaaagaaatagttgaatcattttccaggcacatcttggggaggatgtggggccattggaggctgtccttcctagataagtctttaggagtgagaacaaggagtcttaccctcctctgtccacccacccccatgaatgggcctggctccagccaggagttgtggtttttcctgagctcctcacctatctcttctggatttcacattggcaaacggggttgcaaagtgctcttcgtgct

SEQ ID NO: 884774 - DNA, 609 bp, Homo sapiens
ttgcatttctctaataaccagtgatgatgagcattttttcatgtgtctgttggctgcatagatgtcttcttttgagaagtgtctgttcatatctttgcacactttttgatggggttgtttgttttcttcttgtaaatttgtttaagttctttgtagattctggaaattagccctttgtcaaatgtgtagattgcaaaaattttctcccactctttaggttgtctgctcactctgatgatagtttcttttgctgtgyggaagctctttagtttaattagatcccatttgtctattttggcttttggcttttgttaccatcacttttggtgttttagtcatgaagtccttgcccatgcctatgtcctgaaaggtatcgcctaggttttcttctagggtttttatggttttaggtctaacatttaagtctttaatccatcttgaattaatttttgtataaggtataaggaagggatccaatttcagctttctacatatggctagccagttttcccaacaccatttattaaatagggaattctttccccatttcttgtttttgtcaggtttgtcaaagatcagatgattgtagatgtgtggtgttatttctga

SEQ ID NO: 884775 - DNA, 675 bp, Homo sapiens
atgagattatttccctccattctcatgtcattcaaatagatcagtaatggagagaacttcagaaaacaaaggatacacaaatctggtagtaacctaaggattgtgagagaccacacaaatttctcttttaggtacaatacgttgtgttttgctttcatctatttttttttttaaagaaaagatcttactctgaaatctgatgacctcagaagtctctgaattgctcaggttttatgtgtagcccttaggagtacacaccagggttagcaaagcacagggacttakttgccaaatgcccattaacggtaatggaaatcacacagctaagtctccatgcagcatgctgaatatttacctcctaatgttcttttaatgtatgctttcttgggtgaatatttaccgtagaatattaaatctgagattcctccttttatgggccatttgaagtgattgattttgtttgcaaattcccgtatctttgcccataatggctatctattgtaatggcctctgccaaatgttcttgtgttgaaataacagaagccatggatcgaccagctgtggcattgtattactgtggtcttaaaagctaggagggagctgatgacacagctgggagagaggaaaaaggcatgtaacataacgagtatgacttaggcatcaaacacaatcaga

SEQ ID NO: 884776 - DNA, 593 bp, Homo sapiens
tgggagaggtacattgtacattcatcaggtccaaaaggttcataataatgataaggtactgaagggtgattgggatccctgtaggaggaaattgagataactgattaaagcaaaaaaattttttttcctttgactgattgaggtaagatgttatctttaataagctgataaaaattgtattttctagttaaatgagtttgaacaaatggtttttctgattacacaataaggaagtggagaggttttgaggttgtgaaataaaatcagtgcccatcattttcatcaaagagattgaaaatgagctgcagaacrttcagtctcctcagatttagaccctacatattaataagtcacaacaatagtattgttttcactcttcttacagtctatttaccataagcagctgcagagatattaccaaaacaaaatatgtcattcccattccccactccactaagcttccagaggcttccagttatacagagagcatggctgctgggatgcattatgatgtggctccccttctaagtcttctcctaatccacccagccttgtggattcccagtatgttcccaccatactggcctttctgg

SEQ ID NO: 884777 - DNA, 601 bp, Homo sapiens
tctgtggtatccttctcagtaatgcataacctcaatctaagcacaggaaaacattagataaaccccaagtgaaggacattctatgaaatacgtgactagtcctcatcaaaagtgtcatgaaatgcagggaaagcctgaggaacggccatggatttagagactgaggacacctgataaataaatgcaaagggaacctggattcgttcttggaggacatraaggacattagtagagaaactggtaaaatctcaataatgcctgtagtttagctgagcattatactcatgttaatttcttacttttgataattggaccataggaatgcaaatccgcattaggggaagctggataaaagttatatgaactctcagtattatttttgcaacctttctgtaactctaaaattatttgaaacaaaaataaacatatttttaaataatacatatcataacaacaaagctttttagaagattcaaatggtggaaagctccttgagattctaatatgcagctaagtttgagacaactgattttgtaagtacctgctcagcttctgcgcttaactgatgtgatctcctttacatcctcatcagccctctgag

SEQ ID NO: 884778 - DNA, 601 bp, Homo sapiens
tctgtggtatccttctcagtaatgcataacctcaatctaagcacaggaaaacattagataaaccccaagtgaaggacattctatgaaatacgtgactagtcctcatcaaaagtgtcatgaaatgcagggaaagcctgaggaacggccatggatttagagactgaggacacctgataaataaatgcaaagggaacctggattcgttcttggaggacataaaggacattagtagagaaactggtaaaatctcaataatgcctgtagtttagctgagcattatactcatgttaatttcttacttttgataattggaccataggaatgcaaatccgcattaggggaagctggataaaagttatatgaactctcagtattatttttgcaacctttctgtaactctaaaattatttraaacaaaaataaacatatttttaaataatacatatcataacaacaaagctttttagaagattcaaatggtggaaagctccttgagattctaatatgcagctaagtttgagacaactgattttgtaagtacctgctcagcttctgcgcttaactgatgtgatctcctttacatcctcatcagccctctgag

SEQ ID NO: 884779 - DNA, 625 bp, Homo sapiens
actgcatacggttgaacctttagcataggattgtcatagtgatcattcactaaatgttaggtgctattaggattattggtcagtgcggagccttttgctcttgtccagggttcctatcacccatttagaagagaatgcaggggtccataaagtaattgtacaataagtactcacgatatcagcagtgaacacttagggtttataattgatgcagggcttatgaaatggaggttctaccattgcaaattctcataattcccccaacatctaattactcttacatgacaggcactgtgctaggcagtcagaatgcaaaaatggggcaaatagccttgaaagcttacactttagtgagggacagtggtcagtaaaggaggacaatacagtgtgatacagtataaggagwggaggctctgctgaagtcggagtaaggggctgtggagagcacagcaaagctgggggcacaaaggaaaactggccagtcagttaatatttactgagtgcttttcagccacaactgtgttaggcactgttctgattttttataaatataattccattaatccttcaaataatactctaagatagtatattatcactcccattttacaaatgagaatattga

SEQ ID NO: 884780 - DNA, 646 bp, Homo sapiens
atttctctccaatcttgccttgctttttctgttatatttcactaggcccaattcattctttgtgatgtagtaatgtgcaaaatattccctccgttccatcatcatctttctaaatcagcccatcttgtcatctgagacctcaattttccttggaaggaaatctgtctccttctacagattaattgattttcacttttctttatattctttaactgctcacatcctaagtgtaagaatgagtcatatttttcaaactactccagtttttcttgatttcctgagtgaataygattcctaaagtcagactattccatgcgtaggccttaaattacctttctatttggggggtttgtaataatttcactaatttttttaacctaaccgaagaagatgctttattatctttaaaatatggcttcccattcctcttagttccttccttaataaattctatcatgcttctaagggtgaaaccatagttttgttctctgaaatcccaagccatagttggagtttaatgtcatcaagaaagcagaccaaacttgagatcacattgagccttttgagcctgtggtgaagccacaagaagttaagtttgctgctttcacaattcagtctcgtggcactgagggcaacttgagacaat

SEQ ID NO: 884781 - DNA, 646 bp, Homo sapiens
atttctctccaatcttgccttgctttttctgttatatttcactaggcccaattcattctttgtgatgtagtaatgtgcaaaatattccctccgttccatcatcatctttctaaatcagcccatcttgtcatctgagacctcaattttccttggaaggaaatctgtctccttctacagattaattgattttcacttttctttatattctttaactgctcacatcctaagtgtaagaatgagtcatatttttcaaactactccagtttttcttgatttcctgagtgaatacgattcctaaagtcagactattccatgcrtaggccttaaattacctttctatttggggggtttgtaataatttcactaatttttttaacctaaccgaagaagatgctttattatctttaaaatatggcttcccattcctcttagttccttccttaataaattctatcatgcttctaagggtgaaaccatagttttgttctctgaaatcccaagccatagttggagtttaatgtcatcaagaaagcagaccaaacttgagatcacattgagccttttgagcctgtggtgaagccacaagaagttaagtttgctgctttcacaattcagtctcgtggcactgagggcaacttgagacaat

SEQ ID NO: 884782 - DNA, 693 bp, Homo sapiens
cagtaagactttaatgcctgaattaaagaaatacttctgcttagttttttctaaatattatcattattaaccaggatactgatattctgcttaccttatttttaaaatactgtcttgcataactcttcacttgtaaaacagtgcggcttccaattagctttgaaattttggtccatcttcggccaaatttagcctgtattattaaaatggraaaaaaaattgcttttgatgaatttacttaagaatagtccaagccactaccacattaaaaaaaaaaaaacttaaaaaaaaatacatctttattttctgaagcacacaataaagtcttctatatagactatgctcttaaaatcaaagcctacattcattcttttggaatctgaactactgaaaactgatggaaatgatttagaaactcctttttaaaaagaatagctatctaaatgaagatattgcctaactgaatgaattcatattgtaagttataatgttccatatctaaaataactttttaaaataaataagtgcctgaaaggggtacaggttacattttccatttatacgatcaactgaacatgttctgtgctaatttcaacactttttttaactcagattccctattttgcaatatccattatgtatctcacagcagagacttttactctatcagatatcacagtgaactgacctaaa

SEQ ID NO: 884783 - DNA, 693 bp, Homo sapiens
cagtaagactttaatgcctgaattaaagaaatacttctgcttagttttttctaaatattatcattattaaccaggatactgatattctgcttaccttatttttaaaatactgtcttgcataactcttcacttgtaaaacagtgcggcttccaattagctttgaaattttggtccatcttcggccaaatttagcctgtattattaaaatgggaaaaaaaattgcttttgatgaatttacttaagaatagtccaagccactaccacattaaaaaaaaaaaaacttaaaaaaaaatacatctttattttctgaagcacacaataaagtcttctatatagactatgctcttaaaatcaaagcctacattcattcttttggaatctgaactactgaaaactgatggaaatgatttagaaactcctttttaaaaagaatagctatctaaatgaagatattgcctaactgaatgaattcatattgtaagttataatgttccatatctaaaataactttttaaaataaataagtgcctgaaaggggtacasgttacattttccatttatacgatcaactgaacatgttctgtgctaatttcaacactttttttaactcagattccctattttgcaatatccattatgtatctcacagcagagacttttactctatcagatatcacagtgaactgacctaaa

SEQ ID NO: 884784 - DNA, 471 bp, Homo sapiens
ttagggattaggatttcaacatatgaattttggggacacatacatttagtccgctttagctatcatagcacccttaaaccttttcttctttaggctgcataagcccagttgctgcaaatattcccagcatgaaatcatatctgcaccatttcctcatgcagttccttcctctgaatgygctataaataatcaatgtttctcctagaatgtggtgccttactgaaccttgtatcatacaatttcacatattattacttcactgaatatctttttcctctattgtcattatctccttattcaaacttgctctaagccattaacttctacccaatcctcaagcatccataccccttgaattataacccctctccagtaaactaccaccacatgagatttctccattgtctgcctttggacagataatatttttgcttagccttgcttgactttagagttgagccttcctgttgg

SEQ ID NO: 884785 - DNA, 635 bp, Homo sapiens
ttggtaggttgtatgttttcaagaatttatccatatcctctagggtttccagcttgttagcatatagttgttcacactagtctctgatgatcttttgcatttcttgctatcagttgtaatttctgctttttcatttcaggttttatttatttgggccttctctctttttttcttggttagtcttgatagcagtttattaattttatactttaaaagaatgtcttgttttgttgattctttgtatctatttaagtctctgttttgtttacttctctgacatttattattttttcctcctattaagtttaggtttggtttgttcttgcttttctatttcctgtaggtacatcattggattgttttatttaaaatctttctgcttttttgatgtagacatttattgttataaactctccacttagcactgcttttgctgtcttcctgggttttagtatgttktgtttccgttttcatttgtttcaagatattttttgactgccttattaatttctttatttacccagtagttgttcagaagcacgttgtttatttttcatgcatttgtacagtttccaaacttccccttgttattgatttctagttttattctgttatgttctgaggagatacttggt

SEQ ID NO: 884786 - DNA, 635 bp, Homo sapiens
ttggtaggttgtatgttttcaagaatttatccatatcctctagggtttccagcttgttagcatatagttgttcacactagtctctgatgatcttttgcatttcttgctatcagttgtaatttctgctttttcatttcaggttttatttatttgggccttctctctttttttcttggttagtcttgatagcagtttattaattttatactttaaaagaatgtcttgttttgttgattctttgtatctatttaagtctctgttttgtttacttctctgacatttattattttttcctcctattaagtttaggtttggtttgttcttgcttttctatttcctgtaggtacatcattggattgttttatttaaaatctttctgcttttttgatgtagacatttattgttataaactctccacttagcactgcttttgctgtcttcctgggttttagtatgttgtgtttccrttttcatttgtttcaagatattttttgactgccttattaatttctttatttacccagtagttgttcagaagcacgttgtttatttttcatgcatttgtacagtttccaaacttccccttgttattgatttctagttttattctgttatgttctgaggagatacttggt

SEQ ID NO: 884787 - DNA, 614 bp, Homo sapiens
ttgtgtttccgttttcatttgtttcaagatattttttgactgccttattaatttctttatttacccagtagttgttcagaagcacgttgtttatttttcatgcatttgtacagtttccaaacttccccttgttattgatttctagttttattctgttatgttctgaggagatacttggtatgattttgaatttttaaaatttcttgatacttgttttttggcctagcatgtgatctattctggagaatatttcatgtgctgatgagaagaatgtattctgcagatgttagataaaatgttctataaaatggttctgttagaatgctcctaatgttagttttattttatctaaagtrcagcttcaatccattgtttctttgtttattttttgtctagataatctatctgttgctgagagtggagtgttgaagtgtctattattgtattagagtctgtctctccctttagatataatgatatttgcttcacatatctgggtgctccagtgctgggtgcctatacattaaaattgttatattttctttctgaattgatccctttatcattatgtaagatctttttgtgtctctttttactatttttgacttaaagtc

SEQ ID NO: 884788 - DNA, 663 bp, Homo sapiens
tattttagtctgagtagcacctccttcagaggcctcttttgtcttttctaaaaaatctttcctcagactggtagcattttttcatgctatactgcagttgtttgcttatgtttctccttccatcaagttatgaactctgtaagggaagggactgaatcattcatctctttattttcaatgcttaacatagaacttatgtcattatagatattataaattaattttacatttgacaaaaagacaatgtttaaaaataaattaatacatgccaacggcaaaaragataactagaagaaggaagaagggacatatattttctgatttatccagttttgagaacttgttcctcatttgatattaacgcaaagtcttaaggaaaccagatagtctgttcctccagatcctcaagagaaccagctgatgattatgacccataaacagacacaaaggtttcaagttctagtcaagtcatgggttctcagttcccagatgtttagatatgaaattaactattaaaatcattcgtatgcccatgtcttgctaatttgtagctggcatttttatatattttttgagagtgctgttactgagatttgtctttttttgcttgtttctttcttagtattgatagttccattctactgtgagttgttatagttcagc

SEQ ID NO: 884789 - DNA, 663 bp, Homo sapiens
tattttagtctgagtagcacctccttcagaggcctcttttgtcttttctaaaaaatctttcctcagactggtagcattttttcatgctatactgcagttgtttgcttatgtttctccttccatcaagttatgaactctgtaagggaagggactgaatcattcatctctttattttcaatgcttaacatagaacttatgtcattatagatattataaattaattttacatttgacaaaaagacaatgtttaaaaataaattaatacatgccaacggcaaaaaagataactagaagaaggaagaagggacatatattttctgatttatccagttttgagaacttgttcctcatttgatattaaygcaaagtcttaaggaaaccagatagtctgttcctccagatcctcaagagaaccagctgatgattatgacccataaacagacacaaaggtttcaagttctagtcaagtcatgggttctcagttcccagatgtttagatatgaaattaactattaaaatcattcgtatgcccatgtcttgctaatttgtagctggcatttttatatattttttgagagtgctgttactgagatttgtctttttttgcttgtttctttcttagtattgatagttccattctactgtgagttgttatagttcagc

SEQ ID NO: 884790 - DNA, 663 bp, Homo sapiens
tattttagtctgagtagcacctccttcagaggcctcttttgtcttttctaaaaaatctttcctcagactggtagcattttttcatgctatactgcagttgtttgcttatgtttctccttccatcaagttatgaactctgtaagggaagggactgaatcattcatctctttattttcaatgcttaacatagaacttatgtcattatagatattataaattaattttacatttgacaaaaagacaatgtttaaaaataaattaatacatgccaacggcaaaaaagataactagaagaaggaagaagggacatatattttctgatttatccagttttgagaacttgttcctcatttgatattaacgcaaagtcwtaaggaaaccagatagtctgttcctccagatcctcaagagaaccagctgatgattatgacccataaacagacacaaaggtttcaagttctagtcaagtcatgggttctcagttcccagatgtttagatatgaaattaactattaaaatcattcgtatgcccatgtcttgctaatttgtagctggcatttttatatattttttgagagtgctgttactgagatttgtctttttttgcttgtttctttcttagtattgatagttccattctactgtgagttgttatagttcagc

SEQ ID NO: 884791 - DNA, 663 bp, Homo sapiens
tattttagtctgagtagcacctccttcagaggcctcttttgtcttttctaaaaaatctttcctcagactggtagcattttttcatgctatactgcagttgtttgcttatgtttctccttccatcaagttatgaactctgtaagggaagggactgaatcattcatctctttattttcaatgcttaacatagaacttatgtcattatagatattataaattaattttacatttgacaaaaagacaatgtttaaaaataaattaatacatgccaacggcaaaaaagataactagaagaaggaagaagggacatatattttctgatttatccagttttgagaacttgttcctcatttgatattaacgcaaagtcttaaggaaaccagatagtctgttcctccagrtcctcaagagaaccagctgatgattatgacccataaacagacacaaaggtttcaagttctagtcaagtcatgggttctcagttcccagatgtttagatatgaaattaactattaaaatcattcgtatgcccatgtcttgctaatttgtagctggcatttttatatattttttgagagtgctgttactgagatttgtctttttttgcttgtttctttcttagtattgatagttccattctactgtgagttgttatagttcagc

SEQ ID NO: 884792 - DNA, 674 bp, Homo sapiens
attaacaccaacaaaaaggaccatgacagttctttactttttctttgaattgcaatcttttatgttccaaccacatagagatgggaaaagaagttttaggccttatggggaattttctgatgaaaagtttttagaggactttggtacagagctgcttaatgaagtgaaaaaagatttaggccgtttctgaaggcctgcagtgaaaacaaaagcgtcacagtgatttaaaagttgggggcattttagcagatttatataagggctgatactgtcccattattgcaggatgatctcattctaagtggactgaatggggtactgattctgttttggatcggtaggcctgtgtggtgagtggactctactgtgtgttcttcagagtgtaagggtctttatggaaatgatggtttaatttaaatgtgatagaataaatagaaaatagaaattgtcaaaagaggccatggaatgctggaaagcttttatacatatttataatgtcctctaatgcctaygtggcatgaagaaatagaactaggaggagtgagtgtactctgctatgtgctcttcagagtgtaggggtctttatggaaatgatgatttaatttaaatgtgacagaataagtagaaattgtcaaaagaggctgtggaatgctggaaagacttcatacatattt

SEQ ID NO: 884793 - DNA, 617 bp, Homo sapiens
tttaaaagttgggggcattttagcagatttatataagggctgatactgtcccattattgcaggatgatctcattctaagtggactgaatggggtactgattctgttttggatcggtaggcctgtgtggtgagtggactctactgtgtgttcttcagagtgtaagggtctttatggaaatgatggtttaatttaaatgtgatagaataaatagaaaatagaaattgtcaaaagaggccatggaatgctggaaagcttttatacatatttataatgtcctctaatgcctatgtggcatgaagaaatagaactaggaggagtgagtgtactctgctatgtgctcttcagagtgtaggggtctttatggaaatgatgatttaatttaaatgtgacagaataagtagaaattgtcaaaagaggctgtggaatgctggaaagmcttcatacatatttataatgtcgtctaatgcgtacatggcatgaagaaataaaaataggagaagtgagtagtggttactccaattgatttttgcttctaaatatcatttccatctatcttacctattcacatatattactactgctttactgtggaccagggattggcaaaccttttctg

SEQ ID NO: 884794 - DNA, 604 bp, Homo sapiens
tctcctctaaactactttgctgcaagtggggacacaatttcattccttaatttcccactgcataattgagcctgaactgcaatgtccatctcaggttactaaagatttatggatgggcaaagaagaatgaacagttagggcagattgcattttcytaagatggccacaccatcctacatgttcttcatgtgatgtgattgtattagttttttattgctgaataacaatttaccaaaaatttagtggtttcaataatacccatttattatctctcacagtttctgttgatcagaatctaggcatgccttagctgggttttctgcttcaggatctcaccaggtaataatcaaggcattacctggactacattctcatttggaggttttggatggaaagaagtcacttccaagcttgctcaggtttttccctctataactttcaactctaggcctgagcctgtcagttcctaaaagccacctagttacttgacatatgaacctatctacaggcagtttacatcaaagcaacttgtttcttgaaggccaggagaactttcctttccagtctatcaagatgagtcttatatggcatatcatcctggcag

SEQ ID NO: 884795 - DNA, 619 bp, Homo sapiens
caggatctcaccaggtaataatcaaggcattacctggactacattctcatttggaggttttggatggaaagaagtcacttccaagcttgctcaggtttttccctctataactttcaactctaggcctgagcctgtcagttcctaaaagccacctagttacttgacatatgaacctatctacaggcagtttacatcaaagcaacttgtttcttgaaggccaggagaactttcctttccagtctatcaagatgagtcttatatggcatatcatcctggcagtgacatcacatcatctttgctatataacatacaagtctgcttaggctgtcataacaaaataccatagattgagtgactttatgacagaaatttattttctcacagttctggaggccagaagtccaagatcagggtggcactatkgttggtttccggtaagggctctcttcctggctttcagactgctacatttttgcagtattatcattccttggacacacaaagagagaaagaaatagagatttccagtgttcttataagtacactaatctcataatgagtctccaacctcatgatctaatcatccccaatggacccgccttcaaataccatcacattg

SEQ ID NO: 884796 - DNA, 627 bp, Homo sapiens
gagctgtttcagcatgttagccaggattaatcagcccttcacaggaaatgttttcttattaaagaggaaatctcacctgttttggtcacttaccttgcaaacaaactttctttttcataggagaaaagcctggtgtgattccagggtttcattttccctgctttctttctttccacatgcttattttttgctcaattttcaatacgctactcacagtcatctcttcatttatkccttttctaatttctccagaggattagttgtttcctcttaagtttcacatgtttccatatgaggaaccaatctttattataatgcttaacacaatgtctaatacaattatctctttatgtgtttttttttaaataaaagtgaacctaaatattgaggactatgtctctttttctcacatttctatgcgtctagcataatagtatacattttctgaatgtttcttacatgaaaaaaattcctttggtgcaaaagactcttgcagattatttgcttcctaacacagaagttttcttctttacagtggatttccatgccctagtgtgattctttttgtttcagtgtggtttgaatttttctgtgtgcattgtcattttcttattcaaatataattaa

SEQ ID NO: 884797 - DNA, 648 bp, Homo sapiens
tcccatagattatccttctgatcaatatttcccacttagcattcttagtcgagcatagtctcagattgcataaaccaccctctaattgaaagttatacccttatgagagctacatttcttatagacctgacagcttagtattttgtgttaagattttttgttttcacttagtaatagaggctcgagtgtttttcatcagcttccaaagtacttacttttcaactggggactttcttatgagaagggacaaggactatctacttctttcgagttttttggagggtttgagtcacctgtgaactccagaaccaaaaataattttcaaaaatggaaaatattcagtttgttgtcacaycctttatttataggaataagttgccatcctaaaactgcaggtctgcaaggtctctttaacctttccacttcaacgaaaacatatcctgagtagcagtttctgaaaacagtatctgtgcaatgactactgtagaaaaaataattttggaagaagaaaggaagcaggatattatgcacaccctctgaattcctaaaacatcatttaaaaataggagttcttagccagaggaaccctgtctgcttagagagagtccttgcacgtgtagtagtcaactggtgtaaaaactagatttt

SEQ ID NO: 884798 - DNA, 604 bp, Homo sapiens
gtcatctcagacttaacatgttcaaaagggaatgtctaatcttcctctccaaatttgtttcaactacagttttctccatctcagttcagagtaatcctatcttttcagttgcttaggtaaaaaccttggagttatctttatctttctgttgtatcttatatctaatttgtctggaaatcctgattgctctaacttgaaaattatygagaatctgaccatttctccccttctggcacaagtaatcaaaatttctttcttagattactcaattgccttctaattagcttttatgattctatccttgcctcttccatttgtaatatggaagaaaggatattctcttaaaatacaagctaagtgatgtcattcctttgctcataatcctccactagccctcctctcattcagaataagaaccaaactctgcgatggctgctcagtcctataaggtcttgaccccatgctacctcttcaaggtcatgccctatttatctccattttgtccactcaactttagccacactgggctgctttctcttcctttaatatttcaggcatactgtctccagagatattccctagctcttccttatacgagcaaggc

SEQ ID NO: 884799 - DNA, 604 bp, Homo sapiens
gtcatctcagacttaacatgttcaaaagggaatgtctaatcttcctctccaaatttgtttcaactacagttttctccatctcagttcagagtaatcctatcttttcagttgcttaggtaaaaaccttggagttatctttatctttctgttgtatcttatatctaatttgtctggaaatcctgattgctctaacttgaaaattatcgagaatctgaccatttctccccttctggcacaagtaatcaaaatttctttcttagmttactcaattgccttctaattagcttttatgattctatccttgcctcttccatttgtaatatggaagaaaggatattctcttaaaatacaagctaagtgatgtcattcctttgctcataatcctccactagccctcctctcattcagaataagaaccaaactctgcgatggctgctcagtcctataaggtcttgaccccatgctacctcttcaaggtcatgccctatttatctccattttgtccactcaactttagccacactgggctgctttctcttcctttaatatttcaggcatactgtctccagagatattccctagctcttccttatacgagcaaggc

SEQ ID NO: 884800 - DNA, 498 bp, Homo sapiens
tccaaatgaataattcatcaaacctgctccctcccaggtctcaagggctctagtgactgccctcttgccagcctaagtgactttctaagtgtgaaaagtgggaagaggactctccactcacctgttattccagcccactaggatctaggattttttatttttatttttattttgaaatagggtctcattctgtcatccgggctggagtacagtggcataatatttgctcactatagccttgatctcctagrctcatgtgatcctctcaactcagcctccccagtagctgagattacaggcatgtaccaccatgcctggccaaattttgtgttttttgtagagatggggtttcaccattttgcccaggctggtctcaaatccctgggctcaagagatccaccctcctgggcctctctcagtgctcggcttatgggggtgagccactgtgcctaatctccaactaagattttttttttttgcgggggggacagagtcttg

SEQ ID NO: 884801 - DNA, 571 bp, Homo sapiens
gccgactgacacctcacacggccgagtgcccctctgagacaaaggcttccagaggaatgatcaggcagcaacatttgctgttctgcaatattcgctgttctgcagcctccgctggtgatacccaggcaaacagggcctggagyggacctccagcaaactccaacagacctgcagctgagggtcctgactgttagaaggaaaactaacaaacagaaaggatatccacaccaaaaccccatctgtacgtcaccatcatcaaagaccaaaagtagataaaaccacaaagatggggagaaaccagagcagaaaagctgaaaattctaaaaatcagagtgcctcttctcttccaaaggaatgcagctccttgccagcaacaaaacaaggctggacggacaatgactttgatgagttgagagaagaaggcttcagacgatcaaacttctctgagctaaaggaagatgttcgaacccatcgcaaagaagctaaaaaccttgaaaaaatattagacaaatggctaactagaataaccagtgtagaaaagtccttaaatgaccagtggagctgaaaacca

SEQ ID NO: 884802 - DNA, 616 bp, Homo sapiens
ctgcagttcctgacaactagaattccactctctgcttctctgagtttattttagatttgtcatataagtaatatcatgtggaatttgtctttttgtgcctgccttagcgtaatgtactctagattcacccatgttgttgcagatggcaggatttccattttaagactgaataatatttcattgtatgtgtacaccacattttccttgtctattcgtccattgatggatatttaggttgcctccatatcttagctattgtgaagaatgctgcagtgaaaatgggagtgctgctrtctctttgagatcctggtttcagttcctctggatatacaccctgaagtgggattgctggatcatatgaacattctatttttaatttgttgaggaaccatactgttttccacagtggctgtaccagtttacatttccaccaacagcatacaaggggattcccttttctccacattctcgccaacacttgttttcttttggtttttttgaaaataaccatcctacctggaatgaggtgctatctcattatgattttgatttgcatttccctgatgactggtgatgttgggtgctttagcaggagttttaatagtataattaattg

SEQ ID NO: 884803 - DNA, 628 bp, Homo sapiens
tgtattatctttttgacatgctgttggattctgttaactagtactgtgttgagaatttttgcatctatgttcatcatggatattgtgctttagttttcttttttggttatgtcttttcctggttttggtattaatgctggcttcatagaatgaattagggagggttccttctttttctgtcttgtggaatagtgtcaaaagaattggtatcaattttcctttgaatgtctagtagaawtccactgtgaatctgtctggtcctggactttttttttgttggtaatttttctagttaccatttcaatcttgctgcttgttattggtctgttcaaggtatctaattctttctgatttaagctaggggagttgtatttttccagagatttagccatctcttctaggttttttagtttatgtgagggaaggtgttcatagtaccctcggaggatctttggtatgtcagttgtaatatctcttgcaattcttagtgaggttatttggattttctctcttcttttcttggttaatcttgctaatggtctatcagttttatttatcttagcaccagctttttgtttcatttatcttttgtatttttttggtttcaatttcatttagttctgctctg

SEQ ID NO: 884804 - DNA, 625 bp, Homo sapiens
gtggtctgacagagtacttgataaaatttcaattttcttaaatttactgagacttgttttgtggcttttactgagacttgttttgtcatatggtctatcttggagaatgttccatgtgctgatgaatacagtgcatattctgcagttgttaggtagaatgttctgtaaatatctaagtccattagttctggggtatagtttaagttcattggttcgtgttgactttctatcttgatgacctgtctagtgctgtgaatggagtactgaagtcccccactattattgtgttgctgtctatcttatgtcttaggtctrgtagtaattgttttatgaatttgggagctccagtgttaggtgcatatatatttaggattgtgatattttcctgttggactagttcttttatcattacataaggtccctctttgtcttttttaactgttgttgctttaaagtttgttttgtctgatataagaatagctattcctgctcatttttttgtgtccattttcacggactatcttttttccactcctttaccttaagtttatttgagtccttatttgtcaggtgagtctcttgaagacagcagatattaattagtgagttcttatcaattttgcca

SEQ ID NO: 884805 - DNA, 625 bp, Homo sapiens
gtggtctgacagagtacttgataaaatttcaattttcttaaatttactgagacttgttttgtggcttttactgagacttgttttgtcatatggtctatcttggagaatgttccatgtgctgatgaatacagtgcatattctgcagttgttaggtagaatgttctgtaaatatctaagtccattagttctggggtatagtttaagttcattggttcgtgttgactttctatcttgatgacctgtctagtgctgtgaatggagtactgaagtcccccactattattgtgttgctgtctatcttatgtcttaggtctggtagtaattrttttatgaatttgggagctccagtgttaggtgcatatatatttaggattgtgatattttcctgttggactagttcttttatcattacataaggtccctctttgtcttttttaactgttgttgctttaaagtttgttttgtctgatataagaatagctattcctgctcatttttttgtgtccattttcacggactatcttttttccactcctttaccttaagtttatttgagtccttatttgtcaggtgagtctcttgaagacagcagatattaattagtgagttcttatcaattttgcca

SEQ ID NO: 884806 - DNA, 625 bp, Homo sapiens
gtggtctgacagagtacttgataaaatttcaattttcttaaatttactgagacttgttttgtggcttttactgagacttgttttgtcatatggtctatcttggagaatgttccatgtgctgatgaatacagtgcatattctgcagttgttaggtagaatgttctgtaaatatctaagtccattagttctggggtatagtttaagttcattggttcgtgttgactttctatcttgatgacctgtctagtgctgtgaatggagtactgaagtcccccactattattgtgttgctgtctatcttatgtcttaggtctggtagtaattgttttatgaatttgggagctccagtgytaggtgcatatatatttaggattgtgatattttcctgttggactagttcttttatcattacataaggtccctctttgtcttttttaactgttgttgctttaaagtttgttttgtctgatataagaatagctattcctgctcatttttttgtgtccattttcacggactatcttttttccactcctttaccttaagtttatttgagtccttatttgtcaggtgagtctcttgaagacagcagatattaattagtgagttcttatcaattttgcca

SEQ ID NO: 884807 - DNA, 608 bp, Homo sapiens
gatccattgctggtgagctactgcgatcttttggggatgtcaaaaaacctcattttgtcatactaccagaattgtttttctggttccttctcatttgggtagactatgtcagagggaagatctggaactcaagggctgctgttcagattcttttgtcctatgggggtgatcccttgatgtggtgctctcccctttcccctagggatggggcttcctgagcaccaaactgcagtgattgctatttctgttctggatctagccacccagcagagctactggggtggggagtgtctgccatgagtcctgtgatgtgatccatcttcaggtctctcagccatggatactagcacctactctcgtggaggtggcwggggagtgaagtatgctctgagggtccttggttgtatttttgtttagtatgctggttttgtgttggttggcctccagctaggaggtggcacattcaagagcccatcagttccgtttgtataggaaggatacaactttgccttaggcttaggcagtgggcagggccatagagctatcaagaaattatgagctttgtgtttggctaccagcgcataaagagaaagaccatcaggtggggg

SEQ ID NO: 884808 - DNA, 624 bp, Homo sapiens
ccttctacaaatggaagagtagacattttttggaaagaattccacccactcctcttcttactagcatggaaatgaaaatcttgctctctttttatcgcacctcactcttgttattatggcttctttctacaagtggccagcagccagaccttttgccagttacagtctcttcctttctgattaacatgtgaaaggaaaataagtyttgggacccccaaatcactaagccaaaaggaaaagtcaagctgggaactgtgtcaggcaaatctttcctccctttttattcctaaataagataaatactgagttttttttttttttaaagctacatacatccctcacaatttgcccacaaggaaattccttgtgggcctccagatgcttacccttaaaaagttacgttgaatttcacaacggcagtgtaaattgacagcttattttcataggtgcaggacaaaggaatgacagaactcaatgtcatccctctgttcacctgagacaaatatgcatctgattgcttcctctgctttattgtttatgaaaaaaatgcatattctctaagccagactaaggcataagtgactattcttgtacctccctcatatgtaaattgtgtattcagtg

SEQ ID NO: 884809 - DNA, 619 bp, Homo sapiens
aaagaagagagccacaaaatgtgtactgttcaatgttgtgtgcacatctagcatgaaacatcttttgcatcagtgaccaatctgagtacttacatcttaactctaaggcacacactaaaatacataatgcctggttgttcctagatacttacttggtataaaatttaattttttctaaaaatgatcttatatggtagcttttttttttgagacggagtttcgctcttgttgcccaggctggagggcaatggcatgacctcagctcactgcaacctccatctcccgggttcaagcaattctcctgcttcagcctccagagtagctgggatcacaggcgcccatcaccatgcccagctaattttttgtatttttagtagagacagggtttcmccatgttggccaggctggtcttgaactcctgacctcaggtgatccacctgcctctgcctcccaaagttctgggattacaggcgtgagccaccacgcccggtcatatgtagctctttactgtctttacagcatgatagctgcttaatacatattcaatattcattgaattataacattcactgaattgcaatattttttctcattgttcactctgttttccgatttttca

SEQ ID NO: 884810 - DNA, 678 bp, Homo sapiens
ttttctattaacttttctcatagaatataataattttaagacattgctatgcatattccttgtgctacaaactgctctagtctcccaattctgtaaaagtaatacaattttcacttgacagtcacaatcaattatacagtcatcagattaaccaycttctttacctattgattcactggtataataattttaaactggttaagtgaagtcttaaattttagtttaatggaatcattgctgtggccctggtgcaagcattgcccttttgggaataagttctatgaaccggcaaggcccaaatttgaagggacaaaagccaaagttttgctcatggattattagagttaataatgactgaaaatattctctttttgtcttttgagtttcagacttgtacatcttttctaggaaaaaatagtaaaatatattaatttctaatatttagcatatatcttggatcatactacccagcctttcaatgtgttgtcatctagatgttgtaataactaagtcttcaaaatactttccaaccattctatcaggcaacctgcttcagagttaggggaaatgtggaaggaccagtaaataaaatgcacattactgagcccgtgtgtgaccttcatttcaactgccatgccattttgtcatgagacctttaagaacagaggtgtctgagca

SEQ ID NO: 884811 - DNA, 628 bp, Homo sapiens
tgttatataggtaaacttgtgtcatgcaggtttgttatacaaattatttcatcacccaggtattaagcctcgtacccattacttatttttcctgatcctcacccacctcccaacctctaccctctgagggtccccmgtgtgcgttgttcccctctatgtgtctgtgtgttctcataatttagctcccatttataagcaagaacatgcagtatttcgttttctgttgctgtgttaattcgttaaggataatggcctctagcgccatccatgtccttgaaaaggacatgatctcattctttttgtggctgcatagtattccattcaacagacattattaagaaagggagaaggcaacccgcagaatgggaaaatatttgcaaatcatatatctgatctgaaagttttatctatattaaatactattacaactcaataaagtaaataaaaaagtcaaaaatctcatgaaaaatgggtaaaagatcaaaatagaaatttccccgtggaagatatatgaaagccaataagcacttgcaagtatttcatgtcattaatcataagggaactgcaaatccaaaccacagtggaatagctctttccgcccattagaatgacatgtacattggagacg

SEQ ID NO: 884812 - DNA, 628 bp, Homo sapiens
tgttatataggtaaacttgtgtcatgcaggtttgttatacaaattatttcatcacccaggtattaagcctcgtacccattacttatttttcctgatcctcacccacctcccaacctctaccctctgagggtccccagtgtgcgttgttcccctctatgtgtctgtgtgttctcataatttagctcccatttataagcaagaacatgcagtatttcgttttctgttgctgtgttaattcgttaaggataatggcctctagcgccatccatgtccttgaaaaggacatgatctcattctttttgtggctgcatagtattccattcaacagacattattaagaaagggagaaggcaacccgcagaatgggaaaatatttgcaaatcatatatctgatctgaaagttttatctatattaaatactattacaactcaataaagtaaataaraaagtcaaaaatctcatgaaaaatgggtaaaagatcaaaatagaaatttccccgtggaagatatatgaaagccaataagcacttgcaagtatttcatgtcattaatcataagggaactgcaaatccaaaccacagtggaatagctctttccgcccattagaatgacatgtacattggagacg

SEQ ID NO: 884813 - DNA, 637 bp, Homo sapiens
cagttgagtggtcagaagatcacagtgatacataaaataaatacaaacctagtaactacaaatacagaaaagtacagtttggaattattccctcaaacactaaagtgacattcttattgatgatgcaattttattttggtgaaatttcaaacaacaaagtatgctcttttttaaatttaccttatagttgttttctggaaaatttaaattaaaacagtacaaattattttgtttataagtaaaagataatttggttcttggtccaaataatacagagtctcctcactcgactttgcatgaataactgacargagttcaaaagaggtcaaaaggtcttgcaggggctgaaaagtttttcttcatgttatatgatgaacttatgcactgcaggacatctggtaccccagccatcccccagtgaaatgtgtgcggttactcccaatacacttttacaaccaaaaaatccatatacatttctaaagcatcacttgatgtggctccactcctcataataacatcagttatatggtatgctatagattagatacaatatggtatatgagtaaacatacagaggtagtcactaccatcttattaggaatagaactgagaccttaaagtagaatcaaaagagagg

SEQ ID NO: 884814 - DNA, 609 bp, Homo sapiens
ttgttttctccttctttcctgggttcctgtcaccatgatgtttgcaagctcaggctagcttgttgtagccacatggagcagaatgaaatcatcccgccctagaatgggtgcatccatagaatctgtgagaaggcaaatccttaaaatctttaaagggccttttttctgacctcatttctggtatcaaaatctgtaatagttatttcttgctgcataataaattgccctaaaatgtaagggcttagaaaataacaaacattcagaaatctgggtggatcttagcagggtggttctgctttggggtctctcargaagtcgaagtcaagatgttggctgaagctgcagtcagctgaaggctgcctggggctgagtatctacttccaggagagcttgctttcaggactgacattaggagacctcaggtccttgctggctgttagcagaggcctccattccataccacttggatctctctataggatggcttgtgcatcgagtggcttcacaacatgaccactggctccccatagagcaagttatccaacaaagcaactcagaagctataatgtcttttatgacctagtcactaaagtcacacaccactatttg

SEQ ID NO: 884815 - DNA, 609 bp, Homo sapiens
ttgttttctccttctttcctgggttcctgtcaccatgatgtttgcaagctcaggctagcttgttgtagccacatggagcagaatgaaatcatcccgccctagaatgggtgcatccatagaatctgtgagaaggcaaatccttaaaatctttaaagggccttttttctgacctcatttctggtatcaaaatctgtaatagttatttcttgctgcataataaattgccctaaaatgtaagggcttagaaaataacaaacattcagaaatctgggtggatcttagcagggtggttctgctttggggtctctcaggaagtcgaagtcaagatgttggctgaagctgcagtcagctgaaggctgcctggggctgagtatctacttccaggagagcttgctytcaggactgacattaggagacctcaggtccttgctggctgttagcagaggcctccattccataccacttggatctctctataggatggcttgtgcatcgagtggcttcacaacatgaccactggctccccatagagcaagttatccaacaaagcaactcagaagctataatgtcttttatgacctagtcactaaagtcacacaccactatttg

SEQ ID NO: 884816 - DNA, 615 bp, Homo sapiens
ttgtttttatttgcttggtttttgtttgggaggagttgtattaatcaagactttcattttagaaatggatatttttaattgtcaacttagagatccaaacggagctgtgagaaggcagctaaacatacatgcctggaactcaggtactggtggaagacatacatttagaagtcattatatatcctgccccaaaacttagtggcatgaacagtaatcattttattctgctcccagatttgagggattcatattggacagggtatggtgagtacagaccctccatgttccctgatgtctagggcttcagctgggaataacttgaatggctgaggctggaacagctgaacctggaggatccacttccaagatggcttccccyctcccgtgcctcttccctgggctgaaggcctgactcagctggaaatgttgaccaggatgccaatgtgaagtactagggtagcccatctcttataggactatgtagccctccaagagcaagtgttcccagtgaccaaggtcatggcctttgatgacctagccttaaaagtcacacagcgtcacttccactgggaactgtgagccacctaagttcaagggagtagacattgactctac

SEQ ID NO: 884817 - DNA, 519 bp, Homo sapiens
atgacctagccttaaaagtcacacagcgtcacttccactgggaactgtgagccacctaagttcaagggagtagacattgactctaccttgtacaggatggagtagcaaagaatttaggatcatgcttaaagctaccgcatcttactcatcatctccctcactagaaattaagctctgtgacacagggacttctgtatcccatgtattagtcacagatctctagagaaatagaaccaagaggatatatagagaaatatataaatggagatttatagtacggtagagtagctcacacctgctagtaatttcagcactttgggaagctgaggcaggaggatcccatgagttcaggagttcaagatcagcttgggcaatawagcaagacagtgcctctagaaaaaaaaaaaaattaaaaaatagctgggtgtcatggtacatgccagctacttgggagactgagtggggagaaagacttgagtccaggagtttgaggctacagtgagctatgacggtgccact

SEQ ID NO: 884818 - DNA, 622 bp, Homo sapiens
tcaatctctgcatttaatgggatgtattatttaagttttaaaattcaggagtccagtgtttgtaaaaacattagtctatgttataagatgctagagcttggttgatcagagacccctttgttcacagaagtatctgtaacaagccaggtttactttcaaacatattttcagctataaattattggagtgggtcctgttagcattgcaaattaaatttaggggaaacattgtctctgcccaggaactgcakgccatgtgtgaattctttgattcaatccctatcacaatttaaaatattttttcttatgaaaattttcaaagataaagaaacatagattgtaaaatgaaacaatgtacccctcacccatttcaacaatcaccaacatttccttcaattttttgtttggtgataattccacaatagtctgacgtagaatatcctctttttgactgaaggcaatggggatttttcttggttaggggttacttttatttctttttttttttctttagctatctgaatgagtttcatatttcctctttgtgtcaaccagaatgatggggacctgctctccaatgaacatctacagatagataaatgcattcattccacgtatgggtt

SEQ ID NO: 884819 - DNA, 597 bp, Homo sapiens
ccacaacttctaagacagaacaaataacaaggctattcaaaatgataaatgttcggattccacctagttaaaatgcaaacaggttctctctgctttgaattagaagaatataagctaccatttgatttttgtaggtgtgaatcctccaaccatttctagcgttggtgagtaaaaaaaacaaaaacaccggcaataggttctgcatatgcttatttattgtaaagagggactaattaaaatatttaatctcacccctatctatttggatcacgctcatttkttcaaagcacagcagccatttgctacccctcaggcaaatgcacccttcatgaccacagccctccttgttttaacatttgtctgaataatgactacctgacacagtgagggctcagcaaataagagttacgattgttattgttataattaataatctgctaaaggcggttaccagaaatcagtctttaaatccctagaacactaaattgaaccaagaaatatcctctttattgttgttattattattcttaaaaccatttgcaaagcctctgtaagagaaccagggcctgtagcacagttacctgtctccattttaga

SEQ ID NO: 884820 - DNA, 597 bp, Homo sapiens
cggtcaccgggagggagcggagcggcatgggaggtgctcccggaggcggccttggatacggggcatgcgcaatgtctgccctgtcctcaagcaggagtgaggggtgggcgggaacccgggcttggagaaggcggggagggtggaggagagccagcactcccgcatctctgagaggccacttcgtccttgtcccacgaactgcagtttttctctctgggtcattcatcaatgaatgtattaagcatttattgaasacttgcactggcagagtggatgtgcgggatacagggcatcctccggtaatagagggccgattgcatttggctttggggctcctttttaggcactgatgccagccctctctctaacagataaggagggtgcataaatagaggtctcgtaatacctaacgactacactcttcagtgatctggggaaggagagtagctgctggttgggttgatcatggaaacttcgttgagaagcgaaaaagaggaaaggtgaacacgaaggcataagtggcaaaaaaaaaaaaaaaaatcaaacagcatatgaatccatgcatcctgtcggggacaagtttaatctgagtgtatt

SEQ ID NO: 884821 - DNA, 574 bp, Homo sapiens
gccaagacaatcttaagcaaaaagaacaaagctggaggcatcacgctacctgacttcaaactatactacaaggctacagcaaccaaaacagcctggtactggtacccaaacagatatataggccactggaacagaacagaggcctcagaaataatgccacrcatctacaactacctgatctttgacaaacctgacaaaaacaagcaatggggaaaggattccctatttaataaatgttgttgggaaaattggctaaccatatgcagaaaactgaaactggaccccttccttacaccttttacaaaaattatttcaagatggattaaagacctaaacataagacctaaactcataaaaaccctagaaaaaaaccaaggcaataccattcaggacataggcatgggcaaggacttcatgactaaaaacaccaaaagcgatgacaacgaaagccaaaattgacaaatgggatctaattaaactaaagaacttctgcacagcaaaagaaactatcatcagagtgaataggcaacctacagaatgggagaaaatttttgcaatctatccatctgacaaa

SEQ ID NO: 884822 - DNA, 628 bp, Homo sapiens
ttaaaatggccagagtatttatgtgactccaaacataaaacatgtgacaaaactggggtaggtcataataagaagaaattagattttccggccattttaagagttatttgggggctactaaagataagggtcctcacacccgaaaaagcccaggttttaagttcagttctgccatatctcaaaagacatgcaagctccgcatgtttgggtttcacggggaaagaagcagatacagtgaatttaatccaccaatatgaagttggcaataccttttccttccccagcaccttcaagtgtatttacaagcctttcamacacaggcgaaaacactacagaaaaatgttaactagaaaaaacatattggctcagtaaaacaaataaccctcaaagccagagaactgcatgtttattgactccaccgccactagcactgccttgcgtagttacagtacagcccaagtgcattagcaaacagcctagctctttctgctctgttgctagcaaccttactgcattcagcagctagtaaaattaaacctcttccaaataattctcatgtgcatggactataaagtgaatgtaaattaaagcaatacattaccaaaaacttcaacttatttagagttgc

SEQ ID NO: 884823 - DNA, 640 bp, Homo sapiens
gaaacccacctttgctccccaaccatctttatataatcaacttgcctggccacatggcttctgacactcctgagtaccctcaatatttgtgctactgatgtcactcagggacccaggctcagcaatcttttgcaaatacaacttctttccagtcaataaaaaggaaagcaaaaatatcaatgaaaaattrgttaacattcacaaacagactagaaaaagagaaagagaagcaaaggccctataaacacaagaaaaaaaaatcttttcagtagtgatcaaataaatgtcaataaacaaatagctgtgacttttaatggtgagagtcactgagaaaaataatactgtttcaccttggaaacgatgaataattaaggggtgagtttcttcaaacattgccgcttgtggtagtatgaattggtatcacaattaaaaacaagaggcattcgctaactgacccaagagctccctcctttcataaagaactcctcagaagtccaggtaacagtgccatgatcccctgccgtaagccacagggccccattaatgtaaaagctctagctagattttgaacatacatcaattagtctaaaccagaaacactggggacatgaaacattctcagtttaccaataactttagt

SEQ ID NO: 884824 - DNA, 594 bp, Homo sapiens
cttggggattaacattcagctcattacttatgcaaatttctgcagctggctttaatttcttctcagaaaatgggattttattttctatcacattgtcaggctacacatttttctatcttttatgctctgcttcccttaaaaacctgaatgcctttaacagcacgcaagtcacctcttgaatgctttgctgcttagaatttcttctgccagataccctaaatcatctctctcaagttcaaagtyccacaaatctcgagggcagaggcaaaatgccgccagtctctttgctaaaacataacaagggtcatctttgctccagttcccaaaaattcctcatttccatctgagaccacctcagcgtggactttattctccatattgctatcagcatcttgagcaaagccattcaacaagtctctagggagttccaaactttcccacattttcccgtcttcttctgacccctccaaattgttccaacctcgcctgttacccagctccaaagtcgcttccacatttttggttatcttttcagcagtaccccattcctagtaccaatttactgtattagtccgttttcacactgctaataat

SEQ ID NO: 884825 - DNA, 670 bp, Homo sapiens
cttaaaaaaaaatcactgcaacagacacttgatctcacctctcaggagtccccagttgttagagaaaaaactcaaacaacttttaagcactgaggaaagttttttttaagtgcaataaagtataagacaaaggagtccatctttcagaactgaacttcctaaataaaaacagaaaatgtcatgcactcaaacctctttagctttctcaaagcrgtagtattaataggagagcaaagagctctggacgagccagaagtcattcctattccacctgcattccctaccagcacacatgtggttcactcagacgggctcaagcaggccaggcgaagccctcttaagaggcagagatttctgttcctgggccaatttaattatttaaatttttgcaaacatttactcacattcgatggcagatctgtctgctaaaattagacagtcctacagtggtcacaaatgacagattcctacaatctatgaatcttcaagggtactccccaatcctgctgtacatacaaaggggttacaattagaccactcattgtaaaggccaattatatgtcctcagtaaaaagaggggggcagtggtgatctggagcctgcttataccagctcccaggagccagtcctaaatttttcagaattctgtgagccagctgttaaacatggc

SEQ ID NO: 884826 - DNA, 656 bp, Homo sapiens
ctcacctctcaggagtccccagttgttagagaaaaaactcaaacaacttttaagcactgaggaaagttttttttaagtgcaataaagtataagacaaaggagtccatctttcagaactgaacttcctaaataaaaacagaaaatgtcatgcactcaaacctctttagctttctcaaagcggtagtattaataggagwgcaaagagctctggacgagccagaagtcattcctattccacctgcattccctaccagcacacatgtggttcactcagacgggctcaagcaggccaggcgaagccctcttaagaggcagagatttctgttcctgggccaatttaattatttaaatttttgcaaacatttactcacattcgatggcagatctgtctgctaaaattagacagtcctacagtggtcacaaatgacagattcctacaatctatgaatcttcaagggtactccccaatcctgctgtacatacaaaggggttacaattagaccactcattgtaaaggccaattatatgtcctcagtaaaaagaggggggcagtggtgatctggagcctgcttataccagctcccaggagccagtcctaaatttttcagaattctgtgagccagctgttaaacatggccattattagaaatggaatt

SEQ ID NO: 884827 - DNA, 660 bp, Homo sapiens
ggaaggaagatagagagggaaaaggaaaaaggcgggagggagggaagaagggttggtactcaagagactagaatgtgaatactatttgaccatcttggtaacctgcctcacaaatttcaaaatacagtcttcatttttatttttatttttttcataaaatagagcaaatataaacctgagacctaatcttctatcagtaaaatcgcctctgaaatttctgttcttttctggcaagtgcccaaaatagcaaattggatcaaaaatgaaygagcaactttttattctatttctactatcccctaacaaaaggaaagtcaccaaaaaatgcaaacaaacatgtaccaggatgttcatagcgggtctattcataatagccccccactggaaacaacccaaatgtttctcaggagtaaaatgaataaataaattgttatatattcagacagtgggatactagacagcaatgagaataaactattatacaactacatgcaacaatatgaaataatctcacaagcatattatttaacaaaagacacaattgaatacttataatatgattctatttatattaaagttcacaatcaggcaaccagcctatggtgacttaagttagtggttaccacttgggaaaggggacatgtgagaacccctggagtt

SEQ ID NO: 884828 - DNA, 660 bp, Homo sapiens
ggaaggaagatagagagggaaaaggaaaaaggcgggagggagggaagaagggttggtactcaagagactagaatgtgaatactatttgaccatcttggtaacctgcctcacaaatttcaaaatacagtcttcatttttatttttatttttttcataaaatagagcaaatataaacctgagacctaatcttctatcagtaaaatcgcctctgaaatttctgttcttttctggcaagtgcccaaaatagcaaattggatcaaaaatgaatgagcaactttttattctatttctactatcccctaacaaaagsaaagtcaccaaaaaatgcaaacaaacatgtaccaggatgttcatagcgggtctattcataatagccccccactggaaacaacccaaatgtttctcaggagtaaaatgaataaataaattgttatatattcagacagtgggatactagacagcaatgagaataaactattatacaactacatgcaacaatatgaaataatctcacaagcatattatttaacaaaagacacaattgaatacttataatatgattctatttatattaaagttcacaatcaggcaaccagcctatggtgacttaagttagtggttaccacttgggaaaggggacatgtgagaacccctggagtt

SEQ ID NO: 884829 - DNA, 660 bp, Homo sapiens
ggaaggaagatagagagggaaaaggaaaaaggcgggagggagggaagaagggttggtactcaagagactagaatgtgaatactatttgaccatcttggtaacctgcctcacaaatttcaaaatacagtcttcatttttatttttatttttttcataaaatagagcaaatataaacctgagacctaatcttctatcagtaaaatcgcctctgaaatttctgttcttttctggcaagtgcccaaaatagcaaattggatcaaaaatgaatgagcaactttttattctatttctactatcccctaacaaaaggaaagtcaccaaaaaatgcaaacaaacatgtaccaggatgttcatagcgggtctattcataatagccccccactggaaacaacccaaatgtttctcaggagtaaaatgaataaataaattgttayatattcagacagtgggatactagacagcaatgagaataaactattatacaactacatgcaacaatatgaaataatctcacaagcatattatttaacaaaagacacaattgaatacttataatatgattctatttatattaaagttcacaatcaggcaaccagcctatggtgacttaagttagtggttaccacttgggaaaggggacatgtgagaacccctggagtt

SEQ ID NO: 884830 - DNA, 603 bp, Homo sapiens
aacccacagaatctgtgagacataatgtagttttattattgttgtaagccactgaggcatgggataatatattaggcagcaatcgataacacatgtaaggaaggatgaagaattagagattttttttttaaactacagagtcagaattcttagtcgcaaacaacaggatctactccagctagtttaatcacaaaagaaacagtaaagagtatttaaaaatctctaggagaattagagcatcaggtctagaggctataaaggcaacaacaattcagaaagcacctctgatacctctgcttcagccaggacctaatttctgctgcagttggataaagatacttcagctcataccactgaagttggtagccaggtgccagaatytccaccattaatgacttagaaagctagattccttcaccattccctttattcaaatatggattctgtgaagcaccagcttcattatgctgctgtctttcaatcagaagtcttgcataggtccatctgcaaggaggatgggaagaaatgagttgcgggctccattcttagggaagtgttatttttaaggtagaaaatatcccagtcatagaaaaggtgtttcaa

SEQ ID NO: 884831 - DNA, 614 bp, Homo sapiens
tgacacaatgaagaatgcatcagtgtcttttagtagcagaattgatcaagcagaaaaaagaattagtgagcttcaagacagtataattgaaaagcactttctagatcctgttgatgtgcttctttgttttttcttatttctttcatatcaggagaaaaacaaagaagcacaccaaaaggatctagaaaatggcctcaaaaaggcaaatctaagagctatcggccttaatgaggaggtagagaaagaaataggggtagaaagtttattcagaggataatagagaatttcctaaacctacagaaagatatcaatrtccaagtacaagaagattatagaacagcaagcagatttgacccaaagaagattacctcaaggtgttgaataatcaaactccccaagatcaatgataaagaaaggatagtaaaagcagcaagagaaaagaaacaaataacatacaatagagctccaatatatctggcagcagactctttgttggaaaacttacaggccaggagatggtggcataacatatttaaagtgctgaagaaaaacaacttttagcctagaatagtatagctggcaaaaatatccttccaacatgaaggagaaataaa

SEQ ID NO: 884832 - DNA, 616 bp, Homo sapiens
tgttgcagcactatttacaatagctaagcttgggaagcaacctacatgtctatcaagagatgaatggacaaagaaaatgtggtacatatacacaatggggtactcttgagccataaaagaatataagtgaataagtaataaatgaataagcggataagagaataagcgaaataatccaggcacagaaagataaayatcacatgttctcacttaagtatgggatctgaaaataaaaacaattgaattcatgaacagagagagttgaagggtggttactggaggctgggaaaggtagtgggggctgagggagatgggaatggttaatagaaaatggaaatagaaagttaatagaaaataaaaaatagaaagaatgaataatacctactttgtggtatctcaacagggtgactatagtcaacaatatttaattgtacattttaaaataacttaaggtatgtaataggattgttcaaaacacaatggataagtgcttgaggggatggataccccattctccatgatgtgcttgtttcatattgcatctttgtatgaaaacatcttatgtaccccataaatatatacacctgtctatccttataaataaataaataaaaat

SEQ ID NO: 884833 - DNA, 528 bp, Homo sapiens
catttattgagactatcatagactttttctaatttatacctcttttctcacttttccttgatgtttatccattcaaataattgatgataaattgatttttcttgacaaaagttaattttttattattataatgaatgcaatatttattaagctcatattaaggttttttgtttgtgtgttttttgtagagatagggtttcaccacgttggccaggttggcgttgaactcctggccactagtacwcagcccgccttggcctaccaaaatgctgggattacaggcatgagccaccacacgcagcaatattaaggtattttcttaaaaaatgttaaatgtaccataggaagagagagtactcataaaattaaaactatcagaactttgatataataaataattttgaaaaatatcatgtcacctttgaattcatagagtaaaccaaacttgatgataacaattgtttattttatcactggattcaaatttataatatataataaaatttttatttttgttcattagggaga

SEQ ID NO: 884834 - DNA, 528 bp, Homo sapiens
catttattgagactatcatagactttttctaatttatacctcttttctcacttttccttgatgtttatccattcaaataattgatgataaattgatttttcttgacaaaagttaattttttattattataatgaatgcaatatttattaagctcatattaaggttttttgtttgtgtgttttttgtagagatagggtttcaccacgttggccaggttggcgttgaactcctggccactagtactcagcccgccttggcctaccaaaatgctgggattacaggcatgagccaccacacgcagcaatattaaggtattttcttaaaaaatgttaaatgtaccataggaagagagagtactcrtaaaattaaaactatcagaactttgatataataaataattttgaaaaatatcatgtcacctttgaattcatagagtaaaccaaacttgatgataacaattgtttattttatcactggattcaaatttataatatataataaaatttttatttttgttcattagggaga

SEQ ID NO: 884835 - DNA, 632 bp, Homo sapiens
ctgtgtgtgttttttttgtttgtttttttttttttttttttttaggaaaaatgtattatccttcttactttttgccatcaatgcttttgtagatataccttcatgtttaccttcttatttcccagcatttaatcttgtattccacttctttctgattttattcttctcagaatataccatctcctagttctttctacaagattctttgaattctttcagtctttgtatgaaattgtctttattttatcttcattttaaagtgattgtttaggtttatcagtctaggttaatggttattttttccttttatatttttaaaacactattctagtagttagaaaactatgggccgtagactaaattcagcccattgactattttgtatggactgtgaatgagctagggatatatatatatatatayacacacacacatacatacacatatacacacacacattttacattaaactttatatgtagtttacattttaaacattttttaaaaattacatggcacatgaaaattatacataagtcaactttcagtgtatgtaagtaaaattttgtgggaatacattcatgctcatttgtgccgatattgtctctggttgttactgtgctacaatggca

SEQ ID NO: 884836 - DNA, 610 bp, Homo sapiens
ttaatgactttaccagagccttctctttcgcagagggcccatccaatgtgtgtctcacggtgaaatggtccaggaaagttaggtgagaggaagctgtaggacacataagactgggatctggagttgtgtgagagagaaactgagaaaatgccacactgacgcttgtcaagtaggaaatacggttgagtaatggagggaccagaaagagcaggagagtccttagaaaaatgcgtttcttgtagatagtgctttacaggttaaaatcactttcacattatttcctcataaatatggaggtaagaaagcataaagaataaaagtcagatagacttgggttaaagttccagctctgctactgmtgagctctggaatcttgggcaagttacttaaattgcctcagttaagtaactaagcctcagtttcctcatccatagagtggaaataataatagtgcctttcttataaggtggctgggaaacttaaataatgtatgtagaatgcttagttcaatgcctggcacatggtgagctcaccacatgtctgagttgccactgccattatcttcagcatagtcatcattgttttggtgtagaatggagacctatggtca

SEQ ID NO: 884837 - DNA, 670 bp, Homo sapiens
gattgaacaatcctttctcttttcacgttctcttggggtaagcactacatgattgactacagaagttgggataagacacctgaccagtacattttggttacttatgaaaataattctgatacaagggtggagagagaaaaatttgaaatgaacttcatgaaacrtagaatttatatatagatttttatttatatttttattacagacttactattctaattttttccccatttgggaaaaaagttcagtgacagatattcccagtcccttcagacatatgaggtgcctgtgtgtttaatctacttggatagaaattattacagaattcataaaacaggaaatgaacattataaaccagttactaactgtagaatattttggtttcctctgccccctgccctgctctaaactctacttcactgggtttctgcattttctccatcctttatcccagattaacctgttcatttattgacttctgtcaagttctagaaaatgagatcaaagactgatagctggatgttctcccgtcttaaaatgttagggaaacagtttgttaaaagcatgttactctttagtcataagtattgagcagtcattgtctttcaggccaaaatgccagccactttattttcctactttttaaagacaattagccatcagcagtttg

SEQ ID NO: 884838 - DNA, 643 bp, Homo sapiens
aaacgtagaatttatatatagatttttatttatatttttattacagacttactattctaattttttccccatttgggaaaaaagttcagtgacagatattcccagtcccttcagacatatgaggtgcctgtgtgtttaatctacttggatagaaattattacagaattcataaaacaggaaatgaacattataaaccagttactaactgtagaatattttggtttcctctgycccctgccctgctctaaactctacttcactgggtttctgcattttctccatcctttatcccagattaacctgttcatttattgacttctgtcaagttctagaaaatgagatcaaagactgatagctggatgttctcccgtcttaaaatgttagggaaacagtttgttaaaagcatgttactctttagtcataagtattgagcagtcattgtctttcaggccaaaatgccagccactttattttcctactttttaaagacaattagccatcagcagtttgtagtagagctggctttttaaatacaaaacagtttattatattttaattggcggactctattgtatcttggagtttttttctctaattttatattgaagtgaaaaataggaagaacataaaatttgctacata

SEQ ID NO: 884839 - DNA, 589 bp, Homo sapiens
aaaagccacttttcaaagttccactgaattgctttttcatcttgctatgcctgcattgggcaatttttggcttcttctttcaaaagtcttggtgttcaagctctgagattctttacgctgtttgatctagtctattgttgaagtttataaatatattttgtatttcactcaatgaattcctaagtgtcagtatttgaaactgtttcattaatctattatatctaaatttccaccaataccatacaatattgactactgtasttatataatacatttttaaaaactggagaatcatttctcccactgcattcttcattttcaaaattgtttcactattctaggagtttctcttgttatctttttcatatgaattttagaataatcttatttatacctaaaaataatgctgtcattttgacagagatttttcttggattttttaaaataggtataccagctaggggagaatttaagtctttattatgttgggttttccaaaatataaatagtgtgattttctttgatttatttcaccagctttttgtagtatttttcttttctgaaggtcagttatatatattttttgtta

SEQ ID NO: 884840 - DNA, 608 bp, Homo sapiens
gctgtttttgtcctcaccctttttctgagggtggagaaaattatgcctcaccagaccacattactcctgggggtcagaattgttggccatttcattctcttttcaggatggactggtgaactggtggttccccagcaacccctcttaagtttaggaacccattggcataagaattagaggttcttcctccaggcatctttccaaccctgcactttaactattttttccttttctctacctgtcagaagttaacttttatgtgagaggcttttttttttctttttagaaaacattttacagggcaggaccccagctatcactgtttatattctctgtaaaattttaattatgaaaaaggatttgtggggttggtcttaaackgaagcaaatccagtgtgctttgcctaactttctgtatgttcagtagcaaactttgctgcaggcctccatcttgttttaccatgatctgaaaccacatggcgatgttttgttctagcctccaccattttacaatggcacctaggttcaattccggcttagagaatgagtactttaggttgatatctgtatagctattgccatttgctgattctcttcacctctatgaa

SEQ ID NO: 884841 - DNA, 488 bp, Homo sapiens
atcataaccttaattgaggcttgttggtttaacctgtgaggttaccattagtaaagtttaaaagacaaaaatattgggttcctggttcagttaaagtcgggtagtaagagagttaaaaggattttcttagagagtgttcagcttaattgcaagtaaatattcaagttrtaggtatatttaaaaggcctttatgtttttctcttctgggatcttgttttgttggaacaagttttttccagttgactgattctttttcagttgactgaattctttttctccaccttgtcttgccactcttaatgtatgcatgagaggataataatccaattaggagattagcaaatgaaaaatcttatagccactgggttttcttctgccagtctatgtagttacatatgggttgtgtgtgatgtctataaaagagagctgtaattaattggcataaagaaaaataagtgcttggaccaaatattttttaagggaagata

SEQ ID NO: 884842 - DNA, 594 bp, Homo sapiens
ttgtcacagttattaggactcagagatacaaggacggaataaagaatgagagatgccttgatttctctccctcatgtaccccgggtatttgctaggaaaagaagggaaccagggaggcctgctcctctctttctagatgagtagccatttgtcttcagtatgtacaccttttgaattcatcctgcaccccgggactcctttgaaaaaaaatgcctttttcccccttttttctcctctgtcctccttcatggataggtaattatgtctttatactacagcacactcccctaggatgcatcctccaaactggaaagagttaatttgccaaaccttagactggttggcttaggactgggctcaaggaaagggaaaccagaagactggcatgcckaaagaacagtaaaagtttttttttttttttccaaccacacttttgggcttcctctacccatgcaaattagtaaaaagtcttgggatttttgagctgtcattaacctcccccaccaccttgttttgttttaagacttgttttctaataacccagtttgtctcttcttgccttctggccatcaatctccaaatggtcatgcaacc

SEQ ID NO: 884843 - DNA, 602 bp, Homo sapiens
ggtccactgatcagacttagtccttgtctgtctttttgttgggcttgcagcaagactccaagactcttaattacttgtaaatattaaaacattaggatatttcacatatagtagcagatttctcttcaaaaatagaaagatctggcactgcaaatgcaaccgtctcctaaagtagcataggaatataggctttagactaaatgggtcatttaattgaccatctttatttattcatcttacctccctttccctaaagggtaaggtaagggagaagatgtcaaagtcagttacagactacaatgactatgactgtagggggaagttttggttagagttttagggatgctgattctgggatgcactaacctgtgcatacatttgattgagggccatccataacctacatttatgcccaagaacaagacactttgagctcmccgcaaattttgcaaaattgatttcatctctccagtattaccttggattataaagccaggtgagagtctctcctacagaaggaggcagaaaaggtcccagaggctttggcaagccaggaggaacagtccaagtatggttggagattacggccataggacaggggt

SEQ ID NO: 884844 - DNA, 595 bp, Homo sapiens
ctctacatttctgtttgaaaataactgcatcattctatggtcataaatctcaaaatgtatatataactaaagatataatgcacattgatatatgtattatatttttaaagaagaaagcatgctatatttaaagttttcatcaatattttaatgaccatcttcaaagattgataatttatgccagtaagttagggccatatatctcaattatatcttcttgtcaaaggtattctgtggagactcgtggggaaagaaacctaagatacatgaagagttttaaagattttaaaaatcaattttkgagtgctttatgagactataaattccttgccagacacaaaatgctatatgtctctagttgtgtgcattctccatgaaaacatgggtattgaaagcagagcctgttattttgcacaacatcgaattctcagaaactaactcagtcttgcgataaataattttgagtaattaaatgacaatgggcctttaggttctggccatgaatgccttaccctccacgactacaatatatatatatatatatcaaaataaaaaatataaaatgttaaaaagaactttctgcaggcactagaca

SEQ ID NO: 884845 - DNA, 710 bp, Homo sapiens
aaaaaatacaaaatcaatcctattgctaataataatagacagtcaaaatatgatgaagatatcccactcacaacaataagcacaatatcacgatacacaattacaagtataatctttaaaggaattgtgtgtgaccaatacaatgaaaactgtaagagcttgtaaaaggaataaaaatactttcacgaaaaaaaaatctgtggctaaatgggaagaaaataagattaatgtaatccatgaaaatcccaatataaattcttagaatgtgactgtgatagagagtatattttcaaagcaattctaaagtttatcagaggaataaatgagagagagagaaaaaaaagattgaaagctaaataggggaagcctgtcccagtggaatgggaaaatagatataacgatggtagagaatggatagaccacaagccaattctagtagattaaaaaacaaaacaatgccaggaagggtggcacactcccatagtcccagctactcagagggctgacrcagtaggacccctgagcccggggagatggaggctgcactgaactgtgattgtgctgcttcacttcagcttgggtgacagagtgagaacctgtcactaaaaaaaaagtttttaaaaaattttttctaatttaaaaaaaaaagaatgacaataaaagattctatatgagataaagttggcatcacaaatgagtaaagccataaa

SEQ ID NO: 884846 - DNA, 710 bp, Homo sapiens
aaaaaatacaaaatcaatcctattgctaataataatagacagtcaaaatatgatgaagatatcccactcacaacaataagcacaatatcacgatacacaattacaagtataatctttaaaggaattgtgtgtgaccaatacaatgaaaactgtaagagcttgtaaaaggaataaaaatactttcacgaaaaaaaaatctgtggctaaatgggaagaaaataagattaatgtaatccatgaaaatcccaatataaattcttagaatgtgactgtgatagagagtatattttcaaagcaattctaaagtttatcagaggaataaatgagagagagagaaaaaaaagattgaaagctaaataggggaagcctgtcccagtggaatgggaaaatagatataacgatggtagagaatggatagaccacaagccaattctagtagattaaaaaacaaaacaatgccaggaagggtggcacactcccatagtcccagctactcagagggctgacacagtaggayccctgagcccggggagatggaggctgcactgaactgtgattgtgctgcttcacttcagcttgggtgacagagtgagaacctgtcactaaaaaaaaagtttttaaaaaattttttctaatttaaaaaaaaaagaatgacaataaaagattctatatgagataaagttggcatcacaaatgagtaaagccataaa

SEQ ID NO: 884847 - DNA, 602 bp, Homo sapiens
ttaccatatcataatttattcaactattccctctgtaatgaacattcaacttgttttcaggtttttgccacctgaaaaatcacctgtttattacagagcttttactttataagtaataaaccctttaatagacatgtgtttatgtactggtaattcctcaattgggattgctaaataaaagtgtatgatgttttaaattgtaatagccatttccagtttaatttctaaaaaggtttgagcaagtcacactcccagcagctaagtagagggcytacttcactaatgttggacagtgttttcttctttaaatttttgcttatctggtgtgtgaaatattccatctaattttcttatatttttcatttccttgattcactagtgaaaatacaatgtttgtggcccattttcttttctttatttacaacttcttttagtagtcatttgtacattaggaatatcacttacatgtcttctgatggcattctgactgcatatatttttcccaatccattgttttgtataagatatgtcttcaaatacacacaaatacacacacacagtcatgcactgcataatgacatttcagttaatgatgggcctct

SEQ ID NO: 884848 - DNA, 627 bp, Homo sapiens
aagaacaaggcaagggaaggtcaggcaaggctgattttcaaaatttttgtcagataaatttctttcattaaattgattgagaactataaaaagacatcagaaaagcagtcaggaacctgtaaatcaggggaggatgtaggcagtaggcggagtgaatcaggaaagggatttggaatggcactgacaatcaaagtcatgctccactaagaactgtgaattaacttaaagtaaatacagtgagtatatccagatatacagatatctagatatacaatatccagatatacagatatctagawatacaatatccagatatacagacaacacggggatattgtcaactacagtctgtatacaactccatttaggttatagttcatgatgtaaaaagaaacctttaggcccaacttaaaatacatgtagtttcatggtacacctccccaacttcatctcccccacgttgtgcatacgagagagaatcatacaatggccccaaccaagggaactcgtgggcattccatataatacttaagacacattttgacagaatataatataactctacaagttatgtttttagaaagagtattttcatgggatggttaacaccaatattcatttggaaaa

SEQ ID NO: 884849 - DNA, 640 bp, Homo sapiens
tataaaacaaaaatactgtcatggacctatgatttatgccacagatgatcttaaatgtttactttttctaaatttccagaagtaaataccaagtactgagcatcggtgctgtgcagaaatcattagtgctgttcacccaaaatttggggttttctcctcaagcagatggtaaggctgtagtttcctgccccttttaaatgaaaagcacccaagtgactcactttggtcaaaaaactatttttaaaaagtgacgtgtgctatatctgaggagaggttttaagatgcagtggctctcttatccctctggcatagcacatgggcatgttcaggaatgtggttctccatcagtctaggtccctgggtgactaccagagacccattttagacctgacagacaagtaacaaagcaagaaaggaatgtgtatttttatggcagcaaaacatctatcttgaatgatacagaaataagtacctagayatgagtgctaccatagcaaataagcctaaaatatatggtagaggctaacaaccgggcagtagacagcaagcaaactgccactggagacgagaatgatagtgatcgttgtaatgcagtagcaaaacagttggtaaaactgttgcctgggataatatggaagat

SEQ ID NO: 884850 - DNA, 661 bp, Homo sapiens
gaatatcttcagtactttagagaagagtttatcttgtttagaagattgtttgattgaatcaccttttaaggaaaattgttttgtgtaaaatatttccaacatgtaatactgaataccattaacccacaaccatcaattgcttgttatacttcatttggcttctccgttttattacccaatataattgacttaatctttatttgtctaataaaaggtactcctccttggagtctttaggctaattttaatggctacagacctgttttactcattagagactgtaaaatacttctattaatttatttactacttattaaaataccaaatcatagcacaatttgccttttatgattgaaattccatcaccttwagctgaatttttaacatcaatgaactgtgattagtctgttcttattgatgtttgcactcccagattagctgcaatgtccaaaactggggaaaatttagctaggatcatgagtggattggcctggctgtattttcttcctaaatttcctcaaggtatgtatcattgtggacaatggtctttttcgtaatgggccacagtggatcattcattatttgcaccaccaggaatggtgagaaggtgcagtagcaatttcctacaatggtgacatgacagtcaaaaatacctcaagtt

SEQ ID NO: 884851 - DNA, 661 bp, Homo sapiens
gaatatcttcagtactttagagaagagtttatcttgtttagaagattgtttgattgaatcaccttttaaggaaaattgttttgtgtaaaatatttccaacatgtaatactgaataccattaacccacaaccatcaattgcttgttatacttcatttggcttctccgttttattacccaatataattgacttaatctttatttgtctaataaaaggtactcctccttggagtctttaggctaattttaatggctacagacctgttttactcattagagactgtaaaatacttctattaatttatttactacttattaaaataccaaatcatagcacaatttgccttttatgattgaaattccatcacctttrgctgaatttttaacatcaatgaactgtgattagtctgttcttattgatgtttgcactcccagattagctgcaatgtccaaaactggggaaaatttagctaggatcatgagtggattggcctggctgtattttcttcctaaatttcctcaaggtatgtatcattgtggacaatggtctttttcgtaatgggccacagtggatcattcattatttgcaccaccaggaatggtgagaaggtgcagtagcaatttcctacaatggtgacatgacagtcaaaaatacctcaagtt

SEQ ID NO: 884852 - DNA, 662 bp, Homo sapiens
tacgaatgcaaataatgaagtattatttttaattcattagttcagcaaaacttaaaatacacacagacatataatttttatgagggtgtaagcaaaaggctctcttacacatcatcggttggatatagatagctagcaatttttggtgcatgaaacagggtttttccaaatagaaatgactgcatccttttgccatcaattccactactaggcatctgtcttactaaaattaatgcttacctgtacaatctctattgcccttagactcaggtcagaggaacccctgctcctggccctgttcttcaaaggggccggtcctacttgcctttccctgttgggtagagagttgttggagtcaagaaacaagttatcttggaccctgtgattcctcaccccaccctggatcacattccatctacatggactaaggattttctgtcaaattatccragtcagtttttaggctgtaaatgggccttttctttaatttgtcctctcccagtaccactaggcccaaggaatgatcaactggagggtgtttgtggaaaggaagtctatgagaagagtgcagatggagcgaattctaggactggagtgtccacatgtgagcacaagaccacatgtattataagactctcccaagggtagaacaagaagtggag

SEQ ID NO: 884853 - DNA, 661 bp, Homo sapiens
taagtattcattgaatgataaatgtaaggcaataagacagttaatggtattcaggaaacatactgtacatatatgaaagatttccactgtcttgaagatacttcattaaaaccatcactaaatgcccttgacaatcattatagtccaaytgacaaaacataatttggaaaacttaaaggaaaaaataataaaaaaaaatttggtgcccattatagtgactcaattatttccaaagctactctatttttctggctatctgtcttagattataaatgagtaaggaatactctggactgaagcctacctcctgtgaccttgtaaatgggaacaagattgtgatgatatgtgtaaggctagttcttctctaatcctctcctcctcccccaactttatcttgctctctttaaatctttttattttttctcaaatcagagataagtcaaagaaatactgcttttcttctcttattttgtttataacaatagagaaggttcataggccagaaatcccaatagaatccatatttgagcaaatgcctgtcttaggatatttcattccccattgagaatgagaatagtatgtctatgtttataatgttttaaggtgtgttttccatattttctgacatgtgatttacaacagggaggatttcagtgacaga

SEQ ID NO: 884854 - DNA, 661 bp, Homo sapiens
taagtattcattgaatgataaatgtaaggcaataagacagttaatggtattcaggaaacatactgtacatatatgaaagatttccactgtcttgaagatacttcattaaaaccatcactaaatgcccttgacaatcattatagtccaattgacaaaacataatttggaaaacttaaaggaaaaaataataaaaaaaaatttggtgcccattatagtgactcaattatttccaaagctactctatttttctggctatctgtcttagattataaatgagtaaggaatactctggactgaagcctacctcctgtgaccttgtaaatgggaacaagattgtgatgatatgtgtaaggctakttcttctctaatcctctcctcctcccccaactttatcttgctctctttaaatctttttattttttctcaaatcagagataagtcaaagaaatactgcttttcttctcttattttgtttataacaatagagaaggttcataggccagaaatcccaatagaatccatatttgagcaaatgcctgtcttaggatatttcattccccattgagaatgagaatagtatgtctatgtttataatgttttaaggtgtgttttccatattttctgacatgtgatttacaacagggaggatttcagtgacaga

SEQ ID NO: 884855 - DNA, 661 bp, Homo sapiens
taagtattcattgaatgataaatgtaaggcaataagacagttaatggtattcaggaaacatactgtacatatatgaaagatttccactgtcttgaagatacttcattaaaaccatcactaaatgcccttgacaatcattatagtccaattgacaaaacataatttggaaaacttaaaggaaaaaataataaaaaaaaatttggtgcccattatagtgactcaattatttccaaagctactctatttttctggctatctgtcttagattataaatgagtaaggaatactctggactgaagcctacctcctgtgaccttgtaaatgggaacaagattgtgatgatatgtgtaaggctagttcttctctaatcctctcctcctcccccaactttatcttgctctctttaaatctttttattttttctcaartcagagataagtcaaagaaatactgcttttcttctcttattttgtttataacaatagagaaggttcataggccagaaatcccaatagaatccatatttgagcaaatgcctgtcttaggatatttcattccccattgagaatgagaatagtatgtctatgtttataatgttttaaggtgtgttttccatattttctgacatgtgatttacaacagggaggatttcagtgacaga

SEQ ID NO: 884856 - DNA, 586 bp, Homo sapiens
aatgtgcaagatttgcttctgtggtataatacaatccaactttcataatttgaagtttgataagctgcatcttgatgccttcccctgtgtgcaaggaatatagaaccccgcactgtaatagcatgtaagtgtgtgttcttgtctctgaaagcacagtgatataaccttttgccattgccaacaagcatcatgttaaattaattgaccttggttcacttgcactatgatgcaattagcaattatcttcaracgtcaacattttggttacatatcctaaatagaaaaagatgcctgacccaaaattctgctaggaatgtagaaatatattttttttggcaaattatttttcctgctgtgaatatctctatactttggttatgcaagataaatttgtattagagagccaaagtaaaaacccatattaacgaccagtaataaccagaatgatcagggataaaaggcacaggtgtaagggaaaaatatctttggacacatagaaagttatagtgaatggctaaaataaatatgcccttctttagtactaaaaaaaattgctaatgggaccaaagggattaggaagcaatca

SEQ ID NO: 884857 - DNA, 611 bp, Homo sapiens
cttccagcttctggtctagggatttaaccacctcaccaaatgcttcttttttctttggctatgtagagacaaaaagagacaagacgtcatccccttcattaagtcctctcctcagatttttatttttcttttttctcctcagatttttatttttcaaaagtcatgtgtggttttacctttgttggacagtagatcttaagtagggaaactaaaaccatataataattcttttgctttattagtaaatcatgttaaagtatttcagtttgactcrttctaactagttaccaatgaatatagctgtgggcattttctattcttgtcatgctttcattcctccaacttatacttttttattgtgacactcctattgttcaaatttctaatttgaaggaattcattaccagatgagttttaaaatgaaagaatatcttcctgctatcctctcctcagcaataaaattatttttcaaatcagaggataaaggacttaagtaaaatttaaaataaacttatgaaaacagttggtttattgaaaagcaactagcctatatgtaacatagtttatagaagtgtattttaattcagtttggcaaatattcatgtattcat

SEQ ID NO: 884858 - DNA, 645 bp, Homo sapiens
ttttacaaagaagttttcaaaaacaatatctattttgcacaagtgattatggctaattcataagaaaacaaacagaatttacgaacttagcaaatgttgagaattatgaaaatgccagaaaaaaacatttatatgcagttctctgaagtcttaattcaaaatgaaataggagctaggtttgctttctagtatgcctttggaaattgtccctaccttgactttctgcataaatggtcctctgccaacatccgtrttttgttttgtttttctttgttggtttttggctgaagaatcagctagcccaacaaagctaattacattttaacttcagcaaaactgaggttgacttgactgctgggtctgctgttagcccatcccttcaaaagcatgcttgatggtccatttctctttcattctgtatagataagattgattcattcatactcatggcttcaatcatcactcagtttatatctgcacagtcatcacattactcaaataaacatgtttcttactccttagcaagataatcataattagcatgaaaatttatcaacatacctaagctctatgtcagtgacaatatcttacctaatgaggtaagactgggaggtgttacttttagcagaatgtacttcattatga

SEQ ID NO: 884859 - DNA, 611 bp, Homo sapiens
ataactgctctcatgcttcataacacaaaactcctcactgggttcctcactgagttcttatagtttagacttctaccgtgtttcatgggccaatttatccctctcggtaagaatattcttaaccaggtcactcgcaaacagaatttatgcccacctacccttttcccccaacccactgtccttaatatgctgagtccacacagaggaaaacaagtttccatcttatctccttctttcccagtcacagttcagtcttcaagttaaataaaatgaaatgaaataaaacatcagagatgaaagttcatggaggaagagagaactctatttaaaaattattattatgcaaatggttgtctcytagctattataatacatttacataatcaaaatcttattaaaattttccccataccaagggagcattttgccctcaaataattcaaaggcaacctgtagagaaataagaaaagctgatgtatttttaaaaatccgtatactatcctcacaccctcatctatttgtagccatcataattgtcaaaattggaatccattcagtgctaaaaaaatcctgtttcatgtctattgagaacacaaacgcaagggggcata

SEQ ID NO: 884860 - DNA, 640 bp, Homo sapiens
tgctttgctctaacagggagaattagaatattctatcaaagtaatttaacaacataggaattcacatgatgcaagaagtacagtgacaggcaagccaggattggtacagcaactctatgatgtcaacagtactcagttccttccataattgcttttcttttaaatacgtttttaattttggaatagttttagttttgcagaaaaattgcaaagatagtgcagaggatgctcatatacttcacatccaattcctcctgttgttaatgtattatgttagtatgcacatttgtcacaactgaaaaaaaaattgatacatcagtattattatattgtatttggattatcttagttgtttcctaatgtcctattagagttccaggataccatattacacttactttgtcattttttttagatgtacaawatttttgatgatcttgaaagttttgaggagcactggtccagaattttatagattgttcctcaatagtgatttgtctgatgttcttctcattattagactggagttatggaattttgggaggaagactacagaggtaaagtgctattcacatcatatcatattcatagtggcaggaggcagacaaatgtgtaggcagatggggcgggtccccagtga

SEQ ID NO: 884861 - DNA, 472 bp, Homo sapiens
taaattttttaatgtttggccaatgggagcccctgtaggttgtcttctgagtctttctaaaaaaataattgtatatatttatgtggtgcaatgtgatgttttcatatatgtttacattgcaaaatgaactcagtcaagctaattaacaaatccatcacctcacatatctttgtggtaaaaatatttaaaatcyactcttttagcaatttggaaaaatacaatgcattattactgattatagtcaccattctgtgcaatagattactaaagcttaacctgcctaattgaaactttgtatctttcaatcaacatctttcctttccccattcactccccacttccagttcttggtagccaccttcctactctctactactatgtgttcaactttcttagatttaatatataagtgagatcatgccatatttttctttctgtgcctggcttatttcgcttgcataatgtcttccat

SEQ ID NO: 884862 - DNA, 570 bp, Homo sapiens
aggcacttcaaaaaggctagttgactgagtagagtccatgaatgatcttttggttcctctgaaaatgagtactatgccttctggcaaagaccaattgtggatttcccaaagtagcctcaatctacctccctcacaaaaaaagctagctgtgggggtgtgagatcagaacatgattagttgaaagaaagctgaagcctcctcactggggtttttgggggagaatgaggaataaggacagactttctggaagaaataaaagtgtcaatgcttgggttcagaatatggttttttgaagtaccaaaatgagccctgtctccttggtgtttctgggagagtgggatgataagaacagaatttgctggaaatggtaaaggtcagggaacggggtcrcaatgtaattggttgaaggagaactaaattaagactcctatcgtgggagtttctgtgatggtaggcgacgagcacaaaactttagaggacataacgttcagtgaccagaacatgatcaggagcgtgattgaagaactgaagaaaactcccttacctctgtgttgctgcaagggtggagga

SEQ ID NO: 884863 - DNA, 556 bp, Homo sapiens
tctactatttcaaatatagttctctatcacaacatattcaaattattaggtgttttctctgtggagtattttcaatattttacagatgttggaataatcgtgagatttctgtaatacagaatgcgttccattgttattattaataatagtctctactataaatcacatcaatcactgtgtgagcattttgcacatgtaatctcaaattctcatagagaaatactgttggctacacagactcagtaatttcaatcatgatactattgttttaaacccatcaatatgctaatccattctgccaggtgcaagagaaaccaaagagtaataaagtaatttcagagccttctgacctcaaaaagactatcattcmactaaggagatagattacaaacaaacaagatgccaactaattcaaggcttctctatcatgagtgaaatattttcatagtctgctacctaatagtttcactcttaattgccaaaaaaaaaattacttgatccgtatgggtgtgtgtgaattcatacacaaacttaaaaaataattacatttattatc

SEQ ID NO: 884864 - DNA, 608 bp, Homo sapiens
gttatgaataacatatgaggcagaggaaacttctctgtaatgttttaagttgtgacagacagaacaaaaatggtctatggggcttgtttgagagagcgaggagttcttgcgggaacgatatgaggactgagattttcacagagagcagaaagttatgcagggcacaaggggcaatgttaagsgtttatttttttgtcttaaatgcagtgcaaatccagcaaagggttctgagttgagggtagaagttgaggatgaaattaatattttgaaaagagtcattggttgtaattggaaaaaaaatagattttttgtagagaagcatgcaatagtggatgaggaagacaaagaggcaactgcaacactctgtgtgagatttgtttcaactagagtgagatagcaagatcttgcaactttaccatacagcttataacctcacttgcccagctttactttttagactgtctggttgcctggttgctagaacagacacatttttgacaaggtttagagtggcacattttataaaatgataggaggcaaatgtagcccaccagtgaaagtctgcctaatggctgatgcagaaagttccactgactctatacacttca

SEQ ID NO: 884865 - DNA, 660 bp, Homo sapiens
gagtctaagtgtttttctctctccttgtttgcagagaagagactacgcaaggacatagtgagagggcagccatctgcgagccacaaacagaggcctcaccagaaaccaaccctgcaggcaccttgatcttggacttccagcttgcagactgtgagaatatacatttctgttgggtaagccatccagtctgtagtactttattatgacagcccttatcagactactacatagagtattcgggcatttgtaggcacttacctgccatgctggctagtttcaattgcgagtgcttgggagaaacatgagctttacttttcttttcttttttttttttttcactccatctgcctctgtgtttaraattctctgtttttctaattatggagctaacctctcaactccttgaatgaagaggctgaatgccacacagtccccgggcttttaaaatgccatatgctatgtgtatattcttggataattgtgaaccactttagacttcccctatgccccacttatgggttgactgatgtgtggtaacttgaatgggctcaatataaaatctctctggcttgtacaaggaaaaaacagagaaaacagagaaccttttaataaaagatgaaagaatgttgaagagggcttaaaagggaaggattcaatcag

SEQ ID NO: 884866 - DNA, 670 bp, Homo sapiens
ttcgcttttagacttatatagttcagggtatctgatatggtttggctgtgtgccgacccaaatctcatttgaattgcagctcccataattcccacgtgttgtaggaggaaactagtgggagataattgaatcatgagggcaatttcccccatactgttctygtggtagtgagtaagtctcacgagatctgatggttgtataaggggaaacccctttcacttggttctcattctctctcttgcctgctgccatgtaagacgtgccttttgccttctgccatgattgtgaggcctccacagccacgtgaaactgtgagttcattaaacctaatttctttatatattacccagttttgggtatgtctttatataagcaggctgaaaacggactaatataacatcttccttcttaatatactatttttggcaaatagtgggctcatcaataagtgttttctccgtattctcaccataaaaatcacattttgagctaaaatatcccgttatgatcagaggaatcaatatcatgatgcagacaaagcacttctaatgtgctatatattccggcattctccagtgcatctgtgggatagtctaacaaattaaaaatgttatttatcttccttcactttgggctcatttaatattgtgctacaaacaaagacaatttc

SEQ ID NO: 884867 - DNA, 670 bp, Homo sapiens
ttcgcttttagacttatatagttcagggtatctgatatggtttggctgtgtgccgacccaaatctcatttgaattgcagctcccataattcccacgtgttgtaggaggaaactagtgggagataattgaatcatgagggcaatttcccccatactgttcttgtggtagtgagtaagtctcacgagatctgatggttgtataaggggaaacccctttcacttggttctcattctctctcttgcctgctgccatgtaagacgtgccttttgccttctgccatgattgtgaggcctccacagccacgtgaaactgtgagttcattaaacctaatttctttatatattacccagttttgggtatgtctttatataagcaggctgaaaacggactaatataacatcttccttcttaatatactatttttggcaaatagtgggctcatcaataagtgttttctccgtattctcaccataaaaatcacattttgagctaaaatatcccgttatgatcrgaggaatcaatatcatgatgcagacaaagcacttctaatgtgctatatattccggcattctccagtgcatctgtgggatagtctaacaaattaaaaatgttatttatcttccttcactttgggctcatttaatattgtgctacaaacaaagacaatttc

SEQ ID NO: 884868 - DNA, 613 bp, Homo sapiens
aacatataaaacaggtccttaaaatatggtttctttatttcacaaattagggtgataagttcatggatataggagatcctttaaccacaaaaaattaagaggaccttggagatcttgccttcacccttggcttaarttattatcatgtccagttgtcttaaagtttatttctttagatctaatttatcttctaggagccatactgcctatttgtgtcttttagataactcacaactcctgcaacttaacatatgttacaaaatgaactaatgatctttcttataaacgtaattttccactattttctgatttggtaaagattttcactattcattaaggtacacaagccagaaacttagacgtcatccttgacatcttaatttcttcactcctcatataaaatgatattttctttttcctgtatcatcaatatttcctctcttctgggcattttcttctatatacaaacattctggaatcttccatgtttttaaaaaaagtccttccttggttctacttttctgtccagttattgggcacatttctcagcttttaattttttttgaaaaaaagtcttgacagtggttatattttctcaccaactctgtttctt

SEQ ID NO: 884869 - DNA, 656 bp, Homo sapiens
gcctgtagtttcacctacttggaggctgaggcaggaaaattgcttgaacccgggaggcagaggttgcaatcagccgagattgcgccactgcactccaacttggggacagagcaagactctgtctcaaaaacaaaacagaatagaccccaaaaccaaaacaaacaaacaaaaaaatacaggaatatacaattggcccagtacaatgtttgcatatatgcctcatgaagaaatcaaatattaatacatgcarcaacataaatgagtttataaagaattatactaagttaaaggaggcagcgtaaaagactacatactgaataatttcatttctttgtaattctagaaagggaaaaaccaggattttaaaatatagggcagtgcttttcagggaccaaagtatgagagaggggagggattgcaaagggccatgtaagaactttttggagtgatagggatatgctgtatcatgttacagtgtaggctgcatgactgtatacattagttaagactttgaactatgcatttaaaattggtacattttattttaaagcagcagtacttgctaaagaacagtccagggcatgttactttattatattttctaatctttgagtatttttttaacatccaatttaaactggagtaagtatcaaata

SEQ ID NO: 884870 - DNA, 660 bp, Homo sapiens
acagtttgtccacaaggactcaaatatagaaatacagactctttctcagggcatattagtttgctttaacacaacaaaaccaaataataataaataacagcaacaaatgtagatgttcttaacattcccaaagctgttgatataattaaatcatcttttgaaattattgaaattattattatttttttaaatttatttttatttattaattttttttgagacagagtcttgctctgtcgcccaggctggagtgcagtggcgcgatctcggctcactgcaagctcagcctcccgagtagctgggactacaggcgcccgccaatgcgcctggctattttttttttcaccttgttagccaggatggtctcgatctcccgacctcgtgatccgatcgcctgctcctcccaaaatgctgggattacaggtgtgagccaccgagcccrgcctgaaattatttaaattattgactgaggttgttggtttttcaaagtaaatgtatcggcttagtggattcttatttctctgaaaaagcagtaatttggggcattatgttttctaaaatgaaaaaaactggattttgtgttcctagtcatacttcagtgcttattttgatttttaaataaatacaccatctggaagttgatggagtcaaaagaaaaag

SEQ ID NO: 884871 - DNA, 624 bp, Homo sapiens
ataaaatcaagaactcaataaattttactgcagctgtagagagtataaaatacctagaaatagccaaacaggtgaaagatctctaagaagagagctaaaaaaaaatactgaaagaaatcacagatggcacaaacagatggaatggcattccatgctcatggattggaagaaacagtgttgtgaaaatggccatactacccaaagcratttacagatttaatgcaattcccatcaaaataccaacattagtagccacagaattagaaaatcctaaaatttatatgaaatgaaaaaagagccagaataaccaaaacaatcaaaagcaataagtacaaatctggaggcatcacattatctgacttcaagttgtattacaaggctatagttaccaaaacagaatggtactggtataaaaatagagtcatagaacaatggaacagaatagataatggagaaataaagccaaatacatacaaccaattgatctctgacaaagcatatgaaaacacaaattggagaagggacgctccatttaataaatggtgctgggataactggcaagccacacatagaagaataaaactgtatccttatttctcaccatataaaaaaatttaagatgga

SEQ ID NO: 884872 - DNA, 552 bp, Homo sapiens
tggatcttgatgacagtttcccccatgctgttcttgtgatagtgagttctcatgagggctgatgattttataaatggtaatttctcctgctcactctctttctctcctgctgctgtgtaagatatgcctgcttcctcttccatcatgattgttagtttcctgaggcatccccatgcataaggaactgtgagtcagttaaacctcttttctttataaattacrcagtctccagcagttctttttagcagtgtgaaaacagactaatacaggagctgtcctgtttattgcaagtcatttagcagtattcttttcctctcccgctagattccagtatcaccttttacccttagctcccaattgtggcagtcagtaatgtcactgtgttttgccaaatattccttggggtcagttttgagaattccttatctaaatgtaagaatcactaatcaaaacagatattcatttataaaacaataataaaatgtcatatagttaaaaaagattgaattaaaatttacaacagtaatatagaaatcagaagcaggaaagaga

SEQ ID NO: 884873 - DNA, 562 bp, Homo sapiens
ttcgtactccgttcagaagaaatctgaacctgtttaaaaaattgtttagcataacccacagaatcatcttcttaattttatttattttggcaaagatgctgtcacagatgttcattattaaaaaaagaaaacacgttagtagaagaaggctcaaagtggagtagaggagcgacacgtgaagcgaagaatccacataaattttataagcaagtttatttgtgacctggtcatgggttagcaagtgtattttagcaacttgtaggagtctggtttccttttagaaggctgaggtaaattcacttatccctagtagaagctattgagataattgagtaatctttaatggaagggggacaaaattgcacctaggtaaaaaggccttcaaagagatgttccagaggatctggggamgataaaaagcccagcctgctctgttatcactttctcataccagtgtacctccaacacagcctagggaatttggaccttgaggttacagtctctcttcacacgaaaattctgcatgaccttgtcaactcagagcagtatgataaacagccca

SEQ ID NO: 884874 - DNA, 614 bp, Homo sapiens
actcttttccatgggtgactcagagtcccagtcttctggattgtggctccacctttcatcatattggcatccatgagtacaaggggaagtggaatggacaaaagcaaaccaattaattacatcctttgcctggaagtggctcacatcttttctgttcacctaactttgttgacaactaatcacawgatcacatctgaacgcaagcagagtaaataaatgcacttcttaactgggtagctgcttcccagctacaagtgactagcaaggttagtggagacattgatacttctaccgtccatttctctgactgccaaattcactcttagttctttgggtgggaaaattgcacctttcttcccacttggaaaccacacctatcccatcactaagaggaaaattccagattttgattaagaaactgcatcagctcaaaatccatgatctgtgggagttgtacatttgcttccatagaccagatatgacttctacctgtccagtgacctgctaatcaaaatgacaagctatttgcccctgccttcctccacaccaaatatgatggtagaagggtagaatatatgttaaaaatctcacagtagtcactactcctttgtcat

SEQ ID NO: 884875 - DNA, 605 bp, Homo sapiens
caccacatcattcaggctacagaactttgctgcaaaaaggggagcttggcagaggcagggggtgcccccaaattgagaaaaccctgaatgaactgactttaccccagtgatctaaggtaaagtttcttccacgggatgaaatgggggcttgagacagagatgaatttcagatgggttctcaagcagataaacttgtttctgctttcctgaagttttgtctggagattttctgctcctcctcacacaggaagctcagcatagcgtggacctttgagaggggttcaaaacacaggcacttgtgaaggccccgctcccgggaccactgggcagattccaggaagagtggccggcaccggatcgatgcgggactgattgttacagaactgtttccacgcaccatattctctctacaatctgggccctctcttagctccacratagagctcagaggtttctctgatgctgcagagccgggatttagggatgccacagaggagcggcggacgtcatttggtccacagtagcaccgtagtgggaccaggaacacatatgccttgttgacacctgcttgcgtctttgcactggacacttattcctgggggtgc

SEQ ID NO: 884876 - DNA, 623 bp, Homo sapiens
cctatacaccaacaacagacaaacagagagccacatcatgagtgaacgctcattcacaattgctacaaagagaataaaatacctaggaatacaacttacaagtgatatgaaggacttcttcaaggagaactgcaaaccaatgctcaaggaaataagagaggacacaaacaaacagaaaaacattccatgctcatgcataggaataatcaatatcgtgaaaatggccacactgcccaaagtaatttatagattcaatgctatccccatcaagctaccattgactttcttcacagaatcagaaaaaacaactttaaatttcaaatggaaccaaaaaagagcctgcatagccaagacaatcctaagcagaaagaacaaagctggaagcatcacactacctgacttcaaactatactacaaggctacagtaaccaaaacagcatgatactgrtaccaaaacagatatatagaccaacggaacagaacagaggcctcagaaataacaccacacatctacaaccaactgatctttgacaaacctgacaaaaacaggcaatggggaaatgattccctatttaataaatggtgttgggaaaactggctagccagatgtagaaagctgaaac

SEQ ID NO: 884877 - DNA, 586 bp, Homo sapiens
agtgaacaggcaacctacagaatgagagaaaatttttgcaatctatccatctgacaaaaggctaatatctagaatctacaaagaacttaaacaaatttacaagaaaaaagcaaccccatcaaaaagtgagcaaaggatatgaacagaaacttctcaaaagaagacatttatgcagccaacaaacatatgaaaaaaagctcattatcactggtcattagagaaatgaaaatcaaaaccaaaatgagataccatctcacgccagttagaatggtgatcattaaaaagtcaggaaacaacagatgctggaaaggacatggagaaataggaacacttttacactgttggtgggagcgtaaattagttcaaccattgtggaaaacagtgtggcgattcctcaaggatctagaactagaaataycatttgacccagcagtcccattactgggtatatacccaaaggattatgtatcattctactataaagacacacacatgtatgtctatagcagcactgttcacaatagcattgacttggaacctacccaaatgcccatcaatgataaactggataaagaaaatatggcac

SEQ ID NO: 884878 - DNA, 628 bp, Homo sapiens
ttctccccacagggtctttcaaagtgcacacatcttatattttgatgaaatccaattgatcaattttttcttttatgcatcatactttttgtattcatccaagaaatattttcctaaccataagttacactgatattctcttttcttttcttacatacagcttacagctttaggtcttacattatggtttatgataaattctgaattaatttttatgtatgatgccacgtatggattgaagttctgttcatatgtgcatatgtatatccaataattctaaggaccgtttgttgctaagattgtcctttctccactgaatttactttacaccttcttcaaaatcaattgaagatatatgttagggtctattctggaccctcttctgttctgttgacctatttgtccatcctgttaccaatatcacaccatctggatttctgaacctttataataagccttgaagtygggtattataaactgtctcacttgcttcttcttttttcaaagtttttttttttttttttaactattctaggtctactgcatcgccacacacagaatcactttctcatgaacatacatacatgtgcaccagaaatataaatatatgcacatcaagaccaagtga

SEQ ID NO: 884879 - DNA, 638 bp, Homo sapiens
aactgaactaaaatttgtcaattttaattagtttaatttgtcaattttggcttttgtttccattgctttttgtgttttagtgatgaaatctttgcccatgcctatgttctgaatgatattgcctagttctagggtttttatggttttaggtctyatgtttaaatctttaatccatcttgagttaatttttgtataagctgtataaaaggggtccagtttctgttttctgcatatggctaaccattttcgccaacactatttattaaatagggaatcctttccccattgcttttttctgtcaggtttttcaaagatcagatgcttgtagatgtgtggtgctatttctgaggtctctgttctgtttcattggtctatatatctgttttggtaccagtaccatgctgttttggttactgtagccttgtagtatattttgaagtcaggtatcgtgatgcctccagctttgttccttttgcttagaattgtcttggctacacaggctctttcttggctccatatgaaatttaaagtagtttttgctaattctgtgaagagagtcaatggtagcttgatggggatagcattaaatctatcaattactttgggcagtatggcttttttcacgatattgattcttc

SEQ ID NO: 884880 - DNA, 663 bp, Homo sapiens
catctcacgtctggtctcatgtctgagctacagtcccctggtgttagatctccctttatctgacagctgactttcctggatctttatctcctacctgaagccagagccacagaaagtctcctccctggaggtgggttctgtctactgaacagaatccattcttcgctcttcacaaactgactctgtgctacctttaacttttcttcagagattgtggcaaagaagcttccctgattgccgactacatccatccctttgccatgccctaactataaaycagcactatttctataactgcaagtaaaacgcagagataactttgaaaaatatatatttctttattggtttctttaaatttggcatattattttatgaaagaaatgcatgtgcctatcaaatatagtaagcagtgaacatctcatcttctccttcctctgatctcactccttggagaaactacatttaacagtctgtctatcagcagtggtattcaacccccactgcatcttaggatcacctggggagtttttcaaaatgctgatatctgttctccactcagtgatctgttgccaaatgtttatcaaccagagctgcaggttgggaggctgagttgtagtatttgctgatttccatggcataaatactgtttccatgacaaatttc

SEQ ID NO: 884881 - DNA, 643 bp, Homo sapiens
cataaatttatttttcactgtatattaattgtagatacagaaattaaggagctcagccatctagctattacttttgctacagtttgcagttgtgggaggggtgagctcaggtaggtttatttgtttttgtttttgttttttatstttcctaaccacacttcttttctcttcatcaccacacagggaaagggaaaggaaatgggaaagggaaggtgggaggtggaaggtggaagttagaggtaagtcagaagttctgtattagggaagtatctaccctctcagaaacaaatgagtggaactgaaactgctaaaagaccagcagcactttttttgactcttactaaagctgccttttactgaattttaaaaaaatcttaatttttgcttatacagatttttctagaatattttaatgtgattttcaattgatttttaatatgtaatatgtaaccctaacttaaagatatctttcccttcttagataatgctactgaatcagtagccctattataagcagtctgaatttcagttgttaggtttttgaaatactatgggcagctaattttagaataatctaaagattattttttctttatatttcttagatgtaattaatggaaatttcaaagtagaaatatattta

SEQ ID NO: 884882 - DNA, 627 bp, Homo sapiens
tagatgataaaatgctagaccagtgtaaatgagggtgactattttataggttttcttccctcccccacagtacctagcagagagttgagcattctgttgtatacacttaccaaaattagatcaaaataaataggtgtaatttaatatcttttcacagagattatgttgagctgaacatctgtaacaacaaaacagacaaaaaacctttctgacggaaaggttgatcatgatcaatctaacttagattccagaagatatatggaagcttgagagagagcaattatttacatttacttgtgtagtctctggaagatttatggttaggctgttgaaaatccaaattttgattcagattatcactatttccaattaaatgcagttacagagtactgctctatgctgttttactttaaagatgcgagccactacaattcgtttattgaaacaatttcttgcatttatttttttwaaaaaactacttttaatttttataggtcagtgtataagtttatggagtacataggatattttgatacaggcatgcaatgtgaaataatcacatcatggaaaaaggggtgtccatcccctcaagcatttatcctttgtgttagaaagaatccaattata

SEQ ID NO: 884883 - DNA, 566 bp, Homo sapiens
agtcttggaacatatcccctgaggaaaagtggggagactactgtatctacaaagatgacctgatgagtcctatagactttcaaaattagaaaattgtcagacatcattcagcccaaccctctcattctaaaagtaacaaagtgaattgaccagggtrccacagtatgtagaagcaaagcctaggtacaaagcaggtcttcagattgccaacagggacagttgccatcatggtaagagtgtggactttagaactaaagatgtgtgattgaaaaccaaaactaccacctcctggctgtgtgacctcaaattatttactaaacatccctgagccttggttttgttttttctcatctataaaatgagagttttaatacttacctgtggaactcttgtgaggataataaatatataatctctagttcacatggcaagaaacagcataacatagtggttaaggaagatgtgtagggcatctccatggggcaggggtgggggttagtaaaacaaagggagggaattaagaagggtggagaggtggagagcaaatccagccttaggcaaagctg

SEQ ID NO: 884884 - DNA, 669 bp, Homo sapiens
ttctgctctcctttccctgtgcccctcctatattcattataaagttttacattgaagatgggtagaggcacagtttcaaggcactctgtgacagccagcaagtagccagctatttattagctaactttgatgggactaaagttctattctaataaacccactcatgggctcctttcttctgcctataattggctgatgaatcattctttaatctgaaacaaaacagtcaacagaaaagccaaattatcttgtcattgtatctcttcaggtaagtcttcatamccatcctacacacccttccctcagaatcaaatgctttcctttttgaacaaatgacttataaattctagaaatgcagctgtgcacagtggcatgcctttactgccagctacccatgccaggttgacatgggtgaagaaatcacttgagtccaggagttcgaggctgcagtgggctatgatcatgcttgtaaatatcctctacactctagcctgagcaacatagcaagatcttgtctcttaaaaaattaaaagataattaaaaatgcatttgctgaaagagtaatgtccccagaaagcatgaagccaggccagggcacttatgaaggagaatgagggagttaggttggaggttacggatgaattctttctactccttacacaactaact

SEQ ID NO: 884885 - DNA, 642 bp, Homo sapiens
caagatctacattggcccctttcagccatggctacataggcttggatgcagggcaccaagtctttaggctgcacaaagcatggggacactgggcctgacccatgaaaccattttttcctcctaggtctccaagcctgtgatgggaggggctgccatgaagacatctgacatgccctggggagacatttttcccattgtcttatggataaacatttggctcctcattgcttatgctaatttctgcagccagcttgaattttgcytcagaaaatgggattttcttttctatcacattgtcaggctgcaaatttttcaaacctttatgctctgcttcccttataaaactgaatgcctttaacagcacccaagtcacctcttgaatgctttgctgcttagaaattttttctgccagataccctaaatttatctcaagttcaaagctccataaatctctagggcagggacaaaatgccacctgctatgtcttttataaatgtctttgctaaaacataacaagagtcccttttactccagttcccaataagctcctcatttccttctgagaccatctcagcctcgatttcattgtccatatcattatcagcattttgattaaagccattcaacaagtctctacggagt

SEQ ID NO: 884886 - DNA, 627 bp, Homo sapiens
tagttttgacaaacaaactaaggtaatacaggatgttaacaggagaaactgggtaaagagaattctgtgctatcattgcaacttttctgtaaatctgaacttaaaagtttatctaaaattaaattttagaggtgagagccattttaaggttaatagttcattctgctctttttaaaggtgaagaaactgataccttgaggggtaaagtgactttcttaaggtcataagcccagctaaaatagaaatcagactagcattcattttcttttatgcaactcagttcgtgttttagcaatcctaccaagtgccattaggctctgaagatattggaagaaatccaaacctattcatgagtagctcacaacagagcagaagagataaacacaaacaagtaaaacaagtagaamaaggtagagcaaagcagaacaagtacaacaaggatataaaacaatcctgaacataaactgactgcttactatattccaggcactaggctaagagcgttagcatattattctaagatatgctgacaacaacccttgaaggtaggtttgattacatcagatataaaacatcacggattgtaagattgcaccattattttctgtgctattaagaaagaaaaaa

SEQ ID NO: 884887 - DNA, 698 bp, Homo sapiens
gaaaaaataatgtagttaaattcatacttacagctttgctctgcaatttgttgaaagaatatcttaaggtatcaactgcttctgattcttctttggttacttcaacttcaaatctgtttaaaatagcataggcttcctgcaggatgaaggtggagtttagaaatatcacaagggaaagccattgccaaatgatttagacgccttctagaaacacattcctatgtcttagaagaagacagcatgttctagaaaagtggtttccaaaattaaaagtgtatgaaaagcmcctttagattctgactaccagatactaactctggatcacaggctctgaaatctgcatttaataagcacctaggtgattctgatggagatgtatatgtctctttttcctccttgaccctatgtcaacaccacgtaagatacagactgtattaaaacaggggttgactatacaaggaacagaatgaaatgatgtgggagatactccaaagaaaagaaacttgaatgatccaggctccaagggatgaccagtaattgtcttcaccaaaaaaaaaaaaaaaaaaaaaaaaaaaaaaaaaaaaaagtttggtaaagaattaagcttttgcagtcagggaaaatttgatataataatttattatatcttgaagtctggctggtcagcatccaaaatccccaaataccacgattttttt

SEQ ID NO: 884888 - DNA, 698 bp, Homo sapiens
gaaaaaataatgtagttaaattcatacttacagctttgctctgcaatttgttgaaagaatatcttaaggtatcaactgcttctgattcttctttggttacttcaacttcaaatctgtttaaaatagcataggcttcctgcaggatgaaggtggagtttagaaatatcacaagggaaagccattgccaaatgatttagacgccttctagaaacacattcctatgtcttagaagaagacagcatgttctagaaaagtggtttccaaaattaaaagtgtatgaaaagcacctttagattctgactaccagatactaactctggatcacaggctctgaaatctgcatttaataagcacctaggtgattctgatggagatgtatatgtctctttttcctccttgaccctatgtcaacaccacgtaagatacagactgtattaaaacaggggttgactatacaaggaacagaatgaaatgatgtgggagatactccaaagaaaagaaacttgaatgatccaggctccaagggatgaccagtaattgtcttcmccaaaaaaaaaaaaaaaaaaaaaaaaaaaaaaaaaaaaaagtttggtaaagaattaagcttttgcagtcagggaaaatttgatataataatttattatatcttgaagtctggctggtcagcatccaaaatccccaaataccacgattttttt

SEQ ID NO: 884889 - DNA, 573 bp, Homo sapiens
aggttactagattttgaagacttaattcctgtcccacagagcatgtatccccgtggaaatgtgcatgagtttgacaccacagcccatgggggagcatttttgaaattagttctatcactgttctgtgtgacccttgcacttcttctgaccatcccattagcggccctcattcattctcgcatttttctcgagagatcccatgaggtggagtgaaatctattgttttgtgtgtcaagccatgacttcacaggtttcttgcttttctactcmccacatcatccacatggtcagagtatccgtctaccctgaccctggaccctggacctagccagttgtcccaggtcaacatgacctatattatggaccaatcagagtcttttcttgagagtttgaaatgaggcttgaggaggagccacatagtctgggaagcagaaaaactcatgcacagagggaagaagaaacgagaggcatagagaaagaacttcctcagcttcctatactgtccctgattctggtctattctgaaggctcagttgcaccctggattctgggataaaccttttctcccttaac

SEQ ID NO: 884890 - DNA, 573 bp, Homo sapiens
aggttactagattttgaagacttaattcctgtcccacagagcatgtatccccgtggaaatgtgcatgagtttgacaccacagcccatgggggagcatttttgaaattagttctatcactgttctgtgtgacccttgcacttcttctgaccatcccattagcggccctcattcattctcgcatttttctcgagagatcccatgaggtggagtgaaatctattgttttgtgtgtcaagccatgacttcacaggtttcttgcttttctactcaccacatcatccacatggtcagagtatccgtctaccctgaccctggaccctggacctagccagttgtcccaggtcaacatgacctatattatggaccaatcagagtcytttcttgagagtttgaaatgaggcttgaggaggagccacatagtctgggaagcagaaaaactcatgcacagagggaagaagaaacgagaggcatagagaaagaacttcctcagcttcctatactgtccctgattctggtctattctgaaggctcagttgcaccctggattctgggataaaccttttctcccttaac

SEQ ID NO: 884891 - DNA, 631 bp, Homo sapiens
ttgtatggattaattcccagccctcttattaggtttgtgactttggaaaaattatttaacctctctgaagaaagaactgggtttgattcataatctcagaaaacacaatcccaaacaccataatctcagaaatcccaaaagctcaaaatccctaaaatctaaatcccgaaagtataaaatccatgtctaaaattctgaaaatcaaatccccctttaaaaatgtaaataaatayatttaaaagaactgtttattaaaataataattattttttccagaattatattttttggattttgatcttttgggatttcaacatttgagattatggcattggattgtgtctttcaagatcatgatcagcccttgaaggaactaatatttatcttcccaggtattttatgtaaattcatagatacatccacatgctttttccctagctcttcttgcctctgattttccaaagttgctctttctaggtcctgaatgatcagtccagccattcgtcactgcccaagagtccatgtatatctttgcttcagaccactctccttataaaaaaggtatactacttgaagctctgccctctggggggaattccccttttcactctcctttagggccactcctgag

SEQ ID NO: 884892 - DNA, 631 bp, Homo sapiens
ttgtatggattaattcccagccctcttattaggtttgtgactttggaaaaattatttaacctctctgaagaaagaactgggtttgattcataatctcagaaaacacaatcccaaacaccataatctcagaaatcccaaaagctcaaaatccctaaaatctaaatcccgaaagtataaaatccatgtctaaaattctgaaaatcaaatccccctttaaaaatgtaaataaatatatttaaaagaactgtttattaaaataataattattttttccagaattatattttttggattttgatcttttgggatttcaacatttgagattatggcattggattgtgtctttcaagatyatgatcagcccttgaaggaactaatatttatcttcccaggtattttatgtaaattcatagatacatccacatgctttttccctagctcttcttgcctctgattttccaaagttgctctttctaggtcctgaatgatcagtccagccattcgtcactgcccaagagtccatgtatatctttgcttcagaccactctccttataaaaaaggtatactacttgaagctctgccctctggggggaattccccttttcactctcctttagggccactcctgag

SEQ ID NO: 884893 - DNA, 631 bp, Homo sapiens
ttgtatggattaattcccagccctcttattaggtttgtgactttggaaaaattatttaacctctctgaagaaagaactgggtttgattcataatctcagaaaacacaatcccaaacaccataatctcagaaatcccaaaagctcaaaatccctaaaatctaaatcccgaaagtataaaatccatgtctaaaattctgaaaatcaaatccccctttaaaaatgtaaataaatatatttaaaagaactgtttattaaaataataattattttttccagaattatattttttggattttgatcttttgggatttcaacatttgagattatggcattggattgtgtctttcaagatcatgatcagcccttgaaggaactaatatttatcttcccaggtattttatgtaaattcatagawacatccacatgctttttccctagctcttcttgcctctgattttccaaagttgctctttctaggtcctgaatgatcagtccagccattcgtcactgcccaagagtccatgtatatctttgcttcagaccactctccttataaaaaaggtatactacttgaagctctgccctctggggggaattccccttttcactctcctttagggccactcctgag

SEQ ID NO: 884894 - DNA, 631 bp, Homo sapiens
ttgtatggattaattcccagccctcttattaggtttgtgactttggaaaaattatttaacctctctgaagaaagaactgggtttgattcataatctcagaaaacacaatcccaaacaccataatctcagaaatcccaaaagctcaaaatccctaaaatctaaatcccgaaagtataaaatccatgtctaaaattctgaaaatcaaatccccctttaaaaatgtaaataaatatatttaaaagaactgtttattaaaataataattattttttccagaattatattttttggattttgatcttttgggatttcaacatttgagattatggcattggattgtgtctttcaagatcatgatcagcccttgaaggaactaatatttatcttcccaggtattttatgtaaattcatagatacatccacatgctttttccctagctcttcttgcctctgattttccaaagttgcyctttctaggtcctgaatgatcagtccagccattcgtcactgcccaagagtccatgtatatctttgcttcagaccactctccttataaaaaaggtatactacttgaagctctgccctctggggggaattccccttttcactctcctttagggccactcctgag

SEQ ID NO: 884895 - DNA, 606 bp, Homo sapiens
tataatataatactaccccacaataaaaaaggacaaactactagtacccataaaacatgagtggatctcacagacataatgataagcaaaagaagccagacacaggcgagtgctcacagtatgagtccatttacatgaaggtgaagaacaagcaaaccaatatatactgataaaagtcaaaacagtggttcattctgggtagagatgaggtgtakactgggaaggggcatgagaaagccttattagattcttgatcccaatggtagttacatggatctataccttcataaaaattcagcaagctgtacttaagactattgtactatgtgcactttcctgtatctatgctaacctttaattttaaaaagccctaaaatgaaaatttaagagactgtaaataactctaaaacaagaaatggtgatcatagaaaagatccaacaggaaaccagcaaatcaaaaatgggaagtaaaagtttcagaatataagtggataacagaggaatacagaatgaaaacagagaggaaagaaggaggaggagaagcaagaaagaaaagcattaattttgaatgaaagaaaagaaatgaattaactatatgcttaacct

SEQ ID NO: 884896 - DNA, 618 bp, Homo sapiens
cgctgctggagattgccaggactcagcacttgctctgatccttctctggacctcatcatcagagtctgctgcaactgacttccaactgctggagggctttctctcaaatgcccagacccagggaatcaaaaacccctgtcccaggagcagccctgtattagtcagggttctcttagagggacagaactaataggatatatatatatatatatatatatatatatatatatatatytagaagattactaagtattaacttacatgattacaaggtaccacaataggctgtctgcaagctgcaaagcaaggatagccagtcccagtcccaaaactgaagaacttggagtctgatgttcgagggcaggaagcatccaacacgggaaaaagatgtagactgggaggctaggccagtccctccttttcacatttttctgtctgctttatattcgctggaagctgattagattatgctcaccagatgaagagtggatctgccttccccagcccactgactcaaatgttaatctcttgtagcaacacccacacagacacactcaggattaatactttgcatccctcaatccaatcaagttgacactcagtatttaccatcacaag

SEQ ID NO: 884897 - DNA, 673 bp, Homo sapiens
atttttttcatttcttggtttatttctttatttatttatttttgctataagggaccaacatctaaatcatgtctatagtttatataatagtattttataaatatttaatttcctgattttcataattgtgcaatggttatataagagaatttttgttttagggaaaaacaataactaaaaatgcaaaggggtattgtttcagtctattttggcttctataacaaagtattatagactgggtggcttatgaaaaacagaaatttgtttctcacagtcctggaggctgagattccaagatcaaggcaccagcmgagttggtctcaggtgagggctctcttgccggtttatagatggtgatttcttactggctgtgtctttgcataatggacaaggcaggtgcgctctctgaggcctattttataagggcactagtctcattaatgagggctccactctctgacctaatcatttaccaaaggccccacctcctaataccatcacagtaggggttagcatttaaacacatggatttgggggacacattcagtctgcagtagacatcacatctgcagcttattttcaaacaggaaaagaaaatctcacaccttttcggaaaatctgaaactgcgtcaaaatttaaaagttaaaagaagttaataaccacctcacggca

SEQ ID NO: 884898 - DNA, 673 bp, Homo sapiens
atttttttcatttcttggtttatttctttatttatttatttttgctataagggaccaacatctaaatcatgtctatagtttatataatagtattttataaatatttaatttcctgattttcataattgtgcaatggttatataagagaatttttgttttagggaaaaacaataactaaaaatgcaaaggggtattgtttcagtctattttggcttctataacaaagtattatagactgggtggcttatgaaaaacagaaatttgtttctcacagtcctggaggctgagattccaagatcaaggcaccagcagagttggtctcaggtgagggctctcttgccggtttatagatggtgayttcttactggctgtgtctttgcataatggacaaggcaggtgcgctctctgaggcctattttataagggcactagtctcattaatgagggctccactctctgacctaatcatttaccaaaggccccacctcctaataccatcacagtaggggttagcatttaaacacatggatttgggggacacattcagtctgcagtagacatcacatctgcagcttattttcaaacaggaaaagaaaatctcacaccttttcggaaaatctgaaactgcgtcaaaatttaaaagttaaaagaagttaataaccacctcacggca

SEQ ID NO: 884899 - DNA, 648 bp, Homo sapiens
gtggaacaactataaaagctgcatacacatagggaattccagaagaagagagggtgaaaggaacaaaagaaatattttaaaaaatgactgagaattttcacaaaattaatgtcagatatcaaactacatatccaagaagctcagagaacaccaggcagaataaatgtcraaaagactacacctaggcatatcatatacaaactgcagaaaatcaaagataaagaaacaatccttaaggaaaccagagaaaaacatatcttacctgtaaagcagcaaagataagaattatactcaacttctcctcaaaagccaggtgtattagtccattttgcattgctataaagaaatatctgaggatgggtaatttataaagaaaagaggtttatttggctaacggttctgcaggccatacaagcatggcaccagcatctgcttggcttctgttgaggcctcaggaagcttttagtcatagcggaagggaaggggagctggcatgttacatggcaagagatggagtgagagacaggaggaagtgttgggctcctttagaaaaccagctctcacatgaactaacagagtgaaaactcactaatttacatgggaagggtacaaagccatttatgagggatccacccccatgacccaaac

SEQ ID NO: 884900 - DNA, 706 bp, Homo sapiens
ttgggagttctagggccccgcccatgaccagttcctgtccatactaccacagctgatgctctcaggaaagcatcacctagtagcagaaggccaatcagctttagagaattaagccaccaaagctaaaaaccctcacagagtgcatttcacacccctgccacctccaactgaacaagtgctggtatccacatctaagagagtgatagacagttcacatcacaggactctatgcagacaaaccccagtaccaacccagagcctggtagacttgctgagtggcyagacccagaagagagacaacaatcactgcagtttggcttacaagaagccacatccataggaaaaggaggacagtactacatcaagggaacaccccatgggacaaaagaatctgaacaacagccttcagccctagatcttccctctgacagagcctacccaaatgagaaggaaccagaaaaccaactctggtaatatgacaaaacaaggctctttaacaccgtacccctacccccgccccacaaaaaaatattacactagttaaccagcaatggatccaaaccaggaagaaatccctgattttcctgaaaaataattcaggaggttagttattaagcttatcaaggaggcaccagagaaaggtgaagcccaatgcaaggaaataaaaaaaattatacaagacattaagggagaaatattgaaggaa

SEQ ID NO: 884901 - DNA, 636 bp, Homo sapiens
gactgttggcttggacttcagctagggctgttggcgagaaaacctaaacatgacttctccatgtcgtctctctacatcttcacagcatggcagctgggttcttgagtgagaatgccaagaggaccaggtggtagttgtattacttttcatgatttagcctcaaaagtcacatagtatcactttcaacatagtctaaagcccacccrgattcgaaagaaagagccataaatctcacctctcaatgggaggggtggcaggggcttgggaaatggtagatctcagggtaaaaatacacttttccatacatggctaaccaagacacacagtaataagaaaaagcctggtacaaacagtttggtcacatttcccctgctttcacaaagaaaaaatatgtaggggtgtgtgtgtgtgtgtgtgtgtgtgtgtgtgtgtgtgtgtgtgtgtgtatgtacctagaaattttctggaaatattgataagacattgttaacaaaaatttcctccaaagaatgagactggaagtccaaaatagaagaaaagctcacttttcattgcatatctttttactgtttgaactgttttctatatgcttgtgctattttcataatactaaatagaattttaaagtgatgaata

SEQ ID NO: 884902 - DNA, 635 bp, Homo sapiens
gcaaaagacggctacaaggaaaactacaaaacactgatgaaagaaattatagatgacaaaaacaaacagaaatacatcccatgatcatggaagggtagaatcaatattgtgaaaacaaccatactgtcaacagcaatctacaaattcaatgcaatccccatgaaaataccatcattcttcactgaattagaaaaaacaattytaaaattcatatggaaccaaaaaagagcccgcatagccaaagcaaggcaagcaaaaaaaaaaaaaaaaaaaaaaaaatcaaatatggaggcatcacattacctaatttcacactataccataaggccatagtcaccaaaacagcatggtattggtataaaaatagacacataggccagtggaacaggatagagaacccagaaataaacccaaatgcttacagccaaagatcttcgacaaagcaaacaaaaacatcaagcagggaaaggacacctttttcaacaaatggtgctgggataattggctagccacatgtaggagaataaaactggatcctcatctctcaccttatataaaaataaactcaagatggattaaggacttaaatctaagactggaaactataaaaattctgaagataacactggaaaaac

SEQ ID NO: 884903 - DNA, 593 bp, Homo sapiens
tcaacagaatatacattcttttcagcaccacatcacgcttattctaaaattgaccacatacttgaaagtaaaacactcctcagcaaatgcaaaagaacagaaatcataacagtctctcagaccacattgcaatcaaattagaaatcaggattaagaaactcactcaaaactgcacaactatatggaaactgaataacctgctcctgaatgactactgggtaagtaatgaaattaaggcagaaataaagaagttatttgaaactaatgagaacaaagacacaatgtactagaatctctgggacacagctaaacagtgtttagcggtaaatttatagtgccaaatgcccacaggagaaagcaggagagatctaaaattgacaccctgraatcacaattaaaagagctagagaaccaagagcaaagaaattcaaaagctagcagaagacaagaaataactaacatcagagcagaatcgaaagagaaagagacatgaaaaacccttcaaaaaaccaatgaacccagaagctggtttttgaaaaaaattaacaaaatagatatactgttagccaggctaataaaaaagaaaagagaga

SEQ ID NO: 884904 - DNA, 593 bp, Homo sapiens
cccctgtgactgagccctctaaactcttccaacttctgcccattacccagtcccaaagccaatccacattttcaagtatccttatagcaatgctccatttcttggcaccaattttctgtgttagtctctttgcattgccataaaggaatacttaagactggataatttataaagaaaagaggtttaattggctcacagttctgcaggatgtacaggaagcatggtgccagcatctcattctggtaagggcctcaggaaacttacaattatggtttagacaatgaagggagagcaggcaagaggaagcaagagagcaagcaaggaaacaatagagcaacgaggaagagmcagacttctttagactaccagctctcacatgaactaccagagcaagaactcactcattgccacggggatggcatcaagctattcatgagggatccactcccatgattctaacacctcctaccatgcccacctctaacattggaggtcatattttaacatgagatttggaggggacaaaacatccaagccatatcactcctctatcaaaaatgaatagatttggcaggcagaaaatcataaggaca

SEQ ID NO: 884905 - DNA, 625 bp, Homo sapiens
gttcttatagagtttgaacttgttagccaccacagccacacgaaccaattatttaaataaatcaacctctgtctctcatatatttgtgtgtgtgtgtgtgtgtgtaattccacagaaagagaatcataaatatatatgaaatctaacacaccaggtgataascaatgtgcagccaaggttgagagcaactggtacaatggatctgtaagaaattgtgatgaatcctatcaatatcaactacacagattagagggttcttccccatctcatggtcagcagaatgacctgagcagtgtcagtggtggagctccgcacggcctaggggccccacaaggcctagcagcctcccacatgggcaatgagactatagaggcacaataccacagcaggcaggctattcagccaacaaagggataggaaccaccaaaggcattccaagggtcattttagggacagacttaaaagacagtcaggatttatgggagggacaaggcaggaaatgtaggtttctctggtgggtcttggagccaatggtcacttccagccccattgctataagctaaacccagacaattttcatggatgtgcagcccagcatggtatagagatggaatgtaagtatcca

SEQ ID NO: 884906 - DNA, 625 bp, Homo sapiens
gttcttatagagtttgaacttgttagccaccacagccacacgaaccaattatttaaataaatcaacctctgtctctcatatatttgtgtgtgtgtgtgtgtgtgtaattccacagaaagagaatcataaatatatatgaaatctaacacaccaggtgataaccaatgtgcagccaaggttgagagcaactggtacaatggatctgtaagaaattgtgatgaatcctatcaatatcaactacacagattagagggttcttccccatctcatggtcagcagaatgacctgagcagtgtcagtggtggagctccgcacrgcctaggggccccacaaggcctagcagcctcccacatgggcaatgagactatagaggcacaataccacagcaggcaggctattcagccaacaaagggataggaaccaccaaaggcattccaagggtcattttagggacagacttaaaagacagtcaggatttatgggagggacaaggcaggaaatgtaggtttctctggtgggtcttggagccaatggtcacttccagccccattgctataagctaaacccagacaattttcatggatgtgcagcccagcatggtatagagatggaatgtaagtatcca

SEQ ID NO: 884907 - DNA, 645 bp, Homo sapiens
attgaggtgggaggaagcaggggcattaatccaccaactctcattcctctttggttgagagttgtctctgaggcattaagtctgcaacactttcatgctgccctgttcacagacagagcacatgcctaccaccagaaccgctaaggcagagatgcaagaygccatgatgtgtacaagaatggcctgcagatgacctctggtatgggattagaggatatgaacagggtagctacagtgtctaccagagtgacacaacctaactcctacccactagcatagtatcttccttccagtcatctgtcacccaaagggcttttaggcagagaaacttcaaaaaacacatatgcctgaagttgagttgatatccatgttctggaaaacaaagaaagaggtactatggaatgaacaattaaaaagccctgagtgaacgcaaaggaagtatgtattttctgtgtggattttctcagtaacaggccagtttggctcttttcagctagggtaattggaataaaggtgttccattttgagacaagagggaaagccggggtcactgcttgcagccaggagctaaaatgaggcttccatgaagactggcaaaaaggaagtagactgctgctgcctgagattatggcatttagggccaag

SEQ ID NO: 884908 - DNA, 614 bp, Homo sapiens
attgttacttaagcaaatttctgcagctggcttgaatttctccccagaaaatgggttttccttttctactgcatcatcagcctgcaaatttttcaaccttttatactctgcttcctcttgaatgctttgccacttagaaatttcttctgccaggtaccctagatcatctctctcacattcaaagttccacagatctctagagcaggagcaaaatgctgccagtctctttgctaaagcacaataagaatcacctttgctccagttcccaagttcctcacctccatctgaaaccacctcagcctagactttttggcaaaaaccattccacaagtttctaggaagctccaaactttcccacatcttcttgtcttcttctgagccctccaagtctctaggaagttccaaactttcctacattttcctgtcttcttctgagccctccatrtgattccaacctctgctggttccccaattccaaagtcactttcacatttttgggtatcttttcagcagtgccccactcccagtcccaatttactgtattagtctattttcatactgctatgatgaaataccagagactgcataaattataaagaaaatgaggtttaatg

SEQ ID NO: 884909 - DNA, 614 bp, Homo sapiens
attgttacttaagcaaatttctgcagctggcttgaatttctccccagaaaatgggttttccttttctactgcatcatcagcctgcaaatttttcaaccttttatactctgcttcctcttgaatgctttgccacttagaaatttcttctgccaggtaccctagatcatctctctcacattcaaagttccacagatctctagagcaggagcaaaatgctgccagtctctttgctaaagcacaataagaatcacctttgctccagttcccaagttcctcacctccatctgaaaccacctcagcctagactttttggcaaaaaccattccacaagtttctaggaagctccaaactttcccacatcttcttgtcttcttctgagccctccaagtctctaggaagttccaaactttcctacattttcctgtcttcttctgagccctccatgtgattccaacctctgctggttccccarttccaaagtcactttcacatttttgggtatcttttcagcagtgccccactcccagtcccaatttactgtattagtctattttcatactgctatgatgaaataccagagactgcataaattataaagaaaatgaggtttaatg

SEQ ID NO: 884910 - DNA, 420 bp, Homo sapiens
acttataccctgtatgtttatcagtgtaaaagcaacatactgaatgaaactcttaatcattgaaaaatatctgaagattgattttaaaaatagaggataactataagccaaaaactaagggtgtaataggaaaagcaatgcaggaaacarcatcagataacacttattgaattctgactatatgcctggtattaaacaaggcatttaatatactttatcttttttttgctgttaatcttcagaacagtctcattttataaataaggaaagaaattaaaagataatgtagtagacaaaatggcttcttgaaaaatgcctacatatgaatctccagaatgtgggaatgctgttacatggcaaggaggaattaaggttaccagtcaggtgaccttgaaatgtgacattaaccttggattaccc

SEQ ID NO: 884911 - DNA, 611 bp, Homo sapiens
gtttgctgagaaagtcttgatttctctttcacattttcttttcttttaattcttcacttttgaaagataatttcacaaggtacagaattataggtggtggtggggtttctcttaacatcatgatatgatttggttgtgtccccacccaaatcttatcttgaattgtagctccatgagcggggctctcatgaagaatctatgctagggcagtgaggaagggaaatgtggggttgaagcccccacacagagttcctcctggggcaccacctagtgtagctgtgagaagagggccacygtccagaccccagaatggtagatccaccaacggcttgcaccatgtgtctggaaaagccacagacattcaacaccagaccatgaaagcagctgggagggaggctgtaccctgcaaagccacaggggcagagctgcccaagaccatgggaacccacctcttgcatcaatgtgacctagatatgagccatggagtcaaaggagatcattttggagctctaagatttgaccaccccgctggattttggacctgcatggggcctgtagcccctttgttttagcccatttctcccatttggaatggctgtatttacccaatg

SEQ ID NO: 884912 - DNA, 704 bp, Homo sapiens
tgggatttcttcagccccaagctactactggggttcccctggccagggttggaggtaagaacctgatgaaaatagggacttgggatatgagtaggtaggtgtgaaaaacttttcttttatgaaatgcagggattagtgcaacatttttttcaccctcttgcttctgtgttttggatcaagtcctgtcttgttctctcctgtttccccatatcctcctatatttgttagacctcttacaattcaaactagcttacttaaagacaagataatttgttggttcacattccttgaaaagtccaggtataaaaggtagaggagctaacttcagacacgtttagatgtyatcaggacgttttctctctgtgtctctaaactctacttctctgtgttggcatcatttctagttaaactggtcctttccgtgtggtgaaaaataaggctaactgaatgcatagtcatcgtggaaggaaagaaacctgcttttttaccagtgattaaatcagtcccagattaaatgatgccagctggccaaccagggtcacaagccagtttcttagtggaaaaaggaagtccttgactggaaacccctccagaatacatggaaaggtgtaggagaattggagaagggattcaggggagacagcaagggaaaaatttgtcctgcaattcttgtttctaagtgaaatcaaggaccttttgaagtt

SEQ ID NO: 884913 - DNA, 630 bp, Homo sapiens
ctttggaaacattatgctaagtgaaagaagccaaacacaaaaggtcacataccatatgatcccatttctatgaaatgtccagaataggcgaattcataaagacaaaaagtagattggtggttgtcagggactgggaaaatggaaaactgaatcatacatgtttaaatggtgaatttaatggtatgtgaactatatagcaataaaaagtaaattaaaaaaacaacagaattgggctgggcatggtggctcacacctgtaatcccagcctattgagaggctgaggtgggcggatcacctgaggtcaggagttcaagaccagcctggccaacgtggtgaaacamcatctctacaaaaaatacaaaaattagctgggcgtggcagcatgcatctgtagtcccagctacttgggctcaggaggctgaggcacaagaatcacttgaaccagggaggcagaggttgcagtgagccaagattgtgccactgcacactccagcctgggtgacagagtaagactctgtgtgaaaaaaaaaaagaataatagaattgggcaaatgatatcaacaggaaattcacagaagaaatatgaacaggtttgcaatttcaatgagatgtaatttttttcagcctctc

SEQ ID NO: 884914 - DNA, 582 bp, Homo sapiens
ctgctttaccattggcagctgattagattgtgcccactagattaagggtggatctgccttccccagcccactgactcaaatgctaatctcttttggcaacaccttcacagacacactcaggatcaatactttgtatctttcaatacaatcaagttgaccctcagtattaaccatcacaacctgtttgcaagttctgtatttttccatttctgcaaatttaggctctgcttgaccacaggccccaattcccagtgtttaagcagagaaatgctaggtgacacagagaggtctattgagttacctgttcataacaactgtaccttctctcgtgagattattatgakgattgagtgcaataatacctgtaaaggccaaagaaaaggacttaacccagagcaactattcagtgggtgctagctgctattcttagaatactgaaaatgttgacttcatgcttaaatgacatcaatttggctcatgtgatgttcttagctcattcagaacgttgtaaacaattacccattttcttttggttctgcatatagctagaatttttttttatttcattcttgaagtcggtct

SEQ ID NO: 884915 - DNA, 548 bp, Homo sapiens
tgggctgtttatcatactgctctgagttgacaaggtcatgcagaattttcgtgtgaagagagactgtaacctcaaggtccaaattccctaggctgtgttggaggtacactggtatgagaaagtgataacagagcaggctgggctttttatcktccccagatcctctggaacatctctttgaaggcctttttacctaggtgcaattttgtcccccttccattaaagattactcaattatctcaatagcttctactagggataagtgaatttacctcagccttctaaaaggaaaccagactcctacaagttgctaaaatacacttgctaacccatgaccaggtcacaaataaacttgcttataaaatttatgtggattcttcgcttcacgtgtcgctcctctactccactttgagccttcttctactaacgtgttttctttttttaataatgaacatctgtgacagcatctttgccaaaataaataaaattaagaagatgattctgtgggttatgctaaacaattttttaaacaggttcagatttcttct

SEQ ID NO: 884916 - DNA, 554 bp, Homo sapiens
gatctctttcctgcttctgatttctatattactgttgtaaattttaattcaatcttttttaactatatgacattttattattgttttataaatgaatatctgttttgattagtgattcttacatttagataaggaattctcaaaactgaccccaaggaatatttggcaaaacacagtgacattactgactgccacaattgggagctaagggtaaaaggtgatactggaatctagcgggagaggaaaagaatactgctaaatgacttgcaataaacaggacagctcctgtattagtctgttttcacactgctaaaaagaactgctggagactgygtaatttataaagaaaagaggtttaactgactcacagttccttatgcatggggatgcctcaggaaactaacaatcatgatggaagaggaagcaggcatatcttacacagcagcaggagagaaagagagtgagcaggagaaattaccatttataaaatcatcagccctcatgagaactcactatcacaagaacagcatgggggaaactgtcatcaagatcca

SEQ ID NO: 884917 - DNA, 654 bp, Homo sapiens
tatttgatacttactccagtttaaattggatgttaaaaaaatactcaaagattagaaaatataataaagtaacatgccctggactgttctttagcaagtactgctgctttaaaataaaatgtaccaattttaaatgcatagttcaaagtcttaactaatgtatacagtcatgcagcctacactgtaacatgatacagcatatccctatcactccaaaaagttcttacatggccctttgcaatccctcccctctctcatactttggtccctgaaaagcactgccctatattttaaaatcctggtttttccctttctagaattacaaagaaatgaaattattcagtatgtagtcttttacgctgcctcctttaacttagtataattctttataaactcatttatgttgytgcatgtattaatatttgatttcttcatgaggcatatatgcaaacattgtactgggccaattgtatattcctgtatttttttgtttgtttgttttggttttggggtctattctgttttgtttttgagacagagtcttgctctgtccccaagttggagtgcagtggcgcaatctcggctgattgcaacctctgcctcccgggttcaagcaattttcctgcctcagcctccaagtaggtgaaactacag

SEQ ID NO: 884918 - DNA, 686 bp, Homo sapiens
ccttttcttcataaaatgttcccttttaaattgttcaagaagccgcaaagcaaattgaatacttaatatacaccctgatttatttatacttttttaaaagctctttatatttaaggataatcctccttttataacctgtggtctcttatttttaatacataattttgatcacttgtttttaaaaaatgccaaacttttaaaacatataatctcttaacctgattataataaaaaaatagctttgatagcttggtctggttattagaaatttaaactgtgcttttgtttttttcatgccatttccctttgacctaatttttgacgtgtatgcaaatactcaagacctataaaacacatacgtcttgagagtcagtagctgcctactccaagtgggaaaagactttaggaaactgtttcaataatcacattcatggagtatagtgacacagaaaccaagtctcactaccttttcatgtgttctagttctttccaaagggatattttgtaaaactacataaagggcaacttatatgactastatttccatcatcgaagaggatatgataatctcgaatatgaggtcagaatcctcccccagtcttcttctgatcacagaagtggtaaaaggagataaacacacaggacacttcatcagtagccaggtgctattgtctcaatacttgtgc

SEQ ID NO: 884919 - DNA, 545 bp, Homo sapiens
tggtaggaggtgtttggatcatggggacagtctcccccatgctgttcttatgatagtgattgagttctcatgagatctgatggttttataaggggctcttcccccttcactcactctctctcctgccaccatataagacgtgcctgctaccccttcctccatgattttaagtttcctgaggcctccccagccatgcaaaactgtgagtcaattaaccctcttttctttataaattacgcagtcccaggcagttctttatagtagtrtaaaaacagactaatatagagaaatttgtaccaggagtggggcactgctataaagatacctgaaaatgtggaagcgactttggaactgggtaataggcagaggttgggaacagtttgagagaactcattgggaaatggagcaaaggttgctcttgctacactttagcaaaaacacttgcagcattttgctccggccctagacatctgtggaactttgaaattgagagagatgatctgaaattggaacttatacttaaaagggaaacagagcataaaagt

SEQ ID NO: 884920 - DNA, 612 bp, Homo sapiens
gcagaagaatgaaactagacccctatctctcaccatatacaaaagttaattcaaggtcgattaaatactttaatggaagatcagaaactataaaaatcctagaaaaaaatcaagaaaaaacttctccggacattgccttaggcaaagaatttataactaagccttcaaaagcaaatgcaagaaaaataaacaaaagaaatttaattaaactaaaaggattctgcacaacaaaagtactaattaacagagtaaataaatgagcaccctacagaatgcgagaaaaaatttgygaattatacctctgatgaatgactaatatccaacaactcaataccaactcaacaagaaaaaaacaaataaccccattaaaaaatggacaaaggaaatgaacagacatttctcaaaagaagacatacaggcagtcaacaaacatatgaaaatataatcagcattactaatcatcagataaatgcaaattaaaaccatagtaagataccatcttacagcagtaagaatggctattattaaaagttaaaaaaaaacagatattggcatggatgcagagaaaaggtaatgcttatacacagttatgggaatgtaaattagtaaaac

SEQ ID NO: 884921 - DNA, 562 bp, Homo sapiens
gttccccaggcatgacagtatagtttatatcagactaacttctccacatataaaactataaaagctgaacaagaacaaataatgaacaagaacaaataatgaacaacaacagcaaaaactattggaaggcctttgagagcaacaaagcaggcagaaatttgagtagtttcaatttttgaaaggaggggaaaacacaaggtaagtggtaagttcatcctagtttcctctgaagttactttccaatttggtgacataggataatagagccgtaagcagagagcagtgttcttacttactaggctgagaaaataaatttcacaattcaggaactgacagagaaactggaaattgtgagggtggaaggcttcaaattttgctatagaattccttcatacgttgaccagtgasctgtctatgcacagggaagtttccaggaaagcaaacaaaaagcagcagctggaaggccaaagagccaagcacaaattccagcagctgccagtgctggggagatggattggacttcaagttcccatagttagaggggtatgacaaacacttttga

SEQ ID NO: 884922 - DNA, 636 bp, Homo sapiens
gcctttccttgatgcatttggtaaggacattacaagatagaaaaaataggacaaaatctctcattaaaatagagagaccccaaacaaaattttagcaaattgaatccagatagagagagggatgataaatgatggatgaattcatagatcattatttacagtttatgtgattatgcatataggaaatatataaaatatttctcttcatgacaaacttagcttaaaaacaattacagtccatttacatatattcaatccactaaaagaacctagaagtctatataaatatatatatataataactattagaattaatgaattttgcagagtcactgggtataaggttaacgtatgaaaaggaattttatttttatgtactagcaacaaacaaacyttaggaaatgaaatttacaaaatgccatcaatgtaatatagtcagaaatataaaatacctagaaataaatctaagacctaggaataaactaacaaaatgtgcataagccctcaacactgaagactacttatagcttcacataaaactcaacacatgtatgtgtgtgggaatgagatttaataaaaattacagagatcattacttcttaaggtccagcttacttgaagagattgaatataaat

SEQ ID NO: 884923 - DNA, 540 bp, Homo sapiens
gtagaatatcattgtggttttcataaacctgctgttaagccaaaattatcaaactactttgctatcttcaagaattcactttgattctactgagttagcaattttttgaaaagggaattttcttaaaatggtagcatttttaaagtattagaagttcagtttctttcttctctgggattctttaattctctatgctagaattaggtaagtactcacctgtacagatcaatcagaacagaagttctattaaatgtaaaataccattctactataaagacayatgcacaagtatgtttattacagcaatattcacaatagcaaagacttggaaccaacccaaatgccaatcagtgatagactggataaagaacatgtggcacatatacaccatggaatactatgcagccataaaagggtgaattcatgtcctttgcagggacatggatgaagctggaaatcatcattctcagcaaactaacacaggaacagaaaatcaaacaccacatgttctcactcataagtgggagttgaacaatgaca

SEQ ID NO: 884924 - DNA, 644 bp, Homo sapiens
ggttgatttttggactcccaattctattcctttgatatatgtgtctatgcttatgctagtaccacactgtcttgacactgtagctttgccgtaagtgttgaaatatggaagtatgagtcttctacatttgcactctttttcaagattgtggttgctattctgggtyctatgcatttacacatgaactttaggattaacatgtcaatttctacaaaaagtcatctgtaactttataggaattccatttagtttttagataaaatatggaaaattgcctgcctaagaatattgagtcttcaatccacaaacatggaatggctctctatttttatgtcttctttaatttctttcatcatgatttgttgttttcaacaaatgtacatgtcttgccattattttcttaaataaattcctgtgtatttcattcttttcgatgctattgtaaatggatttttttcatgatgcaattgaaaggtataggttgatattttgtcctgcaccttgatgagttgtttattagctctaataatattttggagttatgtggattcttaaaagttttctacatatgtcatcatgtcagtatttcatgtatgggaaatctaatggtgaaaaacatgaagtattcatatatctgggagtac

SEQ ID NO: 884925 - DNA, 614 bp, Homo sapiens
ggccataagtcactgggcacttcccaggcttcctccttgctgggtgagagtgaggctaccggtcagaggccttgtactttatacaacccctcccatccccactttttagagtgagcccctgctccagcttcagcaggggggatcatcccctccccacctctatcaccaccaccttctccctaaggcggcccccaaacatagcacctggctctcctagaacttcaggccccccattgatgcaggtggccagccrcccagtgctgactaggtgggaggcttccaactacctggctatctaaatgcccgctgcttcaccagctgctggctaccttcctgcttagggcagtgtgactcactgacggattgacaaggaggcctggcaggacccatcacccagttccatccctctaatgctgtgtccccaggctcactcctctctacccagttccccgacctgcttacttgggtttggggtgtcaacaggatccaggcatttgatgccacaagtgtcaggacaacatctcttcttccctggacactgccagtcactctggcactcaggtttcttgtatctaaggcactgggcagatttcttaggaggacagactccagct

SEQ ID NO: 884926 - DNA, 643 bp, Homo sapiens
ggtcatgccactgggctacaagagtgacactctgtctcaaaaaaaaaaatctatttcacacaccctttattgccttctacctaaatcctatagattccttcattcatttatacaaaccattcacacaaaagttgtttaacatttcttaccacatgtcaggtattgcactaggcctagggctacagaaaagagcacgcmcacggagtcgacaccacatggttgttaagaacctgaacttcaaagtcagacttacaggttggaagcaaatcactgaacctctttgaacttcagctacctccactgaaaaatgagagtgttgctgcctctggagtcgtacagttgttgtgaggagtatttggaaagcactcagcaaactgtctggtcccctcagtacattacacattgtttttattaccggcgtgtccctgcacacattaagcgcacagggagctgtcagtctttaactaaatagcttagtccttgggtctggacccatctggctctgtcccattaaatgtttgacaaaacatggtcttatttcttgacaaaatagacctgattgggcctattggtaggtaggtagacagacagatagacagatcttaactgacagatagatatagatagatagatagatatagat

SEQ ID NO: 884927 - DNA, 643 bp, Homo sapiens
gaggtgatcgctcacatttttaattctaaaaaaatttttggctgggcactgtggctcatgcctgtaatcccagccctctgggaggccaagatgagtggattgcttgagtccaggagttcaagactagcctgggtgacatagtaaaatcccgtgtctacaaaagatacaaaaagtagccgagcgtggtagtgtgcacctgtagtcccagctactccagaggctgaggtgagagggtcacctgagcccaggaggtggaggtcacagtgagccaagattgtgccgctgcactccagcctgggtgacagagtgagaccccacctcaaaaatacaaatamaaataaaaatttttatctcctattacttctctaaatatcctcctctctcttttccctcattctaaaacttgaattgggtgcgtttacacactcttattttttccatatccatctgttcttgattcatatctacctggttttatttcctaatgtcttttatggatgttaagaaaacatgggtggatggatgtttatggaacctcttctctttttatggatcttattccttttatccccctaaaagtcttaaaattcttatttcaaggtgattttggggattaggctgttacttacattttgtctcgagt

SEQ ID NO: 884928 - DNA, 661 bp, Homo sapiens
ataataatgggagattttaacaccctgtcaatattataacaatgagacagaaaattaataaggatattcaggatttgaactaagctctggaccatgcagacctaatagacatctacagaactctccaccccaaatcaacagaatatacattcttctcagcatctcattgcacttattctaaaattgaccacataattggaagtaaaacactcctcagcaaatactaaagaatggaartcataacaaacagtctctcagaccacagtgcaatcaaattagaactcaggattaagaaactcactcaaacctgaacaactacatggaaactgaacaacctgctcctgaatgactactgcgtacataatgaaattaaggcagaaataaagatgttctctgaaaccaatcagaacaaagacacaatgtaccagaatctctaggacacatttatagcagtgtgtagagggaaatttatagcactaaatgcccacaagagaaagcaggaaagatctaaaattgacaccctaacatcacaagtaaaagaactaaagaagcatgagcaaacaaattcaaaagctagcagaagacaagaaataactaagatcagagcagaactgaaagtgatagagacatgaaaaacctttcaaaaaatcaatgaatcaag

SEQ ID NO: 884929 - DNA, 586 bp, Homo sapiens
ggtttgtgattgaagttgccgccttaaatatatttaaggagaaaaaaagagtcagtttgaattttttaaaaaatgtaacatttggtaaatagcagtacagatggtccacggacataaaggtgcaacgcgagactgaaacgtgtgcaacgccgtcytaagagaagcccctcgcccgctggcggggagcggacagtgccccgcgccgggagcttggaaagccggccggatcggacgctggcgctgagctacgtggtaaacccgggaacagttcctctccccgttctctgggcccgaggtccgcgcctacaaaacgcgtggggtgtcacaccacaaggagacaccccgagaatgcggtcaggggccgcgagacggtggcgggggacagcgctcagtacaccgctcggcgctgcacgcctggagaacgcccggtgccacgggacgccttgggcccggttcgaatcccgactgcgccactgactcgctgaggacccgcgggcgagcgactccaccgtttcgacagggggtgcgggatgtgcggctcaaccagagaagccttgaggactcctagtgaccgaccgttcgtgca

SEQ ID NO: 884930 - DNA, 526 bp, Homo sapiens
ttccacgggcctttcttagggcttgggtttttttcctgagtgataagggaagacattgggaggtctgggcttaggactgacatgatgagacttaaatagggactctgactgctgtattaagaacagagtgggccgggcacggtggctcaggcctgtaatcccagcactttgggaggccgaggtgggcagatcacgaggtcatgagatcgagaccatcctggctaacacgatgaaaccccgtctctactaaaaatacaaaaaattagctgggcgtggtggcgggcgcctgtagtcccagctactcaggaggctgaggcaggagaatggtgtgaacccgggaggcggagcctgcagtgagctgagatcgtgccactgcattccagcctgggcsacagagggagattccatctaaaaaaaaaaaaaaaaaagaatagacctagagtggtggaggtggacagtagtgaagcagggagaccagttctaccattttcgagcaagttagtaaaacttcctatgcctcagtttc

SEQ ID NO: 884931 - DNA, 548 bp, Homo sapiens
gtcaaatcaatcttgatgaagaacaagactgggggactttcacttttcaatttcaaagcttactacaaagcaacaataatcaagatcatgtgatactagcctaaggacagcctgttgatcaatagaatgraattgagagtccagaaataaagtcctacatttatggctaattgattttcaacaaggatgccaaaacaattcagtgagaaaaaaaaaaaaaaaaagagtcttttcaacaaatggtgcccagacaattggatatccacatgcaaaaaaaaaaaaaaaaaaaaaaattaagttggaccccaaccacataccatatataaaaaactaatttaaaatatatgacaaacctatatgtaagagtcaaaaatacaaaactcttagaagaaaacatgagaatacatcttcataaaatttatcagatactatactaaaagcaaaagcaataaaagaaaaaaataaattggagttcacggaaattaaaatatttttgcactacaaaacatgattttactgactgggagaaaatgttggcaaatcatata

SEQ ID NO: 884932 - DNA, 600 bp, Homo sapiens
ttaacaagtagatctagaattcatatagggacccagaatagtcaaatcaatcttgatgaagaacaagactgggggactttcacttttcaatttcaaagcttactacaaagcaacaataatcaagatcatgtgatactagcctaaggacagcctgttgatcaatagaatgaaattgagagtccagaaataaagtcctacatttatggctaattgattttcaacaaggatgccaaaacaattcagtgagaaaaaaaaaaaaaaaaagagtcttttcaacaaatggtgcccagacaattggatatccacatgcaaaaaaaaaaaaaaaaaaaaaawttaagttggaccccaaccacataccatatataaaaaactaatttaaaatatatgacaaacctatatgtaagagtcaaaaatacaaaactcttagaagaaaacatgagaatacatcttcataaaatttatcagatactatactaaaagcaaaagcaataaaagaaaaaaataaattggagttcacggaaattaaaatatttttgcactacaaaacatgattttactgactgggagaaaatgttggcaaatcatataactgatgaggga

SEQ ID NO: 884933 - DNA, 548 bp, Homo sapiens
gtcaaatcaatcttgatgaagaacaagactgggggactttcacttttcaatttcaaagcttactacaaagcaacaataatcaagatcatgtgatactagcctaaggacagcctgttgatcaatagaatgaaattgagagtccagaaataaagtcctacatttatggctaattgattttcaacaaggatgccaaaacaattcagtgagaaaaaaaaaaaaaaaaagagtcttttcaacaaatggtgcccagacaattggatatccacatgcaaaaaaaaaaaaaaaaaaaaaaattaagttggaccccaaccacataccatatataaaaaactaatttaaaatatatgacaaacctwtatgtaagagtcaaaaatacaaaactcttagaagaaaacatgagaatacatcttcataaaatttatcagatactatactaaaagcaaaagcaataaaagaaaaaaataaattggagttcacggaaattaaaatatttttgcactacaaaacatgattttactgactgggagaaaatgttggcaaatcatata

SEQ ID NO: 884934 - DNA, 548 bp, Homo sapiens
gtcaaatcaatcttgatgaagaacaagactgggggactttcacttttcaatttcaaagcttactacaaagcaacaataatcaagatcatgtgatactagcctaaggacagcctgttgatcaatagaatgaaattgagagtccagaaataaagtcctacatttatggctaattgattttcaacaaggatgccaaaacaattcagtgagaaaaaaaaaaaaaaaaagagtcttttcaacaaatggtgcccagacaattggatatccacatgcaaaaaaaaaaaaaaaaaaaaaaattaagttggaccccaaccacataccatatataaaaaactaatttaaaatatatgacaaacctatatgtaagagtcaaaaatacaaaactcttagaaraaaacatgagaatacatcttcataaaatttatcagatactatactaaaagcaaaagcaataaaagaaaaaaataaattggagttcacggaaattaaaatatttttgcactacaaaacatgattttactgactgggagaaaatgttggcaaatcatata

SEQ ID NO: 884935 - DNA, 625 bp, Homo sapiens
acatcataaacaaaatgattattctggtgaaaaaatatcccataaaaatcttaaagtagaatgttactgagtgtttagaaagttaatgtgtgggaccaaatatataaaattgatatctggggaaccatcaaaatctacttagaagacattaagttatttacaaagcacttttttaacagcatttgctgtttgatgtttaataacccagtccttcaaatattacatatcactagaattaacatcaataaaaatcattagtgcctagtttgcaagcttcccttgcttttattttattctattttcctaactccttgaggtgggctcagagtccttggttgtagcaaggccagagagcagtttcagtggtgaacttgtaaaatagccaatattcccagctaattcacactggctatccagagaaggaaattcactatctgccagttgaaagtccctaggtagaatgaaggcgacrttgtaagtctgcaaaacatgagtttactgattcatatttagatgagctaagaaaagttcttgagaatctcttgagcagacaggctcaacatatctttttggggacacaattcaacccattgcaaacacagtagtatgcattttgtggcacact

SEQ ID NO: 884936 - DNA, 568 bp, Homo sapiens
gccatgagatcaattgaataacccagggagtgagtgtaagtggagaagagaggagatccaagtcttagccttgcagtggctaaaaaagctgatatttagaggtaagttagatgaggcagagtcagtgttaatgtttctcaagaagcactattagcattttgggtggaagggtgctttgccatgcaagacagatgtgaagattatacggtatttagaatctctgaatccacccagtaatagcagtgccaccccccagacattgtgacaggaaacacatatttgtatttgccccctcatrtttgtaaactacatgtatttgttccccacctatttgcaaatcactcaaaagatatgtactgctagaaaaccattgactgcatggctattaaaatcactaaatggttttaagtatccactctaattataacattttattttaggaattatgagttacaaatatacttggattagaaaaatacatattatgaagtgttacagtattaggaaatgtgaacatttgtttgtaacaatctcttagggccaagaaaatagagcaagctcaaaaaag

SEQ ID NO: 884937 - DNA, 593 bp, Homo sapiens
aaaagatatgtactgctagaaaaccattgactgcatggctattaaaatcactaaatggttttaagtatccactctaattataacattttattttaggaattatgagttacaaatatacttggattagaaaaatacatattatgaagtgttacagtattaggaaatgtgaacatttgtttgtaacaatctcttagggccaagaaaatagagcaagctcaaaaaagcagtaaatctactttaaccatgctgtcacttactctggattaactgactgattctcttaatrtcatttgtaaaacattctgacttttactcaaggcataataaatgctgggttagtaaactaattttcggaatacggcacacttctcagcatcctatccctgtgtttaaattatgtgctcagttgtttttgttcccaaactattatgcttaaagggtctatgatattgtaaatatactacttattttggcattatgtagattaagaaatcaatgacatattgtacactatttcaaaatcactattccatatgatggtatccatccactcatttctacggtgataatgaggtcatcatatgtgtacattt

SEQ ID NO: 884938 - DNA, 558 bp, Homo sapiens
catgctacattctcagtacgtacggtgacttttttgtaaatggtggctagaaaggaattcttattacatataatgggcccttgttagatctgcactttggcccttcccttctgggcacgtctttcatttctcccctccatctatatggataaagcaggaacatttataattataaattgatatgtgagattctcccttacttgccaaaattaattggaccaaaattaggcaaaagaccgcaacagggcaaacaacaagtgacaaaagtcacttgtctgggaattgtttccattggggaactgsgatgcatccaaagaccatattttctgacatctggacttgaggtggagaacagagaagctctgtatcagaagagaatgatgcaaatgtaatcgtaaaggcaattagaagaagaggcatcctgagaactaggaacccctgcttccagttctctcattccatttctttttcctggtaccatgagacacccatatttagtggttaaaattgttcagctaccaattcaaaagtgaaaagagatggaatcttatgtatagt

SEQ ID NO: 884939 - DNA, 576 bp, Homo sapiens
gacgacatcctcagtggaaggatagtagaggaaaatccttcaatgcaggtggtgatccaagggaaaatttccatactgggtatgggataatgaaataaaaccaagcaaaactaataatttatgacctgtagttagtagtaaaatgatttgtttcccatattcatactgagggatctaaaatataccagttcaatcatcctgctaaaaacagtagttatttgagatataacaaattatatttctgaagatatcaaaatgctcataaaataataatgaataaacagaccaaaatctgtgagagtaagaacctggagaagtaagcagagtcctaaagctgctttacccccaagagcatgtgctgaacccaatcctgcattggagctctatttttaatggcttcatggttgctgggggaagtgcaggcaaaccataytactttaaaggtgagtactgaaaaggttgttaactcgagataattgagcaatacatgcaaacacttctcactctcatttctatcttcactccacccccaggcaacagcttgccaagttgtattgttgttatagagcatgaaag

SEQ ID NO: 884940 - DNA, 568 bp, Homo sapiens
taactcaagaaatctgcatgatttgagttatcccaccccatgggcctccctgctttcgctttcttcctcctttgtctggatgctcttcaagggcccagaattccagcttctcactacatgctcatcaccacatggagagcaaacttctcaggtacaggggaagtagatggcaccctcccactgccctgggacctgctgcrtgggagtggtggaggaaataatgctgattggctgtgtcaaagcccagtctccattcagccaggagctgctgtggtcattcaatctctttttaaaacaaattacagaagatcacattctcattgtgaaaaaatgcagcaatgtaattttaacatctatgtctagagctacagcttgcttttgatttttactcagcaaatgcttggtcaatacatggaaatctacttctttttaactaatgcatagcattctatccaatggatgccctatagttttttatccaggccatattgaccgacatttaagcaatttcaaatcttttactattgcaaacaatgctgcaactcagctttttacatgcgcctttctg

SEQ ID NO: 884941 - DNA, 568 bp, Homo sapiens
taactcaagaaatctgcatgatttgagttatcccaccccatgggcctccctgctttcgctttcttcctcctttgtctggatgctcttcaagggcccagaattccagcttctcactacatgctcatcaccacatggagagcaaacttctcaggtacaggggaagtagatggcaccctcccactgccctgggacctgctgcgtgggagtggtggaggaaataatgctgattggctgtgtcaaagcccagtctccattcagccaggagctgctgtggtcattcaatctctttttaaaacaaattacagaagatcacattctcattgtgaaaaaatgcagcaatgtaattttaacatctatgtctagagctacrgcttgcttttgatttttactcagcaaatgcttggtcaatacatggaaatctacttctttttaactaatgcatagcattctatccaatggatgccctatagttttttatccaggccatattgaccgacatttaagcaatttcaaatcttttactattgcaaacaatgctgcaactcagctttttacatgcgcctttctg

SEQ ID NO: 884942 - DNA, 617 bp, Homo sapiens
atttctaactcctctcagcttgctcccttcatgtcatccattgacgtatcatcatcttatttttatttcttgaatcataaactacatatttccatgaattttgcagaaaggacaagtcagatgtgttctaaaatgttcttcagtttactatcatcaatcttttttaaaagtaagttcttcctctacgttgtgagtaccgtgttctctgttttatgaggcagattttctgtaaagcctcatgagcttctttttttcrtctatttactcatttctgatccaacaaaagaaagaaaataaagacaagtctgcctagacataggacttttctgctaaaaaaaaaattaaatgaaaaataagactttcttcggttcttctttgctggccatctgggtgctatttgaatccttaagcccagaaattatgccagagagctggcgcatgtgacagcctccaaatctctctacaacttccagtgtttttagtctaatatttactataacttcgatggttcacagggagtgaggctgtctcagaaaccagccggctgatcatgttactataagaaggccacatactcctgaagaatctgtgtgaacagtaaattcaaactccaaccc

SEQ ID NO: 884943 - DNA, 647 bp, Homo sapiens
tcctcttcttaccaactctcccaggccctaggcctgcctctccctcagcaaatcccagaactgtctctagtccagcctatgtgggacagaaagagagcagacaggtttggcccaccagggagggtttgcccctgccctggacttcgtaaagagctgagaatgagcccccagcagtgcagagtggggccctgacaggcagatgtccttgcccacggtcctgcacacctcttcacacagtgcttgtgtgtatgtgcatatgtgtgtatctcacacacagcccctcactggcacattccgacatcacatgtccgcaggctgcacacatgtgggcttaatgccacaagtgagagtcctgcatccctccctggtctcactcatgggcacacagggtgtcacacctgcacattcaccaccatagatatccgtgctcctccccatgccggcacagactcacacatacacacgcacaaacagccagatatcagccatggatacaaccctcacagtcamaggcactcacacgaatttctcaccccttcacacacccagagtctcatgatggagacagcacatgggaatggagcaggcagggaatggagcgggcagggaatgaagcaggcagcagaggaaagccctcccagacagag

SEQ ID NO: 884944 - DNA, 678 bp, Homo sapiens
cccaatgtcgttcattcccactttgcctgaagtccatttttggtacagaaatgtaatttagtgggtggcttttcccacaactctgggccactaacacattcattttcttctctgcttttaaagtttatgttcctttgtgcacaacaggcagcacatcaccactttcctgcaaagtcacaggcaacagagaaactcctaaaagctcctgcaagtcttgggagagactggagcatttccawtaagaccctcatgctactagattgttcttaggaacccctcagaagattcagcaacatgcaaagtgacttgtagaatgggataataatcataagggtaataaacgcctatttgatagtgcttactttctgccggacactggtcaaacggctttctatatatcctttcatttaactctcctgacaactctgtgagggaaatgctgtcaatatctctatgtttcagaggggagatctgaggcatagtgacattaggacactctacaggtcacattattaggaatgggcaaagccaagcttggaacccaggcagcatgattccagagcaaatactcttaccactatgttctttttttctcctatagctacatatgctcctctttcatgaagccttcctggccaccccacaaacaatgctaaatactagatggtgacagaacaa

SEQ ID NO: 884945 - DNA, 625 bp, Homo sapiens
gttttgtctcaaaagttaattccttgaatctcaagattgagtgggagtcccttgccatggccccctttgtctagtgaacccaatttttttttgtctcttcactttccattgtcctcattagacttgaaccttcatgaaggcatttcccacttctccacaactgaggaattgttggcaaatatttctcgaacacactcttyggaaaaattcagctgtgcacattaaatcgtaagatgatctacaagatcacagacccctctgaggctaatcatgtacatgtctatggatctcagcacagaaaacctcccttcagtgcctggtatatcaaatattctaatcttcactataaaactctgccaagggtaatgcagacaccgtttggatgcctccagtgatggtgagcttactatctctttgaatatcccactgagaccactgaaatcattggaagctggctggctgtctggctggatgaatgaatggataggtggggggatggatagatggattcactgactggataggttttattgggacccttctctatatcaggcctttttctagtaaaacaacgatgggcaaaatcaaggccctgctctacaagagctatattctaagggataaa

SEQ ID NO: 884946 - DNA, 660 bp, Homo sapiens
cccacttctccacaactgaggaattgttggcaaatatttctcgaacacactctttggaaaaattcagctgtgcacattaaatcgtaagatgatctacaagatcacagacccctctgaggctaatcatgtacatgtctatggatctcagcacagaaaacctcccttcagtgcctggtatatcaaatattctaatcttcactataaaactctgccaagggtaatgcagacaccgtttggatgcctccagtgatggtgagcttactatctctttgaatatcccactgagaccactgaaatcattggaagctggctggctgkctggctggatgaatgaatggataggtggggggatggatagatggattcactgactggataggttttattgggacccttctctatatcaggcctttttctagtaaaacaacgatgggcaaaatcaaggccctgctctacaagagctatattctaagggataaaaagacaacattcaaacgaatatttaacatagtgcaaagtgtgattcctgctatggaggaagtaaagcagggtaggcagtgtggcagagatgggaggcaaagactattttaaataaactggccaagaaagaccttcctgagatctgtaaaaaaattaaaaaaaaaaaaaaaacacaagaag

SEQ ID NO: 884947 - DNA, 660 bp, Homo sapiens
cccacttctccacaactgaggaattgttggcaaatatttctcgaacacactctttggaaaaattcagctgtgcacattaaatcgtaagatgatctacaagatcacagacccctctgaggctaatcatgtacatgtctatggatctcagcacagaaaacctcccttcagtgcctggtatatcaaatattctaatcttcactataaaactctgccaagggtaatgcagacaccgtttggatgcctccagtgatggtgagcttactatctctttgaatatcccactgagaccactgaaatcattggaagctggctggctgtctggctggatgaatgaatggataggtggggggatggatagatggattcactgactggataggttttattgggacccttctctatatcaggcctttttctagtaaaacaacgatgggcaaaatcaaggccctgctctacaagagctatattctaagggataaaaagacaacattcaaaygaatatttaacatagtgcaaagtgtgattcctgctatggaggaagtaaagcagggtaggcagtgtggcagagatgggaggcaaagactattttaaataaactggccaagaaagaccttcctgagatctgtaaaaaaattaaaaaaaaaaaaaaaacacaagaag

SEQ ID NO: 884948 - DNA, 695 bp, Homo sapiens
aggaaaagtgtgtttgccttcaccatgcctgatccacagactcaatttgtaagccaattgctcaggaaacagaaaaactaacaagaacatacatttgtatgagaagacattttattatttcttctttgggcaatcttgacttttgagaaagagaatactttatgagcttgaaatactgtataaactatattaaagaaaatctttcctttggtcctggaaaaaaacacatagatgttcagatttccattaagacagcaaactggaaatttccctttgatattcaggttttaaattctgtagattaaatactgggcaaaggtaagtctgcccatcttctcatgaaaatcaacagttggctgatttcactgcaaactcattggatcaatctgttgtgatttgattcagccaaggcaggaccaagtgataatcttttgcctggatctgcactaaataaagtaccatcacccacactcccctctctaagctagcagttcttaaatgttggcaaagayacttattcactagatctagggtggagtccataaatttacattttcgatcagtgtttctaggtaactccagtgcaggttttggtaaatggcataaaatctcattttaagaaagctcaaggagacagaaatgcagggagtacccatcaggtaagacttgaggcacctggaggcaattgacaatgc

SEQ ID NO: 884949 - DNA, 522 bp, Homo sapiens
tgcacaaacctatctctgactttattcttattgatacctatctaggactgctccaaaaagaaataaaagggtagaatccatcaaagcagttccggtaaatgaaacaaaattcagaaatctctgttctctcccctctcattccttgcagcttcaytagaaactgagttgtagaaaagaaagaaaggccgattgaggaggtaggagacctctttttaactgagcactgcttgtgactgcaaaggagagaattaactttgtcccaggtctaccttgaaacatttcaccttcaccattgtcctgtgacataagaatgtctccactattttaatagaagaaaaaaactaagtatgagacagctctggcacttgcatagctaatacacagtgcaccagagaagatttggttatgaccaggcatactaatttcctattgctgctgtaaaaaaaaaaaaaaaaatcataccaaacttaatgacaaagcaacacagatttgtgatcttaagttctggaagtcagaactcct

SEQ ID NO: 884950 - DNA, 682 bp, Homo sapiens
ccactttccaaataattaatttggtttatatggccaacccatgagtttgtgaaacttcagtgaacctggtttactaagagattaccatggcagggtccttttcagagcctggtttatggcagatatccaaagagtatttaatcaaaaagtgaatgatagagaagactttttattggccaggactrtaggtagagaggacagaagacacagagataaaaaacatacagagcttccttggaagttctattttgagcaagtctaactgcagcttgattttcttgtcagggatcttattcttctaaaatatagtcttcaatgagttcattgagggtttacctatactaactgattctgttgatgtgtgatcaccctacactgcagcaagctctgtgccaggaactgatgatataggtatgaacaaggcagccttgatgtctgctcccatggtatagcaggtgaagaaagcacacctaccttctgaatcataatgtatcttacctagattcgatttttagcattttgagcaattcaggttttatggttatgtgtggaagagttcccttcttaactgtgatgtctttaggattcctatgtatttcagtctaggttttctgaatgaagggaggtaaggtggttcttgtggatacacctgaaagtcagtgccattttttaatgactaatt

SEQ ID NO: 884951 - DNA, 624 bp, Homo sapiens
gactgcatctggtgagggcctttctgctacatcatcccatggcagtagggagaagggtaagggagtgtgcaagagcaagggggaaagaggacaaactcatccttgtatctagaaccactctttgataacctgctccagagataatggcattgatccattcatgagagcagagcccccatgacctaatcacctcttaaacgtcccacctcttaaccgtcacaataaaaattaaatttcaaaatcaattttggagtggacattcacaccaaagcagattccaaaagaatcatgttaaaaataccccagattataaaattatgaatccaaaaccaaaaagacaatataaagcaggcataaaaacaaaagtttaggttgaaacaakcacttttatttataagtatagatggcaaagaacttagcataactgcttttgtctttgggttgagtgtaggtgagtgggtagtatgtgttatttttccaaaaaagactaggtggttgtagttaattgtaaactcacagttagccagtgatttgacatgtttataaaggtatgtggtatattttcttttctctttccaacaccttgtgttgcaatttaggacactgtgaagtaaaggaagaatt

SEQ ID NO: 884952 - DNA, 624 bp, Homo sapiens
gactgcatctggtgagggcctttctgctacatcatcccatggcagtagggagaagggtaagggagtgtgcaagagcaagggggaaagaggacaaactcatccttgtatctagaaccactctttgataacctgctccagagataatggcattgatccattcatgagagcagagcccccatgacctaatcacctcttaaacgtcccacctcttaaccgtcacaataaaaattaaatttcaaaatcaattttggagtggacattcacaccaaagcagattccaaaagaatcatgttaaaaataccccagattataaaattatgaatccaaaaccaaaaagacaatataaagcaggcataaaaacaaaagtttaggttgaaacaatcacytttatttataagtatagatggcaaagaacttagcataactgcttttgtctttgggttgagtgtaggtgagtgggtagtatgtgttatttttccaaaaaagactaggtggttgtagttaattgtaaactcacagttagccagtgatttgacatgtttataaaggtatgtggtatattttcttttctctttccaacaccttgtgttgcaatttaggacactgtgaagtaaaggaagaatt

SEQ ID NO: 884953 - DNA, 549 bp, Homo sapiens
cggggcttggcttgcaccagagtggcttgtcctgccagttgagtgcaacactgagatgccaacggtatttatcttcattaagtttccaaagcaatggcttaaaagtttgtgcacaatttgcaaattcagttttaaagatggtatcctcaattctgcagtttctggaatggtggcttccaggtatttggaaccccttgccaaaatgttgatcacagatgagagaataacgtgttgctatgctatgcagagaattgtaattcattatatactctctagggggaattacagaagtgctkaccatttgagaggaccaatgatcaccatttgagtaaagcaaaaatggtcctcagaatatcttaagatcgtgagtcatgaatttcttaaagttcagtgaatgccaggcttagtgacatatgcatgtagtcccggatactcgggaggctgaagtgggaggattgcttgagcccaggagtttgagatcagccttgacaacatagtgagaccctgtctcaaaaaaattagtttcgtgaaggcaatacctggcaatac

SEQ ID NO: 884954 - DNA, 649 bp, Homo sapiens
gttatgacaaagagggacatcagataaaagtggagtagcagaggtaagacccatcacaaaaagacaggggacatgggattgagagaagagttgagagtgtcagcaatccatagttattagaagatgacctggttagttcccaggaggactgagcaaccaagacgagagkgctctgttgccacgggattatcttaaggattctgaatgacagtgtcctgatgtccatgagctctgcttaactgctaagggtgggctgcctgcctttcttctttcaaggtgtctgttgcacctggggtaaccttgagcacactgctttctcctaagacttggaagactctagggtgcaggaagccactccaaagggccttggtgtgtagccattggctgtttcactgaagctggaatttgatttttgaacattgtgagcctggggtgcagaggaaaatgagtgatctcagctgcctagtgagactgcataccgatgggcctttgcaatccacatgaagaaagcctgaatatgcagcaactttttctttctggaatatggccaaccagtgctcaagctcagggtttactccaatgctccgattgtctttgccttatgggagactgttctatgttaattggaattcttgcaaatgggattcat

SEQ ID NO: 884955 - DNA, 638 bp, Homo sapiens
tgtgtatgtttggtttcccaacaccatttattgatgataatttcctttccccattgtttattcttggtgcctttgtcaaagatcagttaactatatgtgtgtggatttatttctgtgctctttattctgtttcattggtctctgtgtctgtttttatgtcagtaccatattgttttgattaccatagctttgcaatatagtttgaagtaagagactgtgctgctcccagctgtgttcttttttctcaaaattgctttggctatccaggtcttytgttgttccatacaaatgtcaagattttttttctatttctttgaaaaatgacattggaattttgatagattacattgaatatgtacatggctttaggtagtatacactttttaacaatattaattcttctagtccataaacacaggatagctttacatttaatgttttcttcaatttatttcatcaatgttttatagtttaaagtgtacatatctttcacctccttggttaaatttcttgcagcatttttcacagcagccaagatatggaaacaaactaaacacccatccagggataagtgggtaaagaaattatggtacatataaacaatgaactattactcagcctttaaaaagaagaagatc

SEQ ID NO: 884956 - DNA, 568 bp, Homo sapiens
gcaggaatggtgatgggtatgttaatatgacagtggtaatcactgtaaaatgtatatgtatatcaggtcatcatggtgtacaccttaaatatatttaaactttgtcaattaaatactaaatatataaaatataagtaaatattttttaaaacaagaaaaatcccagatatgcctggaggctttcctattagggtagacttggtggggagaccatagtgctcagaaaacagtgtggagcacagcaagraaagtaactcagaatacaattctgaaagtgttcattaaagcacactcaatgtagaattaattaggtgttcattttatggttaatccacctcactcaagttatttcaaaaagagatagaaagacaactggagaaaagctgttcacattcagttccttttgtggcttaattgaagctagaagccaaatcatcaaaacaggggaatcgcccagttttgatttttaactactgattgatatggtttgactctgtgtccggacccaaattgtaaaccccacatgttgagggggagagctggtgggaggtgattggatcatggggac

SEQ ID NO: 884957 - DNA, 617 bp, Homo sapiens
cactcccagtgtggggagaactgtatgtaatcctttctcaacctaaattcttgtgggaggagaaagagggcacagagccacgtatctgatcaggattgaacctctcacaggggccagcagagaccattgcagtctgtaactacaattgtcacacattcttaccccaaaaggggctttcagaggtcacctggctgagcacaccgcttcccagctggcgaccacctgtcttagtgactttaacactctggattcaaaataggaaaagtgtgtgctcttacttctctggctcaaggcaaggtttaaagatttaaaggtccctgggttctttgggtaaggatttctcattgtgaatataaagggattcttatcattaccaaaacattctgaaaacaatgctgttcctggcgtttaacccaatktcgtatctgcacacaagataactatgcactgaaatcttactatctaatgttttcaaggtttcaaaaagcaagagagtggtaaataagggggatattgcaaatggaatttctctgcagcctcacaattgagcttctgaaaactccataaaaaaacactaagtgaattaagcctataaaatctgcattgtccccactttt

SEQ ID NO: 884958 - DNA, 608 bp, Homo sapiens
caaggacaataaatattgtttttggttttcacattcataataaaattctttacttgattgagtataaagttttaagacaagagaagctgacaagcaatagacaaccaygttgcccatcataaaacctttatttatattcagagaacagacattgagtttcagttaagtttcccttggaaataatcatgcaaaggctgtatcattaagcattgtaacaggtagatgaggataagtcttcctcatccctaaaattcttctgaagtagaatagacacccacctgcctggagtggttaaggtaagaaggaaggacaggtaatcctggagagaggtactgcccctccacttcgctagtatttgcaggtctagattctatctttctaaatattacagaatgactcaatagcacattctactaaaaaatggtaatgtatcatttaaaaactcttcaaaaaatggttatgaaactgcacttactgttgcttattatactatcttgatcataattttgtaatgtttgagagaggtactctctcctcacctccccctcacctctcagatccatcagccatccttctctgccttgttctgtgtccctggggatggaccc

SEQ ID NO: 884959 - DNA, 671 bp, Homo sapiens
agtcctaccctcttctctctgcatagcctcattattatttatcttcttttattatttatcttcttcttctattatttatcttctctttccagggaaattctatttcctgcccagggcctgactattatatgttgtatcaaaaagacattgtgaaaataaagaaaaccgcaaaaatgaaaatattatcaaaacctttttattcatgaaatgcatgttagacaccaaaatattggtggcttttcatatcaccaatgctaaaaaattaattaaggggtatatatcttttttattccttggcattacctaagatttagagaataaagaatgtccaaacaccctggttttcctggggcaatcctgatttagggctgttttcctgaatgcagtcgttaacggaaccccgttttcctctcaaacttgycctagtttggataataagttatattattattgtgcctctaatactttctttgcaaaaggagttacaaagcaccatgggcagagtctagtcatactcaccccagcttgtctgtttgggcactgtctggaacagatagactaggctgggaacgaaggtgtgtctgccaggaccaaacgttccaaaaacaaattttttatcagatgaaactataacctagatcttataatgattaaatgcaatttctgtagtg

SEQ ID NO: 884960 - DNA, 665 bp, Homo sapiens
aaaacagttctctcaatatccctaagtttaatggctcaatatttagcatgcgtttcataactccagctttttttgggtggaggtaggtagggaaaatgggaatatagtaaagagttttcaaaacacttgctatttgtaaggcttctttttttatgtaccataacgcacacagccctctcaggcatggggtcaggctgtttccttggagtggaattgaacacgaatgaggaatagtgagaaactgggttaggctaccatggaaaatatragagccctggaaagcgtcattacaaggtctgacaatgattccagggttactggagaaacttttttttttctcttttccctctttcctccaagtacccagatccctccaacaggatcccagaagtgtgacactaacaatgaattttcaatgcatcctgcacccaagggatttgcaacttagtgggacacacatgttaatagacaactaaaccagtggtcacaacaaagtgagacaagggctaccgcagagaggcagagaggctggaaagccaattgtcatggatatagatggtcatcgtttctgtctttggctctaccatatgctagctctgtggctttgagcaagctacctaacttctctaagcctcaaaattttaacctgtgaagtagagataata

SEQ ID NO: 884961 - DNA, 639 bp, Homo sapiens
gtacccgcttgtggaactgggaggacatttcaagcagagggagaaggatatgaaaagggttgtaggtggaaaatatcctgataagttcacattaagaccagattaagatctctggggaatctaaagaataatggaaccatggtacaaaacccctctcaaatgtattctaatatcagtgttaaatctgaaagtaactgggaggcacatttctgatttgaccttcaacaactaggttgaatgctttgtttcttcaagagatttttgcttttgtgagtacctaggaatgttgaatctccttgtagggtcatccagggacctcagagttacctatgaatggagtgggcaaggattttggccaagactgaaatatgagcagaaaccaaactgtgaagggtcgttgytgggggctttctgaggagttgtgcagggaaagtttggtgaaaaatttcaggctggttgcgtgacatgcaaaggtaactctggtggccttacaaggaatggatttcagtggcagttctcagtgggaaggaggggacttgttgggagatgaaaacaatctgagaagccttttagcaatgcataataacccttggcttttaggggcacagtgttgggaatgcgtagggggagccaatgagg

SEQ ID NO: 884962 - DNA, 647 bp, Homo sapiens
aagttacgtgttgctcctagggcaccaatgccttggcacatgggtcaagcacagtcctgtggccagagagcaacctcaggcagagagacacaggagaccatctgtgtgttgagaactactgcagatgacctcaggtgacccaaaagggtatgatgggccctgctagctggaatactcagagatgtgggtagataacccacatacggacatgtgtttgttcactggacattcgtttttcaactgttccttttatagtacaatgattgtaaaaatgtcagctgtcttgcctttgaaaggagagttaaatagcaaaagaataatccagaaggctgggtgtccaaccgcattccaggcccagaatcattattttgtgtcgtttacataaattctcagttaygaatgattccattttaggacatgaataggctgaacttctactgcatatacaagtttttccagccttttccatctccctgaattagttcattgtgaaataggttgcctgatggctgaaaaagacaaaaaacttcaagagttttggcactcctcaagtcttccatgccgcctctgtttgttgtatagtattagtgaatcgcaatgtggcacacaccgatcatcctaaaaatatgtccagaaaagttgcatag

SEQ ID NO: 884963 - DNA, 615 bp, Homo sapiens
tgctgatcagagggggccctggtagttggctctagctgtgctttgttagtggttgagagtatggaatttggagccagtcttctctgcatttaaacttcagctctaccaggtacatgctccatgacaggaaggaagtaacaactgctctgtctggagagttgtgctggagccaactcaaaaaagctgattttgcacatctctcccaactctgtgttcaccagcatcacattggtagtttaaaatctatgacgggccgggcacggtggctcatgcctgkaattctagcactctgggaagccaaggcaggcagatcacttgaggtcaggagttccagaccaacttgaccaacatggcaaaaccctgtctctacgaaaaatacaaaaaggaaaaattagtgggcatggtggcaggcacctgtagtcccaactacacagaaggctgaggcaggagaattgcttgaacccaggaggcggaggttgcagtgagccgagaccgcaccactgggctccatcaggaagacagaataagtgagactccgtctcaaaaacaaaacaaaacgaaaaaatttctatgatgtagtgaagatttacccccttcagaaactggctggcaaat

SEQ ID NO: 884964 - DNA, 598 bp, Homo sapiens
agtttttaggaaggttaattactttgtgtttctgaagatgtaaatgttcctcaaggaagaaatctctgaataaaactcaatgacaagatctttataatggacttctggttattgctatgtgcaatgccctacctataactcgcattttaattgatgtatcctgagcaagatttgaaacagatctctttccctctcttctaattttaatgagtcttctctagcaagcacctatatcaccagagagatkcagagaacctcagcatactctggatgggcctccctctgcaatttatgatgaagtctgacttcagagtgagttcgcagcctccttcctgcctctcctctggtttccagggtagcagactcttgtctcccttcagacctgggctctcccagctcagtcccacttggcatttctaactgaggttatggatacacattgagcccagaactcattgcttttttggaaaaggcaaaataagagaggggattttccatattcacatttttccacagaaatgtattcataagctttaaacttgcccaagctctgttaatgtatgtggttggctcctgtgccaattttcattgtgaataa

SEQ ID NO: 884965 - DNA, 598 bp, Homo sapiens
agtttttaggaaggttaattactttgtgtttctgaagatgtaaatgttcctcaaggaagaaatctctgaataaaactcaatgacaagatctttataatggacttctggttattgctatgtgcaatgccctacctataactcgcattttaattgatgtatcctgagcaagatttgaaacagatctctttccctctcttctaattttaatgagtcttctctagcaagcacctatatcaccagagagatgcagagaacctcagcatactctggatgggcctccctctgcaatttatgatgaagtctgacttcagagtgagttcgcagcctccttcctgcctctcctctggtttccagggtagcagactcttgtctcccttcagacctgggctcycccagctcagtcccacttggcatttctaactgaggttatggatacacattgagcccagaactcattgcttttttggaaaaggcaaaataagagaggggattttccatattcacatttttccacagaaatgtattcataagctttaaacttgcccaagctctgttaatgtatgtggttggctcctgtgccaattttcattgtgaataa

SEQ ID NO: 884966 - DNA, 592 bp, Homo sapiens
attgaagacatcacaaaaggctggttctggctaccttggccacctcataccccacaaatggttttgtttccgctcacttacggctgcctgccagtcacccagtaagcaagccagcacacttaacaagctggcccatcaccacatttaaaatatacaacgcaaacgcaggcatttccaaaccctgtgctggggaaagaaacctccccagtgagttttcccaacattttaccttttagaagccaaactgcagtcatttttccctttgactctcaagggaaatctgacagggaccacgtttcagaaaacttgtctcccatagagcaccagagctgcggtattttaatagcctctctcagcccctcccctgggaacatattattatgtgatcattagtgatgggcaaacctcactgggtttccaggtttgagtctgtgccaaaagttcagagttcttcytttcttgacaactcaaaatctcccctatttttcccttttatttattcatttgtttgtttatgtgtgctttgcttggtttcttcctatcttaccacactctccagccttttctccactttacacacagaagaaaggaa

SEQ ID NO: 884967 - DNA, 628 bp, Homo sapiens
gaattgagaaaataaaccaacttaccaaaaatattaagaggctctatttaaaacattgaatagggaagtggtatcatgaggtaaataataataataatagtagttagtattaaaaatcaggctttggagccagggtaatctgactttgaatattggcatcattcctttctgaccatgtggcttcaacaacaggcagaccttgcaaatgctagaactggaaaagcattcatcagcaagactttgtggatatctatccctgtgctcttccacgaacaggaatcagttactctttgcttgtatgtttctccacttgggcagttcaggtttcttaaagatattatctaatcaacccagctaacgttgtgccagttggggcatataattttgcaacaggatgccactgtccagtctgtgaccaaggcatgtgcgtacttcaggttcaatcagctgtggtggtaagggccgagggggagtcatacrtaataagatttccttgacagacatggctggttgtctaccaaagcattatgctcttagaggaaagctgctgttaggctggggtgtcctttcctacatttcccggagcctcttgaaactaggttggatcatgtgactaagtttccccaat

SEQ ID NO: 884968 - DNA, 656 bp, Homo sapiens
tattaatttcttccctttacattgatttattaaaagagtcacttatcctacattaaattattatgtataaggaagctaattctttgttatctttccagttatttctattgatctgaacatctggtctgacaccgggatcataacattttaattcttttggctttataacaggttttaaaggataattaatatttctcaattactcatcttttccaatactcttttttgttactcttttctggatattcttgaagataaacttttctactaaacatataaaaccttgaaaagagaacacaggtagaagtttcagagttttagaaaggtagcataataaagagaaagaaagaatgcagtaaatccaagaaagtagagagtgttcgtccatttcaattcattccatttccaggaaagggcacagaggcaaaagcaaacaaagagagcctgttcgaactaccttagggaagggtggtgggagaatacttctagtatgcmtaaaaaggaacattgaccagttgcccaacagaggagaaaatatgagcctctgtcattactcaacatagataagcccatgtgaaatgtgttttaaaatacaaatttctgggaacatatcgttaaacttcagttcagcaaaaacattccacctgtttttgaaa

SEQ ID NO: 884969 - DNA, 717 bp, Homo sapiens
atgtctaaaatggtggaaggtgaggttaattaggaagcttttaatttgtgtaacagcaatgggaggtatgtagagaagtcaaatttgaaagacgtttctgagggagaatgtaaaaatctttaagtaaaaaagagttagtaaaaacctgatatatactagagaagtggttctcaaatcttaagcatgcatcagcatcacgkggaaggcttgtgaaaacacagattgcagggatccaaaagtttctgattcaataggttggatgtggggcccaagagtttgcatttctggaaaatttccaggtgatactgatgctcttggtccaggtaccacactctaagaaccacagtgctggactgggcgtggtagctcatgcctgtattcccagcactttgggaggccgaggtgggtgggtcacctgaagtcaggagttcaagaccagcctgaccaacacagagaaaccccgtctctactaaaaatacaaaatcagctgggtgtggtggtgcacgtctcaaaaaaaaaaaaaaaaaaaaaaaagaaccacagtgctgaattaaaagaggtagaagacatccttggattttattattagatagtctaggcttaaagcagttattattgccaatttttaaattatcttttctattttataaaatgtaggtaaatacacttagtgggtaaaaattatgatttgaatcagaaatcctgactggatatatt

SEQ ID NO: 884970 - DNA, 562 bp, Homo sapiens
acaaacttattgtatatcagaaaccccactatgaagggttaactcaacggtccttttacacaggaaaatacttgagggcaatttgtacatcctataatgtctcaaaaaggacagtacccagcaaaagattttgcagtccctgtgttttagaaataatgtgattctcaaaggtagcccataatagaaaccatcaaacaagagttgtccagctcyccagggtgatggggcggaaccatttgattcagaaatcccactccacagttcagcagaaaaacacagacatgcgtcctaagaaataaacgaaggacatgaggaaatgctctggttctcttttgtctaccctaaaaggttcagatatttgggggttttagcacactctagtttcataaatagtaggctaggaaggtttgctcaaccattgaagactacctaccatgcctcctctgatgaccgtgaatttgatgttaaatgtttcatgggattaccaactgaaaaactctcgacttcagaatcacccaaagctttcacttcccatctcgagtcccaaaatgcgtcatgaact

SEQ ID NO: 884971 - DNA, 627 bp, Homo sapiens
acttactggagtaatgtagcgctcaggtttcggctcctccctttacttggctctgaggattctacatgcctggaacaaggcacatctccaaagtcactaacgtggctagataatggataactagaagtgcctgccccctccaccatccttgtcttgatgccaggtgagatccaggctcctctgccccaagaagggctgagcttacattatctccagctcagcaggtccttggaaattaggttgttttaaggaaataaagaaatgtgatatttcaacaagacactaggracagcggttgcctctgcagagggaaactgggtggccaaaggatggggtaagagggaaattttcgggccaggcgctgtggctcacacctgtaatcccagcactttgggaggctgaggcgagtggatcccttgaactgagtccaggaattcgagaccagcctggacaacatggccaaaccctgtctctacaaaaaagcccttcaaaattagctgggtctggtggtgcatgcctgtagtcccagctacctaggaggctgagcttggaggatcacctaagcctgagaatttgaggctccaatgagctgtagttgcaccactgcactccagcctgggtgacaga

SEQ ID NO: 884972 - DNA, 672 bp, Homo sapiens
atggtcccatgcagccacagtggccttcttgctgttctcccatagattgagctcatttctaccccaggcctttgcactatagctccctctgcctggaatgctcttcccccactctgggactgccctcctcattcaagcctcagctcccaggaaggggttggtgtgggcaaaagggagtgccattccttgcagacctcacaatccctaaggatctttattttattttattattgttattttaraggcaggatctcactccatcacccaggctggagtgcagtagcacaatcatagctcactgcagcctcgaactgctgggctcaagggaacctcccgcctcagcctcctgagtagatgtaactatgggcaggacccaggcgcctggcttctaaggatcttaaacaagagttttcatgatataggtataagattattcactgcagcattgtttattcgatcaaaaagtttggaaacaacctcaatgtccatcaacagggaaaaattaactcaacagagggtcatttatatgcagctgtaaatatgaacactatgcagctgtaaaaagaacagagatggctcaatatgcataaatagggaacagtccccgaggtatgctgttagcaagcaaagcaccgcgagaacagaatgtataacaaactcccatttcaataa

SEQ ID NO: 884973 - DNA, 519 bp, Homo sapiens
gatttataaatgtgcttttaaaaaaaagtgagagagaggcagtttgcaaacaaaaccaaagtatattggagaaaatatgtaggaaaaggggtttccctatgtattagtccattttcacactgctataaagaaatacccaagactgggtaatttataaacgaaagaggtttaattgacccacagttcctcatggctggggaggccacaggaaacttacaatcatggcggaaggggaagcaggcacgtcgcacattgcgacaggcaagaagtgaagtgcaagcacaggaaaactgccacctttraaaccatcagatatcatgagactcactaactatcatgagaacagcatggggaaaacatcctcataatctagtcacctcccaccaggttcctcccttgacacatggggattacaaatgaagatgagatttaggtggggacacagagtcaaaccatatcacacaagaatacaaggagaatcctcccaggctggaggagaaggctttaagcaaaagattg

SEQ ID NO: 884974 - DNA, 562 bp, Homo sapiens
taaatgggcgtgaatgtcatggctcaggccagcagaaatatttgcttaacattgggaaagaactgggccttcacaccctctaatggtgggtcaataacatttccacatgagaagaaaagcacttttttttcttgttccaagtgatctgtaaaataagttargatggtttcacttaggttgttttctatctccaagataacattaataaacaaatttgaaatcacacaagtatgaacataaattatttacagtgtgctcgaagagctcagaagggctttgtaaggtaaataatttataaactcatagaaagagtttcttttttcactaattaagggtgaaaattttaccaataaatcatgagaggtttcgggaagtacgtggaatggagatcaattcagtacaacaaacatttactgaaaacctcctatgtgccaagcccttggctgaacggggtgattgaggagctgtatgaggggtttctgctttcaaggagctgcctgtgcagtgggagactggcatccttggggttaagtgcacacaccgctatagacattggtgcagc

SEQ ID NO: 884975 - DNA, 562 bp, Homo sapiens
taaatgggcgtgaatgtcatggctcaggccagcagaaatatttgcttaacattgggaaagaactgggccttcacaccctctaatggtgggtcaataacatttccacatgagaagaaaagcacttttttttcttgttccaagtgatctgtaaaataagttaggatggtttcacttargttgttttctatctccaagataacattaataaacaaatttgaaatcacacaagtatgaacataaattatttacagtgtgctcgaagagctcagaagggctttgtaaggtaaataatttataaactcatagaaagagtttcttttttcactaattaagggtgaaaattttaccaataaatcatgagaggtttcgggaagtacgtggaatggagatcaattcagtacaacaaacatttactgaaaacctcctatgtgccaagcccttggctgaacggggtgattgaggagctgtatgaggggtttctgctttcaaggagctgcctgtgcagtgggagactggcatccttggggttaagtgcacacaccgctatagacattggtgcagc

SEQ ID NO: 884976 - DNA, 631 bp, Homo sapiens
atagccaagacaatggggaaaatgtctccaagccatgtcagaaatcttcacagcagcccctcccatcacaggcctggaggcctaggaggaaaaaatgtttttgtgggccaggcacagggcctcactgctctgtgagcctcaggacttggtgtcctgtgttccaggccctccagctcaagccatggctaaaakgtgacacagtacagctcaagctatcacttcataaggtgcaaggccaaaggcttggtagcttccacatggtgttgggcccgcgagtgcatagaagacaaaagttgagctttgggagcctccacctagatttcagaggaggtatggaaatgcctggatgtccaggcagaagtctgctgcagaggtccctcacggagaacctctgccagggcagtgcagaagggaaatgtggggttggagaccctatgcagagtacttactggggcacagccaagtgaagctgtgagaagagggccaccatcctccagaccccagaatggtaggttcactgacagtttgcagtgtgccctggaaaagccacaggcattcaacgccagcctgtgaaagcggctttaggggctgtatcctgaaaagccacataggcgaagctgcccaaggccat

SEQ ID NO: 884977 - DNA, 631 bp, Homo sapiens
atagccaagacaatggggaaaatgtctccaagccatgtcagaaatcttcacagcagcccctcccatcacaggcctggaggcctaggaggaaaaaatgtttttgtgggccaggcacagggcctcactgctctgtgagcctcaggacttggtgtcctgtgttccaggccctccagctcaagccatggctaaaatgtgacacagtacagctcaagctatcacttcataaggtgcaagsccaaaggcttggtagcttccacatggtgttgggcccgcgagtgcatagaagacaaaagttgagctttgggagcctccacctagatttcagaggaggtatggaaatgcctggatgtccaggcagaagtctgctgcagaggtccctcacggagaacctctgccagggcagtgcagaagggaaatgtggggttggagaccctatgcagagtacttactggggcacagccaagtgaagctgtgagaagagggccaccatcctccagaccccagaatggtaggttcactgacagtttgcagtgtgccctggaaaagccacaggcattcaacgccagcctgtgaaagcggctttaggggctgtatcctgaaaagccacataggcgaagctgcccaaggccat

SEQ ID NO: 884978 - DNA, 614 bp, Homo sapiens
tgcagaagggaaatgtggggttggagaccctatgcagagtacttactggggcacagccaagtgaagctgtgagaagagggccaccatcctccagaccccagaatggtaggttcactgacagtttgcagtgtgccctggaaaagccacaggcattcaacgccagcctgtgaaagcggctttaggggctgtatcctgaaaagccacataggcgaagctgcycaaggccatgggagcccaccttttgcatcagcattccctgcatgtgagatatggactcaaaagaggttatttcagagctttaagatttaatgactgctttgctaggttttggacttgcatggggctggtaaaccttttgttttgtcccatttctcccatttggaatgggaacatttacccaatgcctgtacccccattgtatcttcaaagtaaatgacttgttttttattttacaggcttataggtggaagggacttgacttgtcttacgtgagactttggacttggacttttcagttaaggtgctggaatgagttaagacttgggggactgctgggaaggcatgattggttttgatatgtgaaaataacatgagattttggagggtcagggtgg

SEQ ID NO: 884979 - DNA, 614 bp, Homo sapiens
tgcagaagggaaatgtggggttggagaccctatgcagagtacttactggggcacagccaagtgaagctgtgagaagagggccaccatcctccagaccccagaatggtaggttcactgacagtttgcagtgtgccctggaaaagccacaggcattcaacgccagcctgtgaaagcggctttaggggctgtatcctgaaaagccacataggcgaagctgcccaaggccatgggagcccaccttttgcatcagcattccctgcatgtgagatatggactcaaaagaggttatttcagagctttaagatttaatgactgctttgctaggttttggacttgcatggggctggtaaaccttttgttttgtcccatttctcccatttrgaatgggaacatttacccaatgcctgtacccccattgtatcttcaaagtaaatgacttgttttttattttacaggcttataggtggaagggacttgacttgtcttacgtgagactttggacttggacttttcagttaaggtgctggaatgagttaagacttgggggactgctgggaaggcatgattggttttgatatgtgaaaataacatgagattttggagggtcagggtgg

SEQ ID NO: 884980 - DNA, 649 bp, Homo sapiens
actgtgcgcggcctatggaacattttttttaactaatagaccttttgaaggtattgcccttccctttagggagccttcttttgtgtggaggtgctcactttgatcttccatcttgcttgtctctagattttatttatctcctgtattcaggggcttctgaaatgycaacctagggaaaatgcctgctttaatgtgctgcatagttctctggaatcaatttttctttgctcttacctctgaggttattccctatttttaaataaactcatccatgacaaaaaggtagattgttttaatattttatatagtattataaatattctctatgtggagtacttttttatacctctagctcaaaacacttgctacaaatggcagttttgatggatttttaaaaaataaaattgatttgtggttttgatatgatgtgcatatgttccaaggaatggctctagtgaacccctagttacattaccttggtgaattaatgaatcagcaactctatctctaatatttcaatttatctctctggaatatttttttctcagatttttttaaacatttgagataaagagaagtcaaattgacttgattttaggtattcacttgatacatgggtatatttgcattagattctagttcatcctca

SEQ ID NO: 884981 - DNA, 639 bp, Homo sapiens
caagtgctttgtcaggtattggacatraatgtattttcctactaacctatggcatgtttttctctgctcttaacagagttgttcacagcataagatgttttaattttttatgatagtcaatgcatatattttttttctttcatggattgtatttttatgttgtacttaaaaatactttggccacaaagattttctctacattctttgcctaaaagttttatatttctatgaaacttgtagatttatgcctggatccattttgagctaatttttgtatatacagtgtgaggtatatgttaagatatttttctttttcttttcttgcttatgagtgtcaaattgtttcagcaccatttgttgaatgataggttattctctctttactgaattacttttgtaactttttaaaaggtagtcagtttctggacctcttcagttccattgatctatctgtctctcttttcacaaatgccaccttgtcttgatttctgaaattttttagtatgtgttgaaatcaggtagttgtagtcttcctacggtactcttctttttcagaattgtttttgtattttagtttctttaattgtccatatattttataatcaccttgtatatatctacagagaaatctactaggat

SEQ ID NO: 884982 - DNA, 632 bp, Homo sapiens
taaatatagaagatagagcaatacattggtaatttcaataaatacaaattgattaactcacttcttaaaaagagaatgttagtttggctaacaaagcaatattcaattttattgctgcagcaagaaacataaataaaagattattaaattttaaaaacaaaagggatggctagaggtatacatcaaaatgaataatagctgcaagctattttaaatatgttgaatatattttaaagtcacaaataatgataataaaacaaaacaataaaaaaaacagagataaaagacattgtaactcatggaaagttgccagagcacccacttattatcctgaaaatagatcattaacaaaagaaatagcatttatcctacccttacaatgtaacctgtatttcaggataattaaatacacttagtagatacatttttcaatgcctaaactctccagctaaytgccacaaaaagaataatgaaattataaaaaataacaattttgtgattactaatatggtttggctcagtgtccccacccaaatgtcaattgtaatccccacgttcaagggagggacctggtgggaggtgattggaaactgggggcagtttcccccatgctggtctcatgacagtgagtg

SEQ ID NO: 884983 - DNA, 660 bp, Homo sapiens
cataacagtagattcctaatgacatagatggctcattgacaattgtgaaaattgtcagaatatagccaaacactcaacaagcatgtataagctacatagtgaattaggaaggcaagatcagacaaatattcttatgggaatcaaaaattgtcctcacgactgtcattacctcttcctgaatgttaccacttgaatccttagaaataattacatcccagtaatggaatggcgcatattctcactcataggtgggaattgaacaatgagaacacatggacacaggaaggggaacatcacactctggggactgttgtggggtggggggcsgagggatagcattggaagatatacctaatgctagatgacgagttagtgggtgcagtgcaccagcatagcacatgtatacatatgtaactaacctgcacattgtgcacatttaccctaaaacttaaagtataataataaataaaaattaaaaaaaagaaataattacatcccaggttcctaattcccagctacataatttgaccaattttgtggtgtttgaaaaaccttcatttagcatctttgaaatttcatttgaatgctttttacaatctctcccagattattaattaaggcattctaagaggccagtcatctagtctgacaatcaccact

SEQ ID NO: 884984 - DNA, 608 bp, Homo sapiens
taaagacatacttgacattgggtaatttataaagaaaaagaaattcgatgaactcacagttccacgtggatggggaggcctcacaatcactgtggaaggcaaaaccatgtcttatatggcagcaggcaagagagaatgaaagccaagtgaaargggaaaccccttataaaaccatcagatcttgtgagacttattcactaccataagaactaaatcattatcacaagaacaggatgagaaactggccccagcattcaattatctctacctggtccccgccacaacacatagggattatgggaactacaactcaaggtgagatttgtgtgggaacacagccaaatcatatcattccacccctggcccttcccaaatctcaggtcttcacaattcaaaacacaaccacgcctttcccatggtcccccaaagtcttaactcactccagcattaactcaaaagtccaagtctaaagtcccatctgagacaaagctagttacttccacctatcagcctgtaaaattgaaagcaagttagttacttcctagatacagtggggttacaggcattaggtaaatacacccattccaaatgtgaaaaattgtccaaaa

SEQ ID NO: 884985 - DNA, 626 bp, Homo sapiens
tcctgtgaacacatgtgcatggtaataaatttgtatgtctttcttcctgtttcccaacacattgaatgtccgatccaatccttgacccatttgccctttaatcaatttcttcctctgttctagctcatggagctgattcccataaactatgctttccaccctttcctgtcactggtttccaactctggacaatgagagaaacacttgaaataagagggcaggaagaagggagaagctagggtgtttcctgccctttctgtctgtctcaagtagcatcatctatactagctacatctcttctttggctctgccttccccagacaggcccattgtgctcccagcttccaccaggtgactctggccccggcctctgttaatacccccagtttcttttcatcaccaatttagaaatgtttccatytttcttcaattgctaatctgtggattgcttcactactcctgggtagcttctgagcaactctatcatctgtgtaccaattcctggtaccaaattttttctgttttaaatactaatagtggcttgtctttttctggttgggtcctgactgataaagtgtcctatgaaattactggtgatatgagtaaagaaggaaaatttttcaatt

SEQ ID NO: 884986 - DNA, 673 bp, Homo sapiens
cccatttacaatagccacacacacacaaaaatacgtaggaatacagctagtcaaggaggtgaaagatctctacgaggagaactataaaatgctgctgaaagaaatcatagatgatacaaacaaatgaaaaaacattctatgctcgtggactggaagaatcaatattgttaaaaaggccatactgcccaaagtaatctatggattcaacactaccaacatcatttttcacacaactagagaaaactatcctaaaattcatatgaaaccaaaaaacccaagtagccaagacaatcctaagcaaaaagaacaatgctagaggcatcacgttacccaacttcaaactatactataagtctatataaccraaacagcatgatagtggtacaaaaacagacacacagaccaacagaacataacagaaaacccagaaataaagccacatacctgcagccatctgatcttcaacaaagttgacaaatataagaaatgggaaaatacgccatattcagttaaatggtgttgagatagctggttatctatatggagaagaataaaactggacccctacctttcaccatatacaaatattaacacaagatggattaaagatttaaatgtaggacctcaaactataagaatcctagaggaaaccctaggaaacaccattctggac

SEQ ID NO: 884987 - DNA, 643 bp, Homo sapiens
ttgaaggcaaacaaaggctattacaaattaaatataaagatgcaccaaatgcaagaagagataaagagaaaattatactagatacgcaaacattgtaagaaaaatgaaattaaaaataaaattaagattacatactctggcgtatacaccggtaaccaatagactagtcttccacctaaaacgagggtctcagctgcgaagtttaacaggtcaagaaacatatcactcagatgataactcaaggaaacaggaacatggctttctggactacacaaagaaaagaaaatttcaaaatcagtgaaaaattttaagagtgctaagttaacggggaagccacatgcytcttctcaaggtagtaacacatcatatttaaatttcacttaccatttttcccatttttctatcccctttggtatctccttctgtgaacctgttcttcttgtagattctctgataccatatggagctagacagaaaacaaaggtaacacagatagtcaaaagtcaccaaatcatggatcaagggcaaacagccatgctgccttcaaatgtgacaccctgagaagaacacaacatcaccaatgcacaaatccaactgaaaatgtacaacataaagacttgggagaggagcaactgtcttctta

SEQ ID NO: 884988 - DNA, 653 bp, Homo sapiens
gtccctggtccatctcctacctctcacctgggagcacctcgagggctgggaccacatcttcttcatctcagcatccctgaacctagcacagtgcccagcatacagcaggtgctcagtacatgtgttttaaatgaaccaaatgaatgaacacataaatgcatgagcatctcacatcaggttccttctgttcctcagctatgaaaatgaacccacaaagacaacaccacagattctgagcacctgggctgggacttaggccaccacacttcctcctccaccatcggatttttatcctcatccctgccctcgacctctgcagtgcagcacacccctcctgacctccctctccagcaggcaccatgccagcctcaggattcggggtgaattgggaagctcattcaccttcatttacrgctggggagacagaggcaagggaggcaaaatgacttgccccaggtcacacagctcggcagtggcagggctgggacaagcactcagggctctgagtcacctcactgtggctctcaggcacaagctacagcaaaaccaccttcaggcctccccctccctgtccccactcacgcccaccagcagctggtgcaggccttggcagccacacagaaccaatattcaagccatcttttctcctcagg

SEQ ID NO: 884989 - DNA, 620 bp, Homo sapiens
tacttgtcaatgtatttggcaaatgagagtccctctattccttagagtggtgcttggaagctcatatctgatgttgcagtagcagtaactaccagtatccaacctatcaatattgcacaggactagtcttcgttggttggccactcaaacttttgtcattttgtcatatctaaccaatgaaacaatgggttgtatctgataaagtggggccaaaaatatacatgtgatctgccctagtaagtaaaagaattactcactctccatcaagtgatggggagtctggggtttttgaactccagacttagctgcccaggccatctggtcatagragctgccactccattgagtagttctgattggttgctgatacggcaggcctgggagcatccctttctcctgcatgtccatgtcaaatatctttatctgcaaagatattcacttgatttaagggcatgaccttcaatagtcacttgatttaagagaaaatccccttcttagctcaagaataacctccaaagacacacacaaagatatttatgggagacacaccatctgggattggctttaaaattcttcagcagcaataactacgaataacaacaacaagacaggagtggagt

SEQ ID NO: 884990 - DNA, 596 bp, Homo sapiens
aaaattatcttctttgactccatgtctcacatcggggccatgctgatgcaaaaggtgggctcccattgtcttgggcagctctgcccttgtggctctgctgggtacagcctccctcccagctgttttcacaggctggtgttgagtgtctgcagcttttccaggcacatggtgcaagctgtcagtggatctaccattccagggtctggaggacagtggccttcctctcacagctccactaggtggtactctgtggggggctccaaccaacatttcccttctgcaccacccttgcagagattctccatgagagccctgcccctgcagcaaacttctgcctgggcatccaggtgtttctatacatcttctgaaatctaggcagaggttcccaaaccccaattcttgactcctgtgcactcacagrctcaacaccacatggaagctgccaaggcttggggcttgcaccctctgaagccatgtcccaagctctatgttggcccctttcaaccatggctatagcaactgagatgcagggcaccaaatccctaggctgcaaacagcaaggggaccctggccccagcccacgaaaccactttttc

SEQ ID NO: 884991 - DNA, 640 bp, Homo sapiens
actatctctggccccagtcagactatcattttcattagcactagaacttttgattgatttatgccctatttcctaggcttccagcatatagtaagctttcaataaatataaatcaaataaatgaacaattttgatgttttacaggaccaccacagtttatgacttaaattgcaaagattgttttaaagcatgccttattacaaaatagttaatattcttaaaaaataaatatttctttttttcttttttttcttgagacagagattcacttcgtcgaccaggctggagtgcagtggcgcgatctcagctcacagcaacctccgcctcctgggttcaagcaattctcctgcctcagcctcctaagtagctgcgattacaggcacgcaccaccatgcctggctaattttttgtatttttttagtagaaatggggtttcaccgtgttacccaggctggtctcaaactcctgagctcaggcaatctkccctccttggcctcccaaagtgctaggattacagacatgagccaccacacccagccaaacgataaatatttctaaagaacaatgaaaaaataaaaacaaaaatcctcatctttcaagtcagaaagctaaagttcaaagtgagtaagttcagaaccaa

SEQ ID NO: 884992 - DNA, 612 bp, Homo sapiens
cagaagaagaaaatgaaatgcaaggaagttaaacaacttgcctgagcttactccacagcagtctgactctagagcccacaaatgtaactacaaagctgtaactcctctcaagttatatactagctacaaaaataattacatgtatttcatctgaaattcacagtaacctgcgtgagttctaatgacagcacagtaactttccccatgttaaaaattaaaaagtaaattatgttttatctttcaataaagtaagaagaggccaattcattaaaatattagctttctaattacctcctacctcttatatccaatacatatacaaggaaacaactgagaaatataactgagcaaacaatggagacaccaagattcctttgtaagtacaatccatgcacattgagaaaattgagtcccatcgaccctcagccagacastatattttataactgttgcacataattctaaaatttgggttgccctttccccaccccaaaactgaccaaaatctatatacagggaaatgctagaattaggcaagcaacaaaaagaagactgaaaaagttataagaaacttacaatattcatctaaaagtttactgtccatgtgatttt

SEQ ID NO: 884993 - DNA, 593 bp, Homo sapiens
ggacttggtgataaggaaggaatggagggaaaaggaagatgactaataatgggcatggagtttttttgcagtgataaaaatgttctaaaattgattgtggtgatagttacacaactctgtgaacatatttaaaaccactgaattgttcaatttaaatagatgaattatatggcatgttaattgtatctcaatataggtgttatttagaaaaatctcgtctttttattaagtaattctagtgatgtaattaatatgatttaaaaatatggatataggatgtgtgtgttgattcagccttgtataaactcagtgaactgcagagtaataaactgcctcatattattgtatctgagtctcagtaggaataaaattattcaaaaagacacaaktgttttctcgaggatttaaatgtattttgaatggacttggaatgatctccatatattataatagactgctatacttatttcaaaacaaaataatttaatgccatgcaattaagagcatcatgaaaaagaaattttattaatgtcttttactattcactataaagtagcaaatacgttactaagtatagcttccttctgatatta

SEQ ID NO: 884994 - DNA, 601 bp, Homo sapiens
tcataaatatgctatctttatatcactcctttgagaaataaacaagttggtatttcttttatgtatgatatattcttcgaaaggcattttaatcctgcctcaatcaaaactatcttaaataacagaaacctaattttaaaaatgctggctttgaacagaaatcagcatgtatccagttacttatttattaaaataatagtgtagaaatcttgcctgggaacaatactgcataaaaattactaaggtgttaaaaatgactgcattattggaacggctgaactttgacttatgtatcatgtttcagcagttttaagaataaaaggaatgattgttgtaacattttgacacattagatgtcattacaaaacaactgggaacttgcagayggaacacacaaacagcataagcctagacaattactgagaagcaatgaacctcagctgacaaagctggatgcaggcaggacacaataaatcattatccttattaacccaactccaaagtattcatattcacagtataataattagcacctcaagagatttcacacaaatgttttgcctaacaacatctctgcttccagtactttcagtccaataaa

SEQ ID NO: 884995 - DNA, 683 bp, Homo sapiens
gtccctagtgggtctccaagctccggggtaccctaggccggtattacatcattaaaaagaagcgcaaatcccatttctgaagcttagccgaaggcaggcgccggcagggagagctaagaggccgcctagagagtttgggccgggagtgggagtgggacaaggcgggagctaacttagctggagtagacgccrgaagaagttccgttcagctgaggtgccccgccccaatcccaggctctcggggaccccaagaagggagctacccggtgcttctccgagcggtccttacagctttggagactctgctgctgcccaggggtgtagtcgtcggagccctcgggcctgctggggctcagcaggggtagtgggagcccctaccctgggagaaactgccagggacaaacactgtttgctgacgcaaagcctgttccgcaaaggagttctccctgtatatgtcctgcagctcaaactgatttagaaagggatacacaggcctgcaaggcgctctcgggatcatacagcctcacgccctcttcttttcctctgccatttctttatgtctttcgccttcaccctgggcagcagaccccagcaggcggggaaacccggggactggtgtccgcattgccgaaaggctggaaagcagagcctcgtctacatccacgatgtttctagaacgtggc

SEQ ID NO: 884996 - DNA, 573 bp, Homo sapiens
aaaaaactccaagggcatgcttttctgggagtggataaatagtattactttccgatggaaagggctaattgtgtttgtgtgtgtgtgtgtgtgtgtgtgtgtgtacatgcgtgaatggaataaattgtcatgtaaagaaaaagcaatgtaataaacatacaagttctagtaatgcaccattagtgtctatgttagtgtcctagggccataatgaattaccacaagctgggtagtttaaaacaacagaaatttattctctcacagtttttaaggctagcagtccaaaatcaaggtatcagcaaggccatgctctccctgaaaaccccagggggagatcgatttctgcatccctctaggtagtggtagttgccagaagtctttggctttccttggcttatgtcagcataattcaatttctgcctccatcttcacatttccatcttacctctrtgtctgtgttcaaatttccttattcttgtaaggataccagtcatactgaatatagggctcactctaatcctgtatgactgcgtcataacttgattacctctgcaaagacagtatttccaaata

SEQ ID NO: 884997 - DNA, 605 bp, Homo sapiens
ctttttttattttataaccctgaagatactactgaccaacacaggaacacaactgttataaagaaagccaaaagctactaagaacttaataatacatggtcacgcttttccttctataggcactccagaattgagtattaaccagaattgagtattaaattcaatcaacacaattagctttaatgaactacactcttataggggttgatgcttcactttgtccagtttttttttttacaaggtaaataggataattcacctaacatttctaaaatttggagtggaactagggaaggtgaaggggttggcagttagcaagtacagcaccattsttttcactccttaacggaggtttgaagttcagccagaggtcttggataataggagtttttagaggatatttagtgaggtccctattggaacgttatctgtattgcaaacaactgtacatcatttagtaatcacgggcaagttttggcttgggaaagacctcatgctaattagctttatgtaaagtggaaatgtcacaattttgaggatgccaacataattctatcccattaaatcccacatgtcaggcaggattatctagtagaggagtggag

SEQ ID NO: 884998 - DNA, 593 bp, Homo sapiens
ggacttggtgataaggaaggaatggagggaaaaggaagatgactaataatgggcatggagtttttttgcagtgataaaaatgttctaaaattgattgtggtgatagttacacaactctgtgaacatatttaaaaccactgaattgttcaatttaaatagrtgaattatatggcatgttaattgtatctcaatataggtgttatttagaaaaatctcgtctttttattaagtaattctagtgatgtaattaatatgatttaaaaatatggatataggatgtgtgtgttgattcagccttgtataaactcagtgaactgcagagtaataaactgcctcatattattgtatctgagtctcagtaggaataaaattattcaaaaagacacaattgttttctcgaggatttaaatgtattttgaatggacttggaatgatctccatatattataatagactgctatacttatttcaaaacaaaataatttaatgccatgcaattaagagcatcatgaaaaagaaattttattaatgtcttttactattcactataaagtagcaaatacgttactaagtatagcttccttctgatatta

SEQ ID NO: 884999 - DNA, 637 bp, Homo sapiens
attctcgctgccagcacagcagtcagaacttgacctgggatgctcaagcttggtggggggaggggcatccgccattactgaggcttgagtaggcagttttcctgtcacagtgtaaacaaagccaccaggaagttcaaactgggtgaagcacatcgcagctcagcaaagctgctgtagccagactgtctctctagattcctgctctctgggaagggcatcactgaaagaaaggcagcagtcccagtcaggggcttatagataaaactcccatctccctgggacagagcacctgggggaagcggcggctgtgagcacwgcttcagcagatttaaacattcctgcctgctggctctgaagagagaaacggatcccccagcacaatatttgagctctgctaagggacagactacctgctcaagtgggtcccagactcctgtgcctcctgactgggagacacctcccagcaggggttgacagacacctcatacaggagagctctggctggcatctggtgggtgcccctctgggacaaagcttccagaggaaggaacaggcagcaatctttgctgttttgcagcctccatacccagacaaacagggtttggagtagacctccagcaaactccagcagacctgc

SEQ ID NO: 885000 - DNA, 637 bp, Homo sapiens
attctcgctgccagcacagcagtcagaacttgacctgggatgctcaagcttggtggggggaggggcatccgccattactgaggcttgagtaggcagttttcctgtcacagtgtaaacaaagccaccaggaagttcaaactgggtgaagcacatcgcagctcagcaaagctgctgtagccagactgtctctctagattcctgctctctgggaagggcatcactgaaagaaaggcagcagtcccagtcaggggcttatagataaaactcccatctccctgggacagagcacctgggggaagcggcggctgtgagcacarcttcagcagatttaaacattcctgcctgctggctctgaagagagaaacggatcccccagcacaatatttgagctctgctaagggacagactacctgctcaagtgggtcccagactcctgtgcctcctgactgggagacacctcccagcaggggttgacagacacctcatacaggagagctctggctggcatctggtgggtgcccctctgggacaaagcttccagaggaaggaacaggcagcaatctttgctgttttgcagcctccatacccagacaaacagggtttggagtagacctccagcaaactccagcagacctgc

SEQ ID NO: 885001 - DNA, 599 bp, Homo sapiens
tacatatttttcatttaaccctcacaacaaccccatgaataaagttttgcagatgaagaaactgaggtttgaaagggccaatagtttgacaagagtcactttctaacaagtggcagaagttgagttagaacatagaactgtccctctcaaaagcttagccactgaactatactgaaactaaccactgtactgaacttactgcaaaatcatgaagaagaaataaagtcactgcctcacaaagttaagagtttaggaacacaactgtaccttttcccatcgcccaaactctgctgtattcactgaagttaccagcccaagtcttacaatcctgtggagttattaggaattttacattttcctatagaaaggatttgttcaattctcctgccagataagcacatgtaatgaatgtccattctgatttctttgaaaytattgaattctaaagtgctaatctgatgactatacagacatatctattttaaggtggacataaaatggacatacggtaagtgctagcaattcctgtgttctttttaccatattaaataaagatatctttcacacaagcaactgtcagtagtaatgttttactttaa

SEQ ID NO: 885002 - DNA, 679 bp, Homo sapiens
atgccctgaaacaggagcttgaagccttgttctcacgtctaaagccatccaaatataggggccactgtggtttttgtctggttttacaactcagttaatcccaatgaataattgagtacataaaatctattaattagggctgttaaaaaagatgtgatggaaagatgatcaatggaaccaccaggcrtggaaataatgtgagtctatgtgcgtatatgcagggcgagcttgagcttcacccaaaatctgtgggtctagaacttacttctctcttacagcacaggcacacctcttcttcttgtgtgtcacttcactgcattttacagatgctgcagtttttacgcattgaaggtttatggcaaccctgcatcgagcaagtctgttgatgccattttcccaacagtgtgtgctcactttcagtctctgtccatttttggtaattctcacactatttcaaacttttttgtcatcatcatatttgttatggtgacctgtgatcagtgatcttggatgttaccattgtgattgtttgggagcaccatgaaatgtgcccacataagagggtggactgaactggtaaagtgttgtgtgtgttctgactgctccactaaccagaccttcccctgtcttgccccttctcctcaggcctccttattccctgagtcataacaatttaagt

SEQ ID NO: 885003 - DNA, 629 bp, Homo sapiens
aaaagtggaatgtttaataccaagtagggagggggtctgcctttccaagctggggaagtagggaggagagaggaggtttgtgtggatggtgctgttcaaggttcccctctgaatcctgctcacctttaaatacctctggcaggcctgcataaagggcccatttcccttcctcatctagtcgaaaataccagcaggattgctctgaatgaggagacaggagcctccattaaaatgcagacgccaattactctgcaggatgggcactaagcttatcctccagacttttactggtctagcaatttgattagtatcagggtagtaacatatctccctccaaagcgtggagagctcagaggggagggatatagtgaaagacaggtggattcagcatgatcagatctggatgggctgagcccaaggagaatgtgggctggagatcaggaayaggcaggtgtgatggagaacttacaagggtaccatgaaagggaagagatataaacaagcaaaaagatatgagcttatctgttacgtatttctttacaattttacataaggttagtccttatggtgtactagaataatttccatttatgtgcaaggtaagatcatttttacatttagccatcatc

SEQ ID NO: 885004 - DNA, 643 bp, Homo sapiens
ctcaggaaaagttcatgggactaaaacttagattttgcttattgaaaacattttgtctacaatctttatctcaaaagccaattttgctggatataattcagggtgcacattttatttttctgaagtgttttcaatatgttgttccagttacctttagtataaaagctttgctgcccccaaatctgataataawcttttttcccttataaaacccttactgatttttcctggacatccaaaatatatttttctttttctataaagtctagtgattttactagaacaattattggtattgattgtattaggtcaatattcttagaaatgtaatgctctcttttaacatggatttacatttttttaattttaggaaagttttcttgaattacagtcttcagcatttctttccttgctttagttttctttgtcaagaattcctagtatctatatattaaatcatcttttacacattttctgtaatcctttttattctctcatttcatgtacatgctattgaagtataattatatacaataatatgcattgatattaatgacagtttgatatattctacaaatgtgtaatacactcatgaaaccaacatacaaccaaaacctaggacattgccctcactctagaaagt

SEQ ID NO: 885005 - DNA, 643 bp, Homo sapiens
ctcaggaaaagttcatgggactaaaacttagattttgcttattgaaaacattttgtctacaatctttatctcaaaagccaattttgctggatataattcagggtgcacattttatttttctgaagtgttttcaatatgttgttccagttacctttagtataaaagctttgctgcccccaaatctgataataatcttttttcccttataaaacmcttactgatttttcctggacatccaaaatatatttttctttttctataaagtctagtgattttactagaacaattattggtattgattgtattaggtcaatattcttagaaatgtaatgctctcttttaacatggatttacatttttttaattttaggaaagttttcttgaattacagtcttcagcatttctttccttgctttagttttctttgtcaagaattcctagtatctatatattaaatcatcttttacacattttctgtaatcctttttattctctcatttcatgtacatgctattgaagtataattatatacaataatatgcattgatattaatgacagtttgatatattctacaaatgtgtaatacactcatgaaaccaacatacaaccaaaacctaggacattgccctcactctagaaagt

SEQ ID NO: 885006 - DNA, 643 bp, Homo sapiens
ctcaggaaaagttcatgggactaaaacttagattttgcttattgaaaacattttgtctacaatctttatctcaaaagccaattttgctggatataattcagggtgcacattttatttttctgaagtgttttcaatatgttgttccagttacctttagtataaaagctttgctgcccccaaatctgataataatcttttttcccttataaaacccttactgatttttcctggacatccaaaatatatttttctttttctataaagtctagtgattttactagaacaattattggtattgattgtattaggtcaatattcttagaaatgtaatgctctcttttaacatggatttacatttttttaattttaggaaagttttcttgaattacagtcttcagcatttctttccttgctttagttttctttgtcaagaattcctagtatctatatattaaatcatcttttacacattttctstaatcctttttattctctcatttcatgtacatgctattgaagtataattatatacaataatatgcattgatattaatgacagtttgatatattctacaaatgtgtaatacactcatgaaaccaacatacaaccaaaacctaggacattgccctcactctagaaagt

SEQ ID NO: 885007 - DNA, 643 bp, Homo sapiens
ctcaggaaaagttcatgggactaaaacttagattttgcttattgaaaacattttgtctacaatctttatctcaaaagccaattttgctggatataattcagggtgcacattttatttttctgaagtgttttcaatatgttgttccagttacctttagtataaaagctttgctgcccccaaatctgataataatcttttttcccttataaaacccttactgatttttcctggacatccaaaatatatttttctttttctataaagtctagtgattttactagaacaattattggtattgattgtattaggtcaatattcttagaaatgtaatgctctcttttaacatggatttacatttttttaattttaggaaagttttcttgaattacagtcttcagcatttctttccttgctttagttttctttgtcaagaattcctagtatctatatattaaatcatcttttacacattttctgwaatcctttttattctctcatttcatgtacatgctattgaagtataattatatacaataatatgcattgatattaatgacagtttgatatattctacaaatgtgtaatacactcatgaaaccaacatacaaccaaaacctaggacattgccctcactctagaaagt

SEQ ID NO: 885008 - DNA, 713 bp, Homo sapiens
catgtgtgatgacatgaagctattaacgcctctgcttcaagagaaatactagtgtaaaataaacgttagtggaagtaggcatctaatattgaggttagtgctatagccaagaatttcagaattctcacaaaatttaggtttttgtgttataagtcctttataattatcattacatcttcagttctaagcctcttactaaataattatttcttcttttcaaaacatcctgaggtgaaaattttaacttttggcaagttgttttcatcatccttttctcttcccctctgtaataaatcaaagtaaggtaataaaaagtctgactttggaagtttgtcatctaaagtctctctggaagcacagcaggctattttcccttttgtgtaacttgatctaccttttttttcctcctaattttgagcggctgctttctcattagaaaagatgcctatatgtgagaacaaacacttaaaatgtatgtacagttaaataatgtatttacaacatgaaaagtactaactgtactctactgtrgagttctgaagtaagaaaagcttcagtagtaattaacttaaaaatattagtactgtgccaaattctgtcatttacatttggcgtgtctccttagtagctgttcatatcttttaatatacagttttagaatgtttacattatatctttttttaagtgaaagaaaatatgtatgcagccccata

SEQ ID NO: 885009 - DNA, 595 bp, Homo sapiens
actatggcctatgggagattagaattaacattaataacatataaggagtaaaaaggatcacaggagaggtactgagatttcgcctacattgcaatgtgaattgtacaggaacttgacaaacatgttggaattgtgaaggaaacatatgcaagattccaygaaggctaaggatcctttagggaacctaaacattatcaaagaaacagacggaagaaaaatattaagatatcattttacaatccttggtttggcaaaaattaagaaataaagaattctgatgagacttttgttttggatagcatgaaagagactgtggcggaatagctcccaagaagaataattggaaaaacaataggaaggacaaagataatttatttacagcatcagggagctactgaaatgatgaagattaatgagactcaaatttcagagagaagagaaatgaaaactgagacaattatctgcaacagtgtttccacgggacaagcactaatagtgcaaatttgccagttcagggcactatatggaggctgagtgtatttgttcattctcacactgctatatggaactacctgagactaggtaatttatgaag

SEQ ID NO: 885010 - DNA, 621 bp, Homo sapiens
gggtgcctcccacaccctggggagcacaaaacaaaagttttgtgagtcccacaaaaagtacactttacaaaaaggaaaagtagtcattttcctaacattatgagtgatttttatcagatttcctcgtctgataaaaatgatgcatgtttggtcccatttttgacctttagctcttgacagtgtctttttaagttaacaaaagaacatagaccatgttcakttcgttgtgcacggagtctgtggtcattttcagctgttcctttacagcccttcaaactccttggagagtcaaaggtacacattcctgcagcaggagggagcccactgatgaggtgtctgtggcttgaatagctcttcagatgagaagagcccaatttgttcaaatgtctgctactgaacctggccatggaggctgatgaatagggccataacatctcttcccttcactcagtggagtgcaatgggaagtctgttgtctgcctttctgctattcctcatacaaacccaaatagaaagagtgtggtctccaccaaatcatattgattcttagaagaacaaatatggtagtcctgctggtgttccaggtagtaactgagaggtgtctgcgcatctaggtcagag

SEQ ID NO: 885011 - DNA, 591 bp, Homo sapiens
gataatattgcatttttataatgtatttattctttcttgatataaatggatttgattttacatatttttctcttcttaatatcacagtagtgggttccctgccttctcaaataagatactctcttttctcaccaaaacagttcttaagccttcacctgaatctattattactaaatatacctctcttcacggccatttgaatacagaacaaaacaaaagcttcccagaatttagttacacatgtattgaataacacwctttatcataacagcatctacatacatttaaaaacagcagtgcattgtctacaaatacataatatttattcagtttaaaaacaatgcttaatgcaggtatagatgcatggacctttcagattatctatggaccacaggtaagaaatgactcatcttgaagaactaaagtttgtactcagtgctgcaatgtctgtgagatgatacattccttctactatgtttgatttttaaaaagcagtttattttatccttgaaaaaagattacactaattttcttaatctgataaatgccctgaggtgtgagatctgtttcctaattaaaagtactttacag

SEQ ID NO: 885012 - DNA, 658 bp, Homo sapiens
acaacttatattcaagtgtaagatgatatcaggttggtctaagacttttggtgaacacgttcattcaactgtgatcactttattactctgaatgcctactattatcctgattatggggtctcctgaataaatagagtattagtcyttatgtcatcattgttcaaaattggagatgtacacatacataccctataccaagagggccgaaactcttcaccttgatgtatgttctgatacaagttgttcagcttcttgtaaatgtgttttccttcggcttgttactgccttttgtcaaataatcttgacaatgctgtataataaatattttctatttattaaatgtgtatgttctttctctatagtctgtgagagttataataatagaaatagaccagtggaagaaataattccaaggttttgatttgactcagaacatgtcttctgggtgaaagctggagaatgccacacaagatctacagatcaagtaggtgagaagtacaatttgaccatgaagaagtggtacctcatgttgtaacagttttaaatgaactccaaaattaaaatttgcagtgcccttggcagatattgtcattcgtctttttgatgagggtgtgaggctgaacaaactcctggcgttctagtggagctctgggggcaa

SEQ ID NO: 885013 - DNA, 611 bp, Homo sapiens
actcttggagctggtacacaaattaaatgagagcacagtaaatgcttgagaagaataagctattattattcttgttgtattataagtgttgatccatccacacttagtatgtcttatcgaatatcccatttccaatttctgtgactayttgaagtggcatacaactaagcaagtacagcaagaatcatgttacaatagggcccagctgcctcttcaggtacacaaggagataaccagagataatggcaatttggataagaaatggttttttttttcactttttaaatggattttcttggacgtgtgagatagtagacatattaaaaaaaacaagattaatatacaggaataccaatataccttttgcccagacatccctttagagttttgccagttgttctaatcatatcctttataataaaagcacccacatcagtatttcgcatggtacccacttgttatgtctctctagttttcttcaatctggagcaacttctcagtctctccttgaccttcatgattttgacgtttctggagttgcaggacattcattccttctgtagtctttctccatgtaggtctgtctgatatttcctcccaaagacacccac

SEQ ID NO: 885014 - DNA, 671 bp, Homo sapiens
caggaaaatattgctttagcaaattacacttttaacaatgtcttatcttgcaaagctggaaaatggattaaaatctaatcttcttcccctttaacctagcctgggtattttatatgtcactctcagggtagatataaggatayccttttcaaacttttgactacatctaaataggcctttaaatagaactctttaaaaatgtccattttcatcccaagttcgatatcaaagtcaaaactctttaccgtttcttctaaagactcaaactgtctaacatcctaaatatttctctgctagtcttagcctgggaaccttagtgtccagtgacctatttaggttggaacaaagggcagctggcagggagtgtgaggagccccatgttgttctcaaccccatatgcagctaaattgctgactttcccaccttctagtacttcaaacacacatcacatcgaccccctactatcagtcaaatgagggaggaaatgctcactgcagagagaagcaaatttcaggaaccaactaaagtctctgaattatgccagtgatgttttccaaatatattttttgttttccaaacctcttacctttatttcagcaaacccagttggtcccaaaatttctcatccatatctaagtcctgaagtctaggcttccaatatggagcttata

SEQ ID NO: 885015 - DNA, 610 bp, Homo sapiens
gatttggtgccctgcatcccagctgtggctaaaatgggccaatatagtgctcaagctgttgcttcagaggatgcaagacccaagccttggtggcttacacatggtattgggcttgtgggtgcatggaagagttgaggagtgggaacctccgcctagatttcagaggatacatggaaatacctgaatgtccaggcagaggtgtgctgcaggggtggaaccctcatggagaacctctgctagggaagtgcagaaggaaaatgtggggkgtgagcccccatacagagttcccactggggcactgcctagtggagctgtaagaagagggccaccatcctccagaccccagaatgatagatctattccactgacacttgcactgtgtgcctggaaaagctgcagacactcaacagcagcccgtgaaagcagccaggagtggggctgtatctgataaagccacaggggtggagctgcccaagaccatgggaacccacctcttgcatcagcaagacctggattcagacatggagtcaaaagagataattttggaactttaaggtttaatgactgccatattgggtttcggacttggatggggcctgtagcccttttg

SEQ ID NO: 885016 - DNA, 674 bp, Homo sapiens
tgtatcactgttggttatacagggcccaagggcatttcagttagcaggtgataaatgctgccaggactgtgtcctttccttcgaggcaacaggttcgcttctggcccaggatgtgtatagaagtgtcctctgggagctagggcctgaaacaggggcttcacaactctgatgggtgycctatcctgctgtggcttagctggtatcctagatgcaagacaatgtcctcccaactctttcctctcctttgctcaagtggaaagaagaggtctcttttggagctaccagctgtacaggctggggttaggggaggtgtgatgccagcgttcccttagctgccccagctgttgtcccagtatgttatctgcccccaccagtccactgtctctgggcctagttcagccctaggactcacctaaaagttccaatccttatgatctagactgcctttcaagtttacttggagaaacagtatcctgttgcccttggtggcaaggtttgtaggcacttaagttcaaacccatggaatcagcgagtatcttctagatagggctggtttaaatgctccctctgtgggtgggcatcagctgagtttgatctggttttcccttctattctaacaggacagcactgagttcagtgcctcacaattactgtgttttccctccctcagcacc

SEQ ID NO: 885017 - DNA, 616 bp, Homo sapiens
aaacttactcaaaatatagattctgttttggatggttccagattggcattgaaaagcctggtttccatatatgaaaaagaatctagcatcttcccaagagataaagcaatcatagtagaattgcaagtatgtttctgggtgtcatgacaaactgctactgttacaacacgagagtacttacatcccctctagcataacaacattgttmttcatctgtatttgatgcactgtataggacagagttattttatagctagatttggacaactttatgattatccttggagaggccttagtatctgtccttgactattgtcctcattaggggaacttggatttacgatatgcagtttaaagtttaaaatgtgtttggtggcaaccaaatcctgtttgctcactgatggattttgcctgaaatcaccaattagcttgatttggctacatgacttgggggtgataaaaagattccactgaaacttctgccctagctaacccaaagccaatattcatggtagagatcctggtagtccaatccacagttaaagtctatccatgtgtgaataagaacctagagagcttgcacctggttatctcttggtcccttggtgttgacatg

SEQ ID NO: 885018 - DNA, 591 bp, Homo sapiens
tcttggagtgtaacaagctgtgtggtaggggccaatccaggcagctttctccagagacctaatggcctcaacaccttctgaacgtggatagtgccagaacacttaggagggtgtctttggaccaatgcatagttgcgactcctgtgctctcttttcagtgtcatggaactggttttgaagagacactctgaaatgataaagacagcctttaatccccctcctccccagaaggaacctcaaaaggtagatgaggtacaaggtcctaagtgatctctttttctgagcaggatatcaggttaaaaaaaaaaagttactggctggtttaatactttctaccttcttcacagagcagcctttgaatagactatgtcctagtgaagacatcaacctcygccttaagctatgtatgtatggaggccagtcgcagctttattatgcagacacacaagtggtctggacatgagggtacagtttctgcctaccaagacactacttgcactggatcttacgcaaaaaagaaccagaacacacagtgtggacaactgcccatatattctatctagattaggagagggtcctggctaggatttt

SEQ ID NO: 885019 - DNA, 601 bp, Homo sapiens
ctttttatttagcttggaattttcctattggttcctaacaaactgtcccaatgtcatataaggaaacatgatctattacattcctttataacaatgtggagagactataaacctatgtaagtagtaaaactatatcagagactcaggagactgactaaaaggcctggatctgcagtgtattatctgtataaaaattggcagggggaagctaaaaggaaaggagattggagatctcaattctatcatggtgtatttcatacgcaaatcagagcatgcattgttttttgtttttggaaaragaagggaagtgtgttctgccccatgtttccttccgtgtttatagttcaaactctatatatacttcaggtattttttgtttagcccttcattataaatgggcaggaaattgtttatcaacctagccagtttattactagtgaccttgacttcagtatcttgagcattcttttatatttttcttttattatcctgagtctgtaactaaacaattttgtcttcaaatttttatccaatatccattgcaccacaccaaatcaagcttcttgattttcaaaaataaaaagggggaaatacttacaac

SEQ ID NO: 885020 - DNA, 612 bp, Homo sapiens
gggaagagggagcggtggctgaggacgcggcggcagcgctgctgccggttgcgtcggatgcgaaggagaagctggaggacaaggatgaggatgagacgggcgcgctccccagtctccatggaactcccgccccggcccgttgctaggagcccccgaggctcggactccgtcttccttgctttgttgttccgggtgcgaggcggccgcagcttccccgcgacaataaatagactagacgctggggagcatagagacagtgcgcgagggctagagcgccgccggacagggcgctcctgggtgcctcgctagccactcatttccggctctcactgctccmgtcactttccccgtcccccgcccccacccttccttcctccttcctggtccccaaatcaggcccctcctgcccacccgctgggctcggtgggaggtaagaggtgggatgggggcggcgctaatgggcatcggactagacttttttgtttaagaaccgcttgaaagggttctgaaaacaccgtgtatcctttgtatatttttagttgatatctaaacgtgtagtaatttctggcatacagtcgaatatttaggtggacttttttgtcaaaaccgtag

SEQ ID NO: 885021 - DNA, 643 bp, Homo sapiens
atcagaggtacttcacatcctacagtgtgtgggacagctccgcacagagaactgccctatccaaaatgcaagtggtacccagtgaacagaaacagggctgaaggacattggcagaggaggttgtggagtgaggttagggaagagttgggagcatacaagtgatcagaagaagcaggagtaagttgggggcccaaggagaggatgtggtggtgatggaaggtaagagtgagaaagtttgtatattagttctctagggctgtcattaacacaataccaaaaactggggtgcttaaataaaagaaatttgtctcaacattctggaagctggaagcctgagatcagggagttggtggggttgcttccttctgagggctgtgagggagagtcctttccatgtctttctcctagtttctggtggtttgctggcratctttggcattccttggcttgtagatgtatcaccctcatctctgccttcacattcatatggcattcttcctctgtgcatgtatctttgtgcccaaatgttctgtttttataaggacacagccatactgagtagagcctaccctaatgatgtcatcttaccttgattatctgcaaacatcctatttccaaataaggtcacatttataggtactgg

SEQ ID NO: 885022 - DNA, 643 bp, Homo sapiens
atcagaggtacttcacatcctacagtgtgtgggacagctccgcacagagaactgccctatccaaaatgcaagtggtacccagtgaacagaaacagggctgaaggacattggcagaggaggttgtggagtgaggttagggaagagttgggagcatacaagtgatcagaagaagcaggagtaagttgggggcccaaggagaggatgtggtggtgatggaaggtaagagtgagaaagtttgtatattagttctctagggctgtcattaacacaataccaaaaactggggtgcttaaataaaagaaatttgtctcaacattctggaagctggaagcctgagatcagggagttggtggggttgcttccttctgagggctgtgagggagagtcctttccatgtctttctcctagtttctggtggtttgctggcgatctttgrcattccttggcttgtagatgtatcaccctcatctctgccttcacattcatatggcattcttcctctgtgcatgtatctttgtgcccaaatgttctgtttttataaggacacagccatactgagtagagcctaccctaatgatgtcatcttaccttgattatctgcaaacatcctatttccaaataaggtcacatttataggtactgg

SEQ ID NO: 885023 - DNA, 614 bp, Homo sapiens
ttgtaaaagcttgtcgcatattttcaaatcaagacaggcaagtcttccaaatttagcaatgtgtagaaacattctcatgaaatcagaaaagggggtactggagggcaggttttcatcctttccaaactcttctaaattctcccacccagcgttcatttcagattcaaaataccatacacttacatttataaattgaaattttagaatgggaaaggaccaagtgttagtgactagtgaagtttcagggtatttccagaactctaagtgcatctgccctttaatgtttgctgccacttgctttcaaaaacccaaatcaactcatagttgtttccaaaaaatgcatgcaaatytagtggaagggaaaataccgcaaaaaaaaaatagtgctgtattaaaaaaacaattatttatgtgtctgtggaactgggtgcacctttaacaaatacttctgatagtcaagcaaatccagaatgttctagtgctgacatgggaaacagaactaaagaacaatatataaaagtaatcaggtatatcatttactctcagttagaattttgctcaaaaaacttgagttagtatggagcagaagaaaatggtgaggttctgtgattaaa

SEQ ID NO: 885024 - DNA, 652 bp, Homo sapiens
ttcaggaatactataaataccaggattcttctatacatgtacagatggtccttgagttacttttcttcgattttatgatgttacagatgtgaaacacattcagtataaaccatacttcaagtacccatacaaacactctgtttttcactttcagtacagtattcaacaaattgyatgagatattcattatcttattacaaaacagtatttgagagatgattttgcccaactaatcacttatatcataggctaatataaatgttctgagcacatttaaagtagagtaggctagatgtattaaatccattttcctcttatgatattttcaacttataacgggtttatcagtatgtaaccccactttaagtcaaaaagcatcagtatagatttatatcctgcttttctcttcaaatattttatcataggaattcccacatattaaacaatctttgaatatgtggtttataatggctgaatagtagccatcatataaaaataccaaatagtattagtattaagactatgataaatattgtcataccaaaatctttttgtgcatctctgacaggataaatttttcaaaaatggaatcgctaggttagaatgtattttatttaaattatttaattctaacaacaaacactatttcaaa

SEQ ID NO: 885025 - DNA, 613 bp, Homo sapiens
acactctggcaagttttgaaatgcccctccaacattttcccttgtcttgcacaccatccccttcactattcactttgtgattaacaaaatattacaaaaaaagtatagtatatgacaatgatgtcacctctcaaaatgaccagaaagtatacattcattcacactaacatgtctattttttctgactcacagggctgtgttttaatgacagattcatatcccaaaattggggtaacaccaaaaacacaacctaataagctatgccacacagtgcattaggaacaggctaatagatgttgccaagaagaaacaagaagagaaatgctcactgcctctcaatatgcagtaaacaaaaagccaaagtgctttacatttttcagtagaaaggtcataagaatgggttagccttggtatggtatgacaactggtagttcctgccaaaggagatagtcaaagaagcaacgttaatttyaatatcaattacagattgatattaaataaatgtcaaggtgctaaactactgtgccacctcgcaccacttgtgattcaggaattatgttcgtggctctggtcatgacatgcccctcctcaagaaccttcaactgccccccac

SEQ ID NO: 885026 - DNA, 464 bp, Homo sapiens
aaattttaacataacccacaggaaggcaaaagaagagaagcagaaatgagaaccaggggaaatcctagaaaacagataataaaatggcagaattaacataccaataattaccttaaatgtaagttatctaaatacatgaatctcaaaagacagagattgacagaatggaccaaaaaaactgactctactatatgtggttacaataaaagaacttcaaattcaagacacagtaggtcaaaagtaaaagggtgggaaaagttgtactatgcaaacattaatttttcttttyttcccctatacaataccaatgtaaacaaatattaatttttgaaaagcaagaatggctatgttaatatctgacaaaatagactttagagtagaaaggattactataaagaggattttacatgatgataaaaggaataatgataaatttatataatatataatatttcatcaggaat

SEQ ID NO: 885027 - DNA, 464 bp, Homo sapiens
aaattttaacataacccacaggaaggcaaaagaagagaagcagaaatgagaaccaggggaaatcctagaaaacagataataaaatggcagaattaacataccaataattaccttaaatgtaagttatctaaatacatgaatctcaaaagacagagattgacagaatggaccaaaaaaactgactctactatatgtggttacaataaaagaacttcaaattcaagacacagtaggtcaaaagtaaaagggtgggaaaagttgtactatgcaaacattaatttttcttttcttcccctatacaataccaaygtaaacaaatattaatttttgaaaagcaagaatggctatgttaatatctgacaaaatagactttagagtagaaaggattactataaagaggattttacatgatgataaaaggaataatgataaatttatataatatataatatttcatcaggaat

SEQ ID NO: 885028 - DNA, 518 bp, Homo sapiens
tttagaattttcagtttttctgttctgttttttccccatctttgtggctttatctacctttggtctttgatgatggtgacgtacagatggggttttggtgtggatgtcctttctgtttgttagttttccctttaacagtcaggaccctcagctgcaggtatgttggagtttgctggaggtccactccagaccctgtttgcctgggtatcagcagtggaggctgcagaacagygaatattgctgaacagcaaatgttgctgtctgatcgttcctctggcggtttcatctcagaggagtacccggccgtgtgaggtgtcagtctgcccctactggtgggtgcctccctgatagcctactcaggcatcagggaaccacttgaggaggcagtctgtccattctcagatctcaaactgcatgctgggagaaccactactctcttcaaagctgttagacagggacatttaagtctgcagaggtttttgctgccttttgtttggctatgccctgcccccagaggt

SEQ ID NO: 885029 - DNA, 518 bp, Homo sapiens
tttagaattttcagtttttctgttctgttttttccccatctttgtggctttatctacctttggtctttgatgatggtgacgtacagatggggttttggtgtggatgtcctttctgtttgttagttttccctttaacagtcaggaccctcagctgcaggtatgttggagtttgctggaggtccactccagaccctgtttgcctgggtatcagcagtggaggctgcagaacagcgaatattgctgaacagcaaatgttgctgtctgatcgttcctctggcggtttcatctcagaggagtacccggccgtgtgaggtgtcagtctgcccctactggtgggtgcctcccwgatagcctactcaggcatcagggaaccacttgaggaggcagtctgtccattctcagatctcaaactgcatgctgggagaaccactactctcttcaaagctgttagacagggacatttaagtctgcagaggtttttgctgccttttgtttggctatgccctgcccccagaggt

SEQ ID NO: 885030 - DNA, 575 bp, Homo sapiens
gatgagaacccattagcattttggaaagaattttggaggcttatcagaaatatacagatgtaggccgggcacagaggctcacacctgtaatcccagcacttagggaggtcaaggcaggtggattgcttgaggtcaggagttcgagacaaacctggccagcatggtgaaaccccgtctctactaaaaatacaaaaaattagctgggcatggtggtgcacgcctgcagtcctagctactcaggaggctgtggcaggagaatctcttgaacccagaaggcagaggttgcagtgagccgagatcgcaccactgcactccagcytgggtgacagaacgagactctgtctcaaaaaaaaaaaaaaagaaaaagaaaaagaaaagaaagaaagaaaagaaaacaaatatacagatgtagatccgacagtcctaagaattccatgttaattaatgtgaactattttgtaatacgcagatgatatcttgatagccagtgaaatggagggtaactccatcctccatgccatcaaagtcttaaatttcctggcagataaagggtacaaggtttctaagaaagaggc

SEQ ID NO: 885031 - DNA, 575 bp, Homo sapiens
gatgagaacccattagcattttggaaagaattttggaggcttatcagaaatatacagatgtaggccgggcacagaggctcacacctgtaatcccagcacttagggaggtcaaggcaggtggattgcttgaggtcaggagttcgagacaaacctggccagcatggtgaaaccccgtctctactaaaaatacaaaaaattagctgggcatggtggtgcacgcctgcagtcctagctactcaggaggctgtggcaggagaatctcttgaacccagaaggcagaggttgcagtgagccgagatcgcaccactgcactccagcctgggtgacagaacgagactctgtctcaaaaaaaaaaaaaaagaaaaagaaaaagaaaagaaagaaagaaaagaaaasaaatatacagatgtagatccgacagtcctaagaattccatgttaattaatgtgaactattttgtaatacgcagatgatatcttgatagccagtgaaatggagggtaactccatcctccatgccatcaaagtcttaaatttcctggcagataaagggtacaaggtttctaagaaagaggc

SEQ ID NO: 885032 - DNA, 610 bp, Homo sapiens
cagttagatggccaaaaatactctaattttctctctctccagggtctcgtcctgtcagtctatccagaacattttgaaatgtaaatgtgatcagggttttccctggcctgactcctaatggttaagaaataaagcccaaactctttgctttgcatgcaagacccttcataactcagccctattctcatttaccttttcaacctcatcgccaggctgtcttcccttatctttttccttcaactcttaccttatcagcagcctccttgctacccttataaggacacraacacttccccaaatcccctgtgccttttttttgtgctgatttatctgccagatactcctttatccactctgtcaatctcctactgacatttggaaaatacaatttaataaaatctgcttttcgaggtcttctctaacccatctcccagccaagagaaccaacctcctcatcctctctgtttccaagacagtgagcaatactgctgtaaataacactcatcacattataccctaattaatcatttgcatgcattatctccaagaccaatgtgttaagaaactctgtctctacttctagagcttagcatgttgtcttgccttctgt

SEQ ID NO: 885033 - DNA, 652 bp, Homo sapiens
tctaaaagaaattcttacccaaaacttcctccctcaaaaatctcattgtctttgaagtgcaggccatcagataatacctcctcataccttttcacattatagtcatcaatcaatcttttactaactccttctcattctgaattaatgtctttttccccattgctactactgtcactgtttyaggtgtaagtgatatctttatagataatctgtgatataaacagacatgttaacatcatagtgctctagagctcagtccttggacttcttgtttatctgtactcatatctttggtaaccgcatccagtcttaaggcttaaaatatcttaacatatggcctttaagttctttgaatgcctcatttctaattatcttttcttccaccacacacagccaaccactccatggtcatatactttcaaagactaactcctccagttatgcactggattatctcccacacctacgaagggacttggcttctataattagcccctctttcttttgtatcaattccttcctcttgactgaatcactccttttggcataccaacattctacaatatctcccattttaaaaagctaaccttgtttagactcctcatttccttctggttaccactcctatgtctctcctctcctgcctatagtt

SEQ ID NO: 885034 - DNA, 652 bp, Homo sapiens
tctaaaagaaattcttacccaaaacttcctccctcaaaaatctcattgtctttgaagtgcaggccatcagataatacctcctcataccttttcacattatagtcatcaatcaatcttttactaactccttctcattctgaattaatgtctttttccccattgctactactgtcactgtttcaggtgtaagtgatatctttatagataatctgtgatataaacagacatgttaacatcatagtgctctagagctcagtccttggacttcttgtttatctgtactcatatctttggtaaccgcatccagtcttaaggcttaaaatatcttaacatatggcctttaagttctttgaatgcctcatttctaattatcttttcttccaccacacacagccaaccactccatggtcatatactttcaaagactaactcctccarttatgcactggattatctcccacacctacgaagggacttggcttctataattagcccctctttcttttgtatcaattccttcctcttgactgaatcactccttttggcataccaacattctacaatatctcccattttaaaaagctaaccttgtttagactcctcatttccttctggttaccactcctatgtctctcctctcctgcctatagtt

SEQ ID NO: 885035 - DNA, 633 bp, Homo sapiens
gcttggggttaatatctggtcctttccaatcctaccccatgtgattatgcctttgtttcagatccaggagagtaatcatactcagactaggtctccactaaccaaagcaaaagggacatttgagaaaacaatcagttagtccttgcagaaggggtttttggttgcctgacaaccagatagttgcctaaattctcccctctgcctgacatgagttcagggccataagtggctactttcccctgcacaaacacggcaagtgtacaataatgacttcagctgtttgagaagaggccatatcccaagaggtactccagagagctgattttcttagaattgcagagcaaagggctcckgaaaactgggctgaatactactagtgtttgcctttctccaacttctgtgtgactgccatctagtggcatgcagggtggtggtggggggtggtggagagtgctccaacagggttcagtcaataagcaggtgcattgtttatgaataatttaaaaacaatattaaaactgactaaagttggtcagacttttattataaccacatgctggcaattctaaacagtcattgataaaatacttctcactttggtataccactgcccccaccccagcacctaagtga

SEQ ID NO: 885036 - DNA, 624 bp, Homo sapiens
ccagtagcttccactcatggtggaagaagggaagctggcgtgtgcagattacatggtgaaacaggaagcaagagacagaggaggagaggccaggctttttaactaccagttctcgaaggaaccaagagtgagaactcactcattaccacaaggacagcaccaagccatttatgagtcatctgttccatcacccaaacacctcccattaggtcccacttccaacactggggatcaaatttcaacatgagacttggtgaggccaaaccatatccaaaccatagcagtctgtttctgcaaactcttcttgttgttgacttccaatcttcaatgattagagtcactyttctctccctggtatgaatgggggtgtattagtccattcttgcactgccataaagatatacatgaaactaggtaatttatattcaaaaaaagaggtttaattggcatatggttccacaggctgtacagaaagcatgatggcttctggggaggtctcaggaaacttacaatcatggtagaaggcaaaagagaagcaggcatctcttccatgaccacagcaggaggaacagacagaggagggggggggggctacacacttttaaacaaccagatatcatgaga

SEQ ID NO: 885037 - DNA, 624 bp, Homo sapiens
ccagtagcttccactcatggtggaagaagggaagctggcgtgtgcagattacatggtgaaacaggaagcaagagacagaggaggagaggccaggctttttaactaccagttctcgaaggaaccaagagtgagaactcactcattaccacaaggacagcaccaagccatttatgagtcatctgttccatcacccaaacacctcccattaggtcccacttccaacactggggatcaaatttcaacatgagacttggtgaggccaaaccatatccaaaccatagcagtctgtttctgcaaactcttcttgttgttgacttccaatcttcaatgattagagtcactcttctctccctggtatgaatgggggtgtattagtccattcttgcactgccataaagatatacatgaaactaggtaatttatattcaaaaaaagaggtttaattggcrtatggttccacaggctgtacagaaagcatgatggcttctggggaggtctcaggaaacttacaatcatggtagaaggcaaaagagaagcaggcatctcttccatgaccacagcaggaggaacagacagaggagggggggggggctacacacttttaaacaaccagatatcatgaga

SEQ ID NO: 885038 - DNA, 652 bp, Homo sapiens
aacatgtctcaacttttaattcagaaagaaaggttatcatacttaagacaagaaggtatacatacaatgtaattcacagttttggactttgctatctcaatttgctccaagtggtttaaagcaagcgcaagggcaaacttgtrttttctctgttaaaaattacaggaaacccagttcatccaaagcctatttctttttccttgatatatactccattatttgcatgtttctttttaagtgtttcatctttatcctctctttgttttagaaaaaagaatttcccttgatatcccacatttgcagtttatctttttttaaaataaatgagacgggaaaaacatagatacacaaagacataatagagcatagtgggggaaaagagtaatgctctgaagacaggctgcctgggttcatatttctgttaagctagtaatcaactatgatctgggcacacttgagggattgtgtctgaatctttctatatattgctttcctcacttataaaatgatgataataatagaacctactgcaaagagctaaatacctgtatgcctcacttacgagaatttcaaggcaatagtggcctctattcagaggaatgcaatggttattctcattgttataaaattctttgaaaggtaggcacgatca

SEQ ID NO: 885039 - DNA, 596 bp, Homo sapiens
tcattcctgggatgcaactttggttcagcatatgcaaatcaataaatgtgattcatcacataaacaaaactaaaattaaaaaccacatgatcatctcaatagatacagaaaatgctttcaacaaaattcaacattccttaatktaaaaacccccaacaaactaggcactgaagagacatacctcaaaataacgagagccatctatgacaaacccacagccaatatcatactgactgggcaaaagctgaagcattttccttgagaactggaaaaagacaaggatgatcactctcaccactgctgtacaacatagtactggaagtcctagacagagcaatcagtcattaaaaagaaataacaggcatccaaataggatgagagaaggtcaaactatctttgtttgcaaatgatatgattctatacctagaaaacccacagtgtcttccccaaaactcctagatctgacaacttcagtaaactttcaggatacaaaatcaatgcaaataaaatcagtagcgtttctatacattaagaaaatccaagctgacagccaaatcaagaacacagtcccattcgcaatagccacaaaaagagta

SEQ ID NO: 885040 - DNA, 637 bp, Homo sapiens
ggatacaagtggtttttgttatatggatgaattatatagtggcgaattctgagattttagtacacccatcacccaagtagtgtacatcgtgtagttttttatccctagctccctccccaccctcccccttctgagtctctaaagtccattgtatcactctgtatgcctccgtgtactcatagcttagcttccacttataggtgagaacatacagtttttgattttccattcctatgttatttcacttagaataatggcctctagctccatccaagttactggaaaatacattatttttgtttgtttgtttgtttgtttgtttgttttttgagatgaagtttcactcttgttgcccaggctggagtgcaatggtgcaacctcagctcactgcaacctctgcctcccggattctagtgattctcctgcctcaacctcccaagtaggtgggattataggcatgtgccaccacgcctggctaattttgtattttcagtagagamggggtttctccatgtttgtcagactggtctcgaactcctgacctcaggtgatccacctgcctcggcctcccaaagtgctgggattacaggcatgagtcactgcgtctggcctatttttttttaatggctgagtagta

SEQ ID NO: 885041 - DNA, 636 bp, Homo sapiens
ctcatattccttttagtaaacacatatatttttgttccttgaacagtttcctgtgcttgtatccatcttatcatttaccagttgtataactgtggcaagttatttaatctctgagtctcagtccttttatttgtaaaatcaagataacctaatatctattcataaggttttaaaggattaaacgagtcagtccatataaagtacttagaactgcgttcaatcactctatggtgtgatcttggacaattcctgtggctcagctacaaaacattaatacttccacataatggcaatctttcyttctggcagtttttagttataggaatgttatgtaaatgagcacacactgctataaacagaggtattgttttctacaatgaacactgagctcccagagtaacaagtctcttaacacagtttgtgtccagatcccttggctcccagatccagaggagtaggcagatgctttcagggccatatttcacagtatatgtcttttcctccaaggacaactactttcttttcttctgtgttgctttttgtcagttaaaaaaatacagaaacatcattatttggggtgtgcaaaaaaatagcatttggtaattatggagacacatgtcaatacatgttattcat

SEQ ID NO: 885042 - DNA, 582 bp, Homo sapiens
taaatcccaacaaggtgtttcaatgcaacttgacaaactgatttaaagtccacattggaagacaagaattctaagaatagcccagatactttttatgaaggacaatgaagagaatactgaattatgaattatcaaagcatattatagctatatcagtctaacatttctgcttgttttatatatatatacatatatacacatatatacwcacatacacacatactcaactctctccctttatatgtgtgtatatatatgtgtgtatatatatacatatgtgtgtgtgtgtgtgtgtgtacacctgtaaagggagaagaagaagcaattctatggatatgtatgaaaattttgtttaagatggtatttaattttttttctttttttcttttttaattaggtataattaagttctgggataaatgtgcagaacatgcaggtttgttacataggtatacaggtgccatggtggtttgctgcactcatcaacccatcatctacattaagtatccctcctaatgttatccctccccttatcccccaccccccaacaggccccagtgtgtgatgttcccctctctgtgt

SEQ ID NO: 885043 - DNA, 582 bp, Homo sapiens
taaatcccaacaaggtgtttcaatgcaacttgacaaactgatttaaagtccacattggaagacaagaattctaagaatagcccagatactttttatgaaggacaatgaagagaatactgaattatgaattatcaaagcatattatagctatatcagtctaacatttctgcttgttttatatatatatacatatatacacatatatactcacatacacacatactcaactctctccctttatatgtgtgtatatatatgtgtrtatatatatacatatgtgtgtgtgtgtgtgtgtgtacacctgtaaagggagaagaagaagcaattctatggatatgtatgaaaattttgtttaagatggtatttaattttttttctttttttcttttttaattaggtataattaagttctgggataaatgtgcagaacatgcaggtttgttacataggtatacaggtgccatggtggtttgctgcactcatcaacccatcatctacattaagtatccctcctaatgttatccctccccttatcccccaccccccaacaggccccagtgtgtgatgttcccctctctgtgt

SEQ ID NO: 885044 - DNA, 642 bp, Homo sapiens
ggcttggtagtcacaaattctctcaacatttgtttgtctgagaaagactatatctttccttcacttctgaagcttagtttcactggatacaaaattcttggccgataattgctttgtttgaggaggttgaagatagggcctgaatcccttctagcttgtagggggtttctgctgagaaatctgctgtttatctgatagggtttttttttttcttaatatatatgttacctggtgcttttgcctcacagcaattaagattctttcctttgtcttaactttagataacctgatgacaatgtgcccaggtgatctttttgtgatgaatttcccgggtgttctttgtgcttcttgtatttaggtatttggatgtctaggtctctagcaaacccacraaagttttccttaattattcccccaaatgtattttccaaacttttagatttctcttcttcctcaggaacaccaattattcttaggtttggtcatttaacataatctgagacttcttggagtctttgtttatatatttttttctttgtccttgttagattgggttaattcaaaaaccttgtctttgagctctgtagttctttcttctgcttgtttgattctattgctgagactttccagagaattttgcat

SEQ ID NO: 885045 - DNA, 450 bp, Homo sapiens
gtatgtttgagagataaaagggttctcgctgcaccattcagtcttcagtgttgactcttcagctataagggacctcttgactaaatagatgaggtttgtacattgatagttgtaggtttctgatttgtgagccaaaaataacgtacaagctgttaggtgcaatctctgagagttttatttaagagcacatttaggtcaatgttagcttttcttttwtatattgcaagcagaaactgatcctgttaaatttaatggcaatgcattaaattagtgagtcatcatccctctgaggtgaactaagtgtaatgtgccactagacctttctagcagcctatattcagaattgtgatctgatctctaatggctaaaatgcgtgcatactctatgcctgtgaattaaggaggtagaatggattgagcagtatcttaagggtgcttgagattagaggga

SEQ ID NO: 885046 - DNA, 577 bp, Homo sapiens
tctaatatattgacatcctttgaagaaatgaatacctagataaagaatgtacataaataacagagttgcatggagccttgaagatcatctagttcatcctcttgtcttttccagtgagtgcattgggtgctaggaggccatgggctttgcaaggggccacactgctggttacaggcagagttgagaagaggttgcaaccacttacccttccataatatgctacctctaaacacactgatgaataaggaggactggtggatgtaatctattcagacttccaaaaagtgattgtcaacttttaatcctaaagttactaaaacatagarcttcagggggttagttttattgtaataaataactaaaaaatacaggaattaaaagatagagagatggacatttatcatagtaaatatttacattatttagtagatatctattaaatgtccagtaggccatgtcgtagctgggctttttaaatagaaacattttttaaaatttatttttttaacttctattttatatttaagggtacatgcaaactcgtgtcatgggggtttgttgtacagattatttcatt

SEQ ID NO: 885047 - DNA, 659 bp, Homo sapiens
gtgagtcaattaaacctctttcctttataaattactcagtcttgggtatgtccttacagcaatgtgagaacagactaatacacttggggttctccctagttatatgagcctgggcaagtcacttggcctgtctgagcatcagtttcatgctaagtgtaaacaatwaacctgttctacctgggaggatcattggtagtgattagacaatttgtagaagaaaaaatcagaatggtgaataaacatgagaagataatcaatgcactaataagtggcaagtgcacattaaagcaacaggatgtacctcagattgggaaagatgttaaggtagaataatagtgactattggtcaaaatatgggaaaataggaatttataatcactgctggagagagtgtcattgataaaattcctagtgagagaaatttatttatattgagtaaatttgaatatgtattcaccttacaacctaatgattccacttcttcatatgtactcttgaaatatttttgtgcatatgagcacagggaaacatgtacaagggtatatcagtgaacacttctcataatgacaaaaacttgaaacccaaaatatatgtcaaacaaggatagataaattaattgtgatattcatacaatggaatactgcatggcaaataaaaga

SEQ ID NO: 885048 - DNA, 526 bp, Homo sapiens
gttaaagatgttcccagattttctggctttcggattgacattctgtcattttctggagggaaaattctggcagaagaacaggtttacttgggaagagatgagtgccatattgagcatgctatgtttaatatgcctgtgagacatccaaatatagatatctagtagtcagttgtatctatgggcttgggttcaggagagagatctagggtagacctaaaaggctgggaattgttaacatatggatgatccttaaatccaagsaaggggatgaaatggcccaagaaaagttgcttaagaagaaaaaaagaactcttaagaacatcaacatttttaaaaaaggggaaagagggagaaaccaactatgagaattgaagaggaagtgccagagggaaggcgaaacacctggacaaaagtcacttcatggatgatgaaggaagcaagagtttcaaggagacagtgagcaaatgtacgaaaacttgctgagaagtaaagcaaaagtgcagaaaataaaaggaggttaaatata

SEQ ID NO: 885049 - DNA, 526 bp, Homo sapiens
gttaaagatgttcccagattttctggctttcggattgacattctgtcattttctggagggaaaattctggcagaagaacaggtttacttgggaagagatgagtgccatattgagcatgctatgtttaatatgcctgtgagacatccaaatatagatatctagtagtcagttgtatctatgggcttgggttcaggagagagatctagggtagacctaaaaggctgggaattgttaacatatggatgatccttaaatccaaggaaggggatgaaatggcccaagaaaagttgcttaagaagaaaaaaagaaytcttaagaacatcaacatttttaaaaaaggggaaagagggagaaaccaactatgagaattgaagaggaagtgccagagggaaggcgaaacacctggacaaaagtcacttcatggatgatgaaggaagcaagagtttcaaggagacagtgagcaaatgtacgaaaacttgctgagaagtaaagcaaaagtgcagaaaataaaaggaggttaaatata

SEQ ID NO: 885050 - DNA, 622 bp, Homo sapiens
cagcaatctgtgtctgaatttgaagataaacttgctgttccaattaaaatatgttcttcagctacagaaacatacaaagttcttcaagaacatatggtaagagtatgcttcaacatttctactatttaccaacttaaaatttgataattcccacttgaaaagaaaatacagtaaactttttaagagaattgaaattggaaaaatgtttatattagttgagtaattatatagatctaatgtattcactttatataatccaagacatgtaaggatgtgaataaattttcattaaagatgtatattaaaggagtattcatttcaaatayatttctctcttttaattaggatgagtaacatttttagagcttagctttaacaaccctgttacctcttgccagcattataaaaaagtacatgtgcaaggaaaaatatatgtgtatagctgtcttcatattttaacccactgtactcagatgtttaaggaatatatcctcactgatctgtttccaatgattggtttttctcatcattgcgaatcttctgcaaggctacagacagatggctctggcagaatttagggggaggaacaaagggggataattacgtacaaagaaatactacc

SEQ ID NO: 885051 - DNA, 610 bp, Homo sapiens
gcctatgggagaaagaagccttacacagggtggcagaatagaaataaaatgaaggaagagaaagaaagatatttactcccttccacactgttggtctcctgctcccagcagatctgaggtgggggtaagaatagaagccttcaatttaagttaagttcaaagttttcattaccaaataggccaggatgtttgaattgtggaattgagattgtttttcaatgtatagtgactatatgtcctttgactaactagggggccatagaagtygaccctcctcagctatatcatccagggaaaagagaataactagccccactcaatattttaaagcaacagtggggacaaaaataaaattgttttatgataaaatcctacagtgatgtttgccccagatagtgttacatctgagcagacaatgggtatttccagggagaatcaagagcagatttttggtcaccacctgggaattctgggtaggtctagctctactttcagaatgccctctcacatcttccctggaacctcagttagagcttccactctcccacccagtgttaacacaatccttcctctttctatttgcccatcacttcatgtgtttggcaactgt

SEQ ID NO: 885052 - DNA, 688 bp, Homo sapiens
gcatctacataagaagcagaagaggatagcacccactctactttatcaaataagtcagaaacaatcatattagaaatcattctactataaagacacatgcacatgtatgtttactgcagcactgttcacaatagcaaagacttggaaccaacccaaatgcccatcagtgatagactggataaagaaaatgtggcacaaatacaccatggaatactatgcagccataaaaaggatgagtttcatgtcctttgcagggacatagatgaagctggaaaccatcattctcagcaaactaatacaggaacagaaaaccaaacaccgcatgttctcactcataagtgggagttaaacaatgagaacacatggacacagggaggggaacatcacacaaygggacctgtcaggggatgggggcttaggggaaggatagcattaagagaaatacctaatgtagatgacaggttgatgggtgcagcaaaccaccatggcacttgtatacctatgtaacaaacctgcacattctgcacatgtatcccagaacttaaagtaaaataaaaataaaaaaagaaattccagaattcagatcatagtcattttctgtttccactgagtcctctttttagtcaaacatgcccagtattccttgtcttgaaaaacaaacatacaaacaaatgcacaaaagaaccca

SEQ ID NO: 885053 - DNA, 642 bp, Homo sapiens
ttgtaggcatgcctgtctttgtctaagttgtgttttccatagggcgatgactggtttttgcttgttattgctttgtttctgtgttcttacttgcattttttaaatatttaaatctacctattatctcttctggaatcttatgtgacatgggctcagcaaaacatctcctttcaagccatccaagcaagaatatatggttctttaataacttgaatacattttagcttaaggaacatatggaaaattaagctattggcagctgttgagcttagtcgtaaatctattcctcaactagaagtcatactacgcccatttgcattataggaaatgtgtaggatggttttgattgtcacagtgacgagggaatatccctggcatttagtgactgaggcacagagagctcatatcctacaaagtgtggaacattctcccacaaccaasagtcagtccatccagaatagagcccagccgtagagcctctgttgaaaatcatctgtaccagatgttgatgaggaagcagggaagtccttgattgttataccaggtagtgtttttgttgtaattataagtgagagatttctccctacctccctcttctcagagtatccataaataatctggctcatttgttggacaaatgac

SEQ ID NO: 885054 - DNA, 665 bp, Homo sapiens
attcatgcttcttgcctattttgtgcacttgacggtatcctcaggcatgtgagaaacacagaccctgattaaataaatcaatctatgttgaaagctgataaaattatcatgagcagatcaacaggactccaacagcaccaaaatagagggaatagagtccattttgcctcactcgctttctgaggaagactgtacctcatttatttttctctccccattgactaatgtctgcctgctcatttaatttgaagttgtggagctagggattgtgcacctgttctttattttatgtatccactttccccccaccttcaatttcttaacattaatcctttattttacagcaaccataactgccacctggcacytgaagcgtggagcttaccaatgtttaatagagtttttaatgcaaagcctgcaaaataattctgaaaacacaatatgtatgcataaatgcttcttaaccctttgtcccaagtatagagcacttccagaaattccttatttttttagatagaagttaggcatgtaggctttcgaattttaaagattttatggaaagatatcagaatagtatgcatatttgggcaagaaaattaggttctaatagactacaaatgggtgacatttattgtcactgaaatgtggttataagaatattctta

SEQ ID NO: 885055 - DNA, 665 bp, Homo sapiens
attcatgcttcttgcctattttgtgcacttgacggtatcctcaggcatgtgagaaacacagaccctgattaaataaatcaatctatgttgaaagctgataaaattatcatgagcagatcaacaggactccaacagcaccaaaatagagggaatagagtccattttgcctcactcgctttctgaggaagactgtacctcatttatttttctctccccattgactaatgtctgcctgctcatttaatttgaagttgtggagctagggattgtgcacctgttctttattttatgtatccactttccccccaccttcaatttcttaacattaatcctttattttacagcaaccataactgccacctggcacctgaagcgtggagcttaccaatgtttaatagagtttttaatgcaaagcctgcaaaataattctgaaaacacaatatgtatgcataaatgcttcttaaccctttgtcccaagtatagagcacttccagaaattcyttatttttttagatagaagttaggcatgtaggctttcgaattttaaagattttatggaaagatatcagaatagtatgcatatttgggcaagaaaattaggttctaatagactacaaatgggtgacatttattgtcactgaaatgtggttataagaatattctta

SEQ ID NO: 885056 - DNA, 638 bp, Homo sapiens
ttttgtatactatttttgtattcatgtctcttttgtgcccttcagaagtatgtttaggttttatttataagctgggcttggtggctcacaactgtaatcccagcactttgggaggccaagacaggctgacagcttgacctcaggaattcaagaccaacctgggcaacatggagaaaccacgctactacagaaaaatttttaaaaactagccaggtgtggtgacatgcacctgtagtcccagcaactctggaggctgaggtgggaggattacttgagcccatgaggtggaggttgcagtgagctgaaattgcaccactgcactccagcctgaatgacagagtgaaactgtgtcttgaaaaaaaaaagtgttatttatatatgtttcccatacttgttggcatatttactcccagttttttttctatttgttactatagaaaatggaatcttctattgtagtgtctgaatttattaatcacytattatatgtcaggtacactggtgaacattgagtacatcacagaacaaaatgggaaagatctctgccctcatgaagcctatagtagtggtagaaccatacagtaaataaataattatttgattattggatcaaataattaccaataatcaaataattg

SEQ ID NO: 885057 - DNA, 588 bp, Homo sapiens
tatcttatgttacttccattttcattcattctaacaatctgccctaattttaacatatattctccttcaatcattcttatttactatattgcaccttattttcagttattttttataatggttgccaagtatgtggccacaaagaaagcagcagaagagtccagacytttgacagaagtagttaaagcctgtctccaaccattctcactctctgccccacctccaactccccctaaagcctcccttctctcaaatccttaccaatccctcagcccactgaatgttggctctcaaacccttacgcacaggagtcccagaaagcccagggctggctctctcaaaggctgtaactcttcctgtaagtgtatcacatttattttactaaatggaaattgcttcctaacatctcacttaaggatctgcctggttttcaagtctatgatcagttgaaatttgggcaaacagacctatcactgtgccataaaccaagaggaaatgtgaatcaaaccttggaaaagaaccagacagatactcagggtgaagtgatggaggtggagggagattcattagaggttgaagttaaatagc

SEQ ID NO: 885058 - DNA, 611 bp, Homo sapiens
tgaggttctaccacatgccagacatttgtgctaggcactacaccatggcaaccatggtgtaatcattttccttcaatctaaacaactggattataatttcttcttaagtaaaagaaagaaggaagaaggaggaggaggaatgttcccctgttacaaggagggtattgaaaactctcctcaccctaagaggactgtgaaaaaatattatcaaaaagtgattacttcatagttatcactgataagaaaagaaaactggggtaaaaaaaaactcaaaatcattgcaaatgatttgcattgcaaatcaaaatcaatagcacaaatccagttkctgctcagtttctctccctctaggacaaatttgttctataacctgaacaagttatttaacttttgggctctagaatctcatttttgaaattaagaaattgtataaactaatatttaagttccaagaatctacaattttccaactattaccaaaatgatagaatgacaatctatgaaatagagacccagaagtaataaaataagtacacgaacctagtgcctctttttaggaagtttttattggatcccagctatgaagaatggaagcaatcttccaagatgta

SEQ ID NO: 885059 - DNA, 558 bp, Homo sapiens
cgtttaaatagtaaattagattgactctttcagatttgttgagtatataaatctgacattaatgagatattaatgaatagttctggaaatttggcatctcaaaattaatccaagtagatacagtatctgtttattctaactgggattttaaaatcctgacactctccaaccctccccccacccccccgacaaaaaaatgcttgtctatataatcaattttatattatgtaggagtatatttatctacggtttctttttaaaaaactttttaaagttaagattaaatttttttacattaaaataaaactttctttaaagatttaaagacagttgcttgacaaaaatttatgtacatatatctcctgggcaattttatttataaggacttattagacaattgtttagaaaaattaaaaatmgtctgttcaatgagtaatacgcaaaatttttttaaatgatgatagagccatgaataatgagattttctaagagtatttaataatttgggaaagtgctcatgatatgatattaagtaaaatgaataagataaaaaatggt

SEQ ID NO: 885060 - DNA, 688 bp, Homo sapiens
gaaaggaactttggaaagcatacaaatacataaaaattaaatgacatgctccagaacaaccattaggtcaataaagaaatcaagatataaaccaaacaatatcttgaaacacatgaaaatggatacacaacataccaaaacctgtgggatacagcaaaagcagtattaagagggaagtttatagcaataaacacctagatcaaaaaataggaaagtctcaaataagcaatctaacaatgtgcctcaaagaactagaaaagcaagaataaatcaaactcaaaagtagcagaagagaaataataaagattaaggcagaagaaaatgaaatagagcttaaaaatgaaaagaatcaacaaaacaawaagttagttcttcaaaaatataaacaaaatcaataaaccaccagctagactaaccatgaaaagaaggaaacccaaataaacaaaatcagaaatgaagaaggagacattacaactgataccacagaaatacaaaagattatcagagactattatgaacaactatatgataacaaactggaaaacctagaggaaatgaataaattccagaaaacataaaacctaccaacactgaatcaggaagaaattaaaaacttgaatagactaataatgagtagcaatattaaatcaataataaaaagtctcccaaaaaggaaaagcccaagact

SEQ ID NO: 885061 - DNA, 653 bp, Homo sapiens
tgtcgaaggttcataaaacagtctgatgcagcaagcttgtagacaaggactgtgtggcctccttgctcacagctgtgtgctgggttttagcatcgagccagtccagttaacatactgactggtggtagttacagacatgaaattgtacctgcatataatctaagtaagataaaaacagtgcaagtctgcaaaattctatccacatccaaagtgtctctgagaagtcgaggccctggtgatttatttgtcctacaccacaagtaacatcattttgaaatgatttttaaaccaaattattttcttcaacttgaaatagaaacatgtgaggacataaagtagaaaaaaaattgagtcagaaagtgtttttctccatattccccaacattcagaattacttagagagaccatggatactttcaaagaaaaagtatggttatgattccccaagactcttcccttgttctaagcacaacccmagcaatagcccattagggaaagctctgactctaaccttcaatttgtgtcatgaaagatggtgccaaaattttttcaccctttagatcttctcagagaggtattcacagttgggcaaatgaaagggtttgtgacattaaaaggcagcagtgtgtcctggcctacagtttgtatcacaa

SEQ ID NO: 885062 - DNA, 588 bp, Homo sapiens
tatgaaattcaacaggcattgggaaaaaaaccctattgtaatagtttcattgaatacttaattttataattatcttcctatttaaagcacacatccttaaacttacgtttttttaaatctctactaagcagtcaattttcttctaaatatatcctttctttttcattttcacaactgaaaccacatccatatcatctggcgcccctttgatttatgcaacactgcacacagttgatgtcttgcctttgatttggtgtttcattctacttccccatctgagccagtctattcaatattctcaattatgtgacaccccctccatcatatgcgcgtgcacacacacacacacatgcccacacacacacaaacacacatcyaaaaatatataatttcagtagctaccccatgactgaagttaggaccctgactacagcaaggacatttaattatcaatttggaaaaatccttgtctgtgtaaacttaattctgaaaagcaattgctctgctttgaaaataggacaatgataatacacacatgggtacaatgtagttactctagtgatggatacactaaaagccctgacttca

SEQ ID NO: 885063 - DNA, 579 bp, Homo sapiens
tatagagaaacaagacaaatggaaaatgtatgcaagctaaatctataccaaaaaagataataggtaccttaacaaaagaagaaaggaaatattttctttaacaatcagttcctttaaaaaatagtttaaagacaaaaacaaacacttttgctcatgctgtcattgcttgatttgatttaggaaacaaataaattgttcatgataatttcctgatcttaccaccaagagcccagtagaagcagaaattcaagaaaatgttagatgcaaagtcaggattgtcaaacctactgttcagaggttaattgaactgtctttagtgaagccaaaaaaagaaaatgaaaatgcatccacttccatactgtggaaagaattaaaacaayagacttccaagtgaaaaggatatgaaatgtaaaggtccattctgagaagtaaggccaggaagcaattaacaccaggtaaaccaggcaaattagagtggatatcaggcatttagggttccatttttcataacctcaatgtagatattttggctggtctcctaaatacctttcattttcactgccatgtgtctgctgagac

SEQ ID NO: 885064 - DNA, 608 bp, Homo sapiens
acagggaaattgatattaagcaagtaacagataactgttcatatgtatatatgcaaacacacatatataagtatttcataagatgagaaagctattaatattatcttatttcaggatactgaaatagaaccagacatactcatctaaaacacagggaatgaacagggatatatatcctcaattaaaattaattgatttaaaagagttcaaaggaaaagagccactgagaacagagatttcattgttcaaaaagagagataacttaactagaaattctttaaagtagcaatattggtttaaatcatctcctagaaactgttaacacagctattaaagaaaacaagaatagtctgtagtctgttctgctcatctggggctacttccccctccccatccctgctccctgtctctacwcccaattcatcacttcacagtagtccatccaagagacgatgaacacaaagatggttctggcagcctttcctggcaaggtgaaggtggaaaaataatttagccattgatgtcaaaggaatacaggagttcagaatgattctggtaagaagtaaaggaacttaaaatttccatctcagcctcataatttggaagta

SEQ ID NO: 885065 - DNA, 654 bp, Homo sapiens
cacaaacatttatccctgtgggatgaaagcacacatcaccaagcagttcttcaggtgccttaattctagtttttgtcctgggatattcccttcttcaccattggcctcaatgggctccaaaatgtccattcacagaatggacaaaaacagtttttccaaactgctgaatcaaaagaaagttttaactctgtttgatgaatgcacacatcacaaagcagatcctcagaaagcttctttctacattttatctgaagatattttctttttcaccataagatacaatgcgctctcaaatacctctttgcagattctacaaaaacagtgtttacaaactgcttagtgaaaaaaaacgttgaactttgtgagttgaatgcacacatcaaaaagcagtttctcagatagcttccttctagtttttatcctgggatattcacttttttgycattgtactcaatgtgctccccaaagcccattcacagaatggacaaataagtgtttcccaactaaggaatcataaaaaacggtttaactctgtaagatgaatgcacacatcacaaagcagtttctcagaaagcttccttctagtttttatcatgggatattcactttttcgccattgacctcaataagctgacaaacatccattcacaaaat

SEQ ID NO: 885066 - DNA, 620 bp, Homo sapiens
actacagactacacaaagaaaaacaacatagattaaaagcacaatcatcattgaaatcacagagcttccaagtgtttttatccattttaatgggttactagctgctaatttttcttcagctcctttaagcactcagtttctggcattaatgtgaggtgtgcctgggatgctttaaatgtttgttcttttaattttggcatatscaaaaacaagtttgtagagtgtccttatagattttttttatcctttcccaaattttgatcttattaagagcatttaatagtttccgcaaatccttatgttaagctcccagtgcgggccatatcatttgaggttgaggtgccacaatactgccatggttccagataataggaagttttgtcgtacttcttatcatatctaccatctgaccacttggttcagatcatctgaacatagtgtggccacggcacacagactgagaggtgcaattcaagctaaacctctccttaggggaatgattaataatgattccataggaatcattgtgcagcacctctgcctgttctgcaatgcaatcttcctaaacaagtacgttcattttttctaactgggtccaatcctgtttacaagtaggttta

SEQ ID NO: 885067 - DNA, 653 bp, Homo sapiens
gtggtgaaaaagaaaataccttcagataaaaactagaaagaagctttcttagaaactcctttgtgacgtttgcatttatcaggcagatttaaagctttcttttcattcagtagtttggaaacactttttttgtacaaccagtgaagggatattttagagcgcaatgaggcctatggcagaaaagaaaatatcttcaaataaaaagtagaaaaaagcttttgagagactgctttgtgatgtgtgcattcatctcccatagttaaaactttcttttgattcagtagtttggaaacactgttattgtccattcagcaaatggacagttgggagmtcattcaggccaatgatgaaaaagtgaataccacaagataaaagctagaagaatccgatttgagaaactgctttgcaagctgtgcattcatctcacaaagttaaacgtttcttttcattcagcagtttggaaacactgtttttgtagaatctgtgatgggatgtttcagagcactttgaggcctatgatgaaaaagaaaatatcttcagataaaaactagaaagaagctttctgagaaactcatttgagatgtgtgaattcatctcacagagataaacttttcttttgattcagcactttggaaacactgtttatttccatt

SEQ ID NO: 885068 - DNA, 653 bp, Homo sapiens
gtggtgaaaaagaaaataccttcagataaaaactagaaagaagctttcttagaaactcctttgtgacgtttgcatttatcaggcagatttaaagctttcttttcattcagtagtttggaaacactttttttgtacaaccagtgaagggatattttagagcgcaatgaggcctatggcagaaaagaaaatatcttcaaataaaaagtagaaaaaagcttttgagagactgctttgtgatgtgtgcattcatctcccatagttaaaactttcttttgattcagtagtttggaaacactgttattgtccattcagcaaatggacagttgggagatcattcaggccaatgatgaaaaagtgaataccacaagataaaagctagaagaatccgatttgagaaactgctttgcaagctgtgcattcatctcacaaagttaaacgtttcttttcattcagcagtttggaaacacygtttttgtagaatctgtgatgggatgtttcagagcactttgaggcctatgatgaaaaagaaaatatcttcagataaaaactagaaagaagctttctgagaaactcatttgagatgtgtgaattcatctcacagagataaacttttcttttgattcagcactttggaaacactgtttatttccatt

SEQ ID NO: 885069 - DNA, 649 bp, Homo sapiens
gatgtgggcattcatctcatagagtttaacttatgttttctttcagaagtttggaaacactgtttttgtagaatctgcaaagggatatttgggagcccattgaggcctctggtggaaatgtaaatatcttcacataaatctaaaaagaagctttctgagaaactgctttgtgatgtgtgcattcatctcacagagtaaaaatttcttttgtttcagcagtttggaaacactgcttttctccattctgcaaatggacattttggagctcattgaggtcaatggagaaaaagtgaatatcycaggataaaaactgtaaggaatctatctgagaaactgcttttggatgtgtgcattcatcttgcacagataaacctttctttacattcagcagtttggaaacactgtttctgtagaatctgtgaagaaatatttgggaatgcattgagacctatggtgaaaaagaaaatattttaagataaaaagtagaaagaagctttctgagaaagtactctgtgatggttgcattcacctcacagaattcaacatttcttttgttccagcagtttggaaatgctgtttttgtagaatctgcaaaggatattccatagtgcattgaggcctttggtgaaaaacaatgtatcttcaaata

SEQ ID NO: 885070 - DNA, 673 bp, Homo sapiens
attcagcagtttggaaacactgtgtatagtctttgaagggatatttgggtgtgcattgaggctatggtgaaaaagaaaatatcttcagataaaaagtcgaaggaagctttctgagaaagtgctttttgatttgcacattcatctcacagaattaaacctttcttttgattcagcagtttgaaccagtgtttttgtccattcagcgaatggacagtttgtggctcattgaggccaatggtgaaaaactgaatatctcaggataaaaacaaaaagaagctatctgagaaactgctttgtgatgtgtgcattcatcttgcagagataaagcttacttctcattcagcagattgcacacactgttttcatagaatctgtgaagggatattttggagtgcaaggagacctatggygaaaaaaatcttcagataaaatgtagaaagaagctttctgagaaactgctttgtgatgtgtgcactcatttcacagagttaaccatttcttttaattcagcagcttggaaacactgtttttgaacattctgcaaatggacatttgggagctcattgagaccaatggcgaaaaagtgaatataccaggataaaaactagaaggaagctaactgagaacacactatgtgatttgtgcattcatctcacagagttaagcctttctt

SEQ ID NO: 885071 - DNA, 672 bp, Homo sapiens
gaaactcctttttgatgtgtgcattcaccgcacagagtaaaaccttactttgccagcagcagtttggaaacactttttgtagaatctgcaaagggatatttgggagtgaatttaggcctatggtgaaaaagaataaagcctccaagaaatatgggactatgtgaaaagaccaaatctacgtctgattggtgtacctgaaagagacagggaraatggaaccaagttggaaaacactctgcaggatattattcaggggaacttccccaatctagcaaggcaggccaacattcaaattcaggaaatacagagaacaaccacagagcaactccaagacatacaattgtcagattcaccaaagttgaaatgaaggaaaaaatgttaagggcagccagagagaaaggtcaggttacccataaggggaagcccatcagactaacaggtgatctctctgcacctgttgggggccaatattcaacattcttaaagaaaagaattttcaacccagaatttcatatccagccaaaccgagcttcataagtgaaggagaaataaaattctttacagacaagcaaatgctgagagattttgtaaccaccagacctgccctacaagagctcctgaaggaagcactgaacatggaatggaacaaccggtaccagccactgcaaaaac

SEQ ID NO: 885072 - DNA, 607 bp, Homo sapiens
gccaatgttacttttaattattttttgttatcctgaaaaatgaataatatgttgccatgtgcaggtcttgccaattctgctaagcctgttcatgtgaaatggatgctgtgatatcctcagaaagtttgtcttaggtatgttaaacatggtccctgccatcttttctactgtgtattcctatcactggcatacccaaatcctttttaatgatgcagaggcagcttagcctgtgttcaaattatatgaatcctaagttagaagggggtccacattacaaagtttaccacttacttgaaaaggacacttacttaactaggaccaatatttgacttcyaaacacctttactcactcattccttggtctcagcagcagcacgtcatataggtagttactcatggaggcagaagcagggggaagaaggaggtgtctctgtgagctgttttgttttattttacctttaaacgaaaaagcccccaaggctggtgttcaatcagcccgcaaataacccccaccatcgacaacgccaaagaacatgactgcccttctttccacacacacttgttagaaagttgttttatgactttgtttcctcttcatggatatcat

SEQ ID NO: 885073 - DNA, 673 bp, Homo sapiens
agaaaacccagcccttgatttaatgctcctttgtcgttaacttaaaagtcctaataatttctgaacaagttactatattttggattaatgtggtacttagaaatagacaagtaatacagtatcaaataggatgttgtcttatgtatctttttttttcctttttttaaaattatactttaagttctggggtacaagagcagaacacgcagttttgttacataaatatacacgtaccatggtagtttgctgcacccatcaacccgtcacctacattaggtatttctcctaatgttrtctctccgctagccccccacacccttacaggcccgtgtgtgatgttcccctccctatgtccatgtgttctcattgttcaactccctcttatgagtgagaacatgtggtgtttggtttcctgttcctgtaatagtttgctgagaatgatggtttctgccttcatccatgtccctgcaaaggacatgaactcatcgttttttatgactgcatagtatttcatggtgtatatgtgccacattttcttaatccagtctattattgatggacatttgggttggttccaagactttgctattgtgaatagtgccacaataaacttatgtgtgcatgtgtctttatagtaaaatgatttataatcctttgggtatatgcccagtaa

SEQ ID NO: 885074 - DNA, 608 bp, Homo sapiens
aataactaaaaatgtggaatatctctttatatacttatttgctatctgtcttagtacactttctgtggattataacagaataccagaaactagacactcaacagagaaaagaaatttgtttctaacagttatgaaggctgagaattccaatgttcagggaccacatcttataaggaccttcttgttgatggtgtctctctgcttctattctctaaaggaaaytacagataatttatataatttcttccttaaagtttcaatataattcactagtgaatccatctgggcttgactttttctgttttggaaggttatttattattgatgacatttgtttaatagatacaggcctattcatattgtctatttcttcttttataactttggaaaactgtgggactttttaaaaattggtttagcttacatagatatgagatatgtgggcatagttgtcactagtattcttttattatccttttaatgtccatgggatctgcaatgatgtctcctctttcatttgtaatcttagtaatttgtgccttctcttttttttttccttagtctggcttaagggttatcaatttcatacattttttttcaaagagcca

SEQ ID NO: 885075 - DNA, 544 bp, Homo sapiens
tctttttaagtcctattacttcatgaaaaattaataaatcacctcactgcttctaatttactgccccacttaagttctgacactttcttggtgacaagatgctatttgggaggtggagaggtatggcttctatttctgttatacacatatgtggtcatccaggattttgtttcttaaacttgaatgacacagaaaccatatttaaagaggaataaatattatataattcctgcactgatttactttggactacacagagtgaacgtgagggccagcaaatatctttgcatacttatctaaagcctatacwtcttccgcctctgctaagtgactaggaaattaccaacagtgaattgctaatatagtaaactctaggacaattctcttcaccatttttccttgaaacaatgaaggaaaaaatgaccaaggaaatatacaagaatctctgtttgtctgttattggtgtataagaatgcttgtgatttttgcacattgattttgtattctgagactttgctgaagttgcctatcagcttaagatttt

SEQ ID NO: 885076 - DNA, 583 bp, Homo sapiens
ctatagataatatactttatgctaaataacttttaaaaatgtctctgtggttgctagagttctaaaatcatatattaatttatttctaaatgttatttaaagaagaaattgagcaaaggaaagatgctctaaatttatatggattgctttaacattgcttaatgaaggcttgcagttgactttatgaaggaaacagaaacatcttgttataaaatgaaaccttatatcttccctctctgtcaccttaaaatacaatttacataaagaagggcaacagtaattgaagagcaattatggtagctttctgtattcatgccaaagaataaacatttataccctttgtgtgtttaagaaaaaatggtctcacaaakttgacatctcctatgttagcagcttattaaaatttagtagaaagagcatatttccatttttaagaaaataaaagaacaatgtgaaaggaatgtgtagtagtctattgcatccacttttactgtgcagataattaaaaattagaaatttgggctttaaatgttgaagcctgaatgtaactactcagatcgactaacctacatataatttgcaa

SEQ ID NO: 885077 - DNA, 595 bp, Homo sapiens
tcaaaacactaacaatagaaagtgtcttgaaaaatatggagctcttagcacattcatatgtttatcagatttagtttgggaagtaaagtgatacaattatgattggtaactatttgacatttctttcaaaattactcattcacstactatattatctagcatttaaatgctcaggtatttacccaatagaggaaaacatctgatgacaaaaagcattggaaaagaagccttagtcataatatctaaatattgaaactaaccctaatacccatctacaagaaatgttaaggaaagtgtggtgtattcatacaatggaatattagtcaacaataaaaaagaacaagctacaaataaatgcaaaaatttaatgaagctcaaaaacataatgtggagtaaacaagacacaatgctatgcatttattgaatttcatactacatgaaatagtatatagtatgtaagtaatatatatactatatatattatatgtaacatataatgtatttatatattattatacttgtgtagtaacatattatatacttatatatagtatatatgttacttatagagtatattatatgtaagtatataata

SEQ ID NO: 885078 - DNA, 654 bp, Homo sapiens
ctaattgatgcaaaaatggacttgtacacacatttaagataatttaaattatgtgtatatagatattgtttgacaatattatttatctatctgtataaccctgtatatagacattgtgaacaaagcattatgttatgttctatataaagaaatttatggtaaatacttatatttaccattatatatatattatatggtacattatatggtatattatatggtatatatatggtattttatatggtaaatatatatattttatatatattccagtattaggaatgcagctattttctacttttattttttcctttctagttacagaccctaaaatgttcatgctatatatttattcccaggcactagaaatttttaaacacaagtaaccatataatgcaaataattgttttaaattaaaggtgaagatgctamtcaagattttttttaatagtttctttagggatgaaggccagccagatgatagaaaaggactctccagtgctcattccctggcagaaacatcaattcaaacacctatccacacacaaaaataccttcacaagagctaaggaaatcaggtgaaaaattacagcaccaggctctagcacaaacataagaagagatgagtgacaagggtaggaatgacaatcttac

SEQ ID NO: 885079 - DNA, 623 bp, Homo sapiens
actggaaaatacaaaagagggaacagaaataaaaaagcaaagtttgaaaactacctattgcttactttgctcatttattgggctcatttcaggtttagtcatacttcaagacccaatatcattcaatatgtctttgtaacaaacctgcacatgtacctctgaaatttaaaataaaagttggaaaaaagttctttaaaaattttacaaagtatagagatttttatgcaatcagagttaattattatcagcttaaaatagcttgttataactataggatgttttttgcaatcctcttggtaagcacaatgcagaaacttatagtatatacaaaaaagacaaaacataaagaaacaaagcatatcattaaagaaaatcacctaattacaaagacatcaagaagaaaggaacaatctacamaacaaccagaaaataactaacaaatggaagtactaagtttctatttatccaccattaccctgaatgatagattaaattctccagtcaaaagacatagagtggctgatgattaaataaaaaggctaaactacatgctgcctacaaaagacttagttcacctgtaaggatacacatacaatgaaagtaaaggaatgaaaaaagtattc

SEQ ID NO: 885080 - DNA, 600 bp, Homo sapiens
ccaagtccaaagtcacatctgagacaaggcaagtcccttctggctatgagtctgtaaaattgaaagtaagttgttactacctagatacaatgggagtacaggtattgggtaaatacacccattccaaatgggagaaattggycaaaacaaaggggctacaggccccatgcaagtccaaaatccaacagggaagtcattaagccctaaagttttactttgactccatgtctaatgtcctaattttgctgatgcaagaggtgggctctcatagctttgggcagttccatccttatgactttgcagggtacagcccctgtcgcagctactttcaatggctggtactgcagcttttccagatgcacagtgcaagctattggtggatctaccactctggagtctggagaatggtgagcctcttctcacagctccactaggcagtgccccagtggggactctttgtgtggggttcaacctcacatttccccctttactgccctagcagaggttctccatgagggctccactctggcagcaaactcctgcctggacatccaggcatttccatacatcatctgaaatctaggtggaggttcacaaatc

SEQ ID NO: 885081 - DNA, 600 bp, Homo sapiens
ccaagtccaaagtcacatctgagacaaggcaagtcccttctggctatgagtctgtaaaattgaaagtaagttgttactacctagatacaatgggagtacaggtattgggtaaatacacccattccaaatgggagaaattggccaaaacaaaggggctacaggccccatgcaagtccaaaatccaacagggaagtcattaagccctaaagttttactttgactccatgtctaatgtcctaattttgctgatgcaagaggtgggctctcatagctttgggcagttccatccttatgactttgcagggtacagcccctgtcgcagctactttcaatggctggtactgcagcttttccagatgcacagtgcaagctatyggtggatctaccactctggagtctggagaatggtgagcctcttctcacagctccactaggcagtgccccagtggggactctttgtgtggggttcaacctcacatttccccctttactgccctagcagaggttctccatgagggctccactctggcagcaaactcctgcctggacatccaggcatttccatacatcatctgaaatctaggtggaggttcacaaatc

SEQ ID NO: 885082 - DNA, 578 bp, Homo sapiens
cataataaaagaccaataaaaacacacagccatagacaacaataaacagaacttgatttagagaagaatctttggttttagcttcaacatgtaaacgctaggaattcgtctctcctatctttacaaggaaaaaaaaatcaaagctggacaaactgaaaaccatagactcttctcagacccatgagagaactgaggtcacagtgaaaaccatcactccaaaatctgctagacaataagactatcttgaaaatgatcaaagtaaagaagttacattacctgattttaggaaataatataaagytagacaaatggattaatgtaacagaatagagcatctacaaaccaatcatacatgtatacaatcaacataatttcaacaatattcaaaaaaaagattttgaatctgaaacaactggataaatatggaaaaatataaatttgggaaagaaaatctagaatatcttagtatgttgagataggtaaaatttcttagacaaaacccaaaaagcactaccataaaagaaaagtataaagaagtgtaatttatcaaattagacattgctgcttttcaaaagacc

SEQ ID NO: 885083 - DNA, 628 bp, Homo sapiens
catgctcatggaaaagtactcaacattgttagtaggcagggtaatgtaatttaaaagcatatttaaatatcaattcaaattcattagaataactaaaattataaagattgataaggccaaatgttggtaaggatgtacaataactggagttgatgggaatggacaatggcaaaactactcgcaaaattctttgtcagttctttctaaagttaaatataccctaaatattttgcatgagaaatgaacacatacrtccacaaaaaatttttagcaacttcacttataaaagttaaaaactagaaaaaacctgtgttcataagcagaaaataaataaaatattgtgggatatttaaacaattgtacactaccaaacgataagaaataattattgatacatataataacattaatttcaaaatgcattatataaagcaaaagaagctggtcacaaatcaacatctactgtataatcccattaataagaaatttggcaacaggcaaaactaatctaatgggctagaaatcaaaacagaagttgcttaaagttagttggaattgattggaaagagacaaaagggaacttctgggcatgatgaaaatattctttattttgattagatactgtttt

SEQ ID NO: 885084 - DNA, 628 bp, Homo sapiens
catgctcatggaaaagtactcaacattgttagtaggcagggtaatgtaatttaaaagcatatttaaatatcaattcaaattcattagaataactaaaattataaagattgataaggccaaatgttggtaaggatgtacaataactggagttgatgggaatggacaatggcaaaactactcgcaaaattctttgtcagttctttctaaagttaaatataccctaaatattttgcatgagaaatgaacacatacgtccacaaaaaatttttagcaacttcacttataaaagttaaaaactagaaaaaacctgtgttcataagcagaaaataaataaaatattgtgggatatttaaacaattgtacactaccaaamgataagaaataattattgatacatataataacattaatttcaaaatgcattatataaagcaaaagaagctggtcacaaatcaacatctactgtataatcccattaataagaaatttggcaacaggcaaaactaatctaatgggctagaaatcaaaacagaagttgcttaaagttagttggaattgattggaaagagacaaaagggaacttctgggcatgatgaaaatattctttattttgattagatactgtttt

SEQ ID NO: 885085 - DNA, 592 bp, Homo sapiens
aggctacagaaagagcaagagagagtcaggagggtgcacacatttttaaatggcaagaacttgtaagaagttactcactatcgtgataatagcaccaagccaggaggaatctgcccctgtgactcaaacaggtcccaccaaccctcttgccctcaagcattggggattataattcaacatgagatttgggtaagggcaaatatccaaactatatcaaaratttctcaaaacactaaaaagagaactacaatatgtctagcaatcccactaccaggtatttatccaaaggaaaagaaatcagtatatcaaaggcatatctgcactcccgtatttattgtagcgctacacacaagagcaaagatagggaatctacctatgtttccatcaacagaataatggttaaacaaaatatgacgtatatatacacaatggaatattatttgggcataaaaaggaatgagatcatgccatttgcagcaacatagatggaactggagatcattatgttaagtgacataagccaggcacagaaagacaaatactgcatattctcactcatatgttggatctaaaatacttgattttatggtag

SEQ ID NO: 885086 - DNA, 592 bp, Homo sapiens
aggctacagaaagagcaagagagagtcaggagggtgcacacatttttaaatggcaagaacttgtaagaagttactcactatcgtgataatagcaccaagccaggaggaatctgcccctgtgactcaaacaggtcccaccaaccctcttgccctcaagcattggggattataattcaacatgagatttgggtaagggcaaatatccaaactatatcaaaaatytctcaaaacactaaaaagagaactacaatatgtctagcaatcccactaccaggtatttatccaaaggaaaagaaatcagtatatcaaaggcatatctgcactcccgtatttattgtagcgctacacacaagagcaaagatagggaatctacctatgtttccatcaacagaataatggttaaacaaaatatgacgtatatatacacaatggaatattatttgggcataaaaaggaatgagatcatgccatttgcagcaacatagatggaactggagatcattatgttaagtgacataagccaggcacagaaagacaaatactgcatattctcactcatatgttggatctaaaatacttgattttatggtag

SEQ ID NO: 885087 - DNA, 622 bp, Homo sapiens
aataaaaaataaagagtgaaactgtcccacactctaaagattagaaaactccatatattaatggtcaactaatatttatactaattacatcattgatggagaacatatatgagaatatgtttttttttttttttttagtgttctaagatctgaggttgtacagaattgaggattccaatacggcacactgatgacaaaacacttatgttgatttgcctctgtggtttgtcataagagttgatacttggaaaagaatatatgtcagtccagcagatttacaataaatggtggcctaataggaactacaaaatttgtgccaatttaagacacatatttaagtctgaatagagaagttgctggtatcccagtggagaaaataaatgatgaaacaagataaggatcatttttattgctgagaaatgctgaggctgactagattgcaggatagatacattgaaatttaacaacttgraaaaatgcaattaattagtaaacaagtatacgcgtttgttctttgaaagcattaattcagtcagcttcatggatatacaaccagtgcagtcaataccctggttttgtcatctcaaaatccttaataattttaaaacagaagtcctaaatt

SEQ ID NO: 885088 - DNA, 614 bp, Homo sapiens
ctttgaaaattttgccaggcagtgtctgtctacaagccctaaattaatattttacaaatgagacactgccacatgtctgtgtttgctgtttttaaagtaatgtaatatatttttattgcagattctgagaatcatcttgcagtctgttaaaacaaataatgcaatgtccagycgtcaggtttctgatttagtagatctattatatgatggggctaaaaaatttacatttcgacaagttcccaggcaatgctgatgctgctgttctggggaccacattttgggaacgaacctctgctttgttatatgagccagtttgattcaaggtacttctttagttgcatccaaacatctcccaaatgatcgcatttgggatttctattgttttaagataaatattttattgaagaagaattgttgttcagagaagttaaaggctagttgctattggtatttctgaaatggttgcagataacacataaaggactaaaaaaactttcaattagttgtcaaaaatcaatatatactacaaatttagataagtgcctatgatttgcagctcgctcagagaggtagaagttggtgtactagaactttttaaagtcttaataatatat

SEQ ID NO: 885089 - DNA, 623 bp, Homo sapiens
tagtacaaaacgacaataacaaaaacttcattgtttctttaggacatatttgcaaacccatgcaaacactttttgtattgaaatagtttgtatacctaaacaaaagcttatgtttcaaactaaattttgttctcaatactcgctttgaaaattttgccaggcagtgtctgtctacaagccctaaattaatattttacaaatgagacactgccacatgtctgtgtttgctgtttttaaagtaatgtaatatatttttattgcagattctgagaatcatcttgcagtctgttaaaacaaataatgcaatgtccagccgtcaggtttctgatttagtagatctattatatgatgkggctaaaaaatttacatttcgacaagttcccaggcaatgctgatgctgctgttctggggaccacattttgggaacgaacctctgctttgttatatgagccagtttgattcaaggtacttctttagttgcatccaaacatctcccaaatgatcgcatttgggatttctattgttttaagataaatattttattgaagaagaattgttgttcagagaagttaaaggctagttgctattggtatttctgaaatggttgcagataacacataaag

SEQ ID NO: 885090 - DNA, 623 bp, Homo sapiens
tagtacaaaacgacaataacaaaaacttcattgtttctttaggacatatttgcaaacccatgcaaacactttttgtattgaaatagtttgtatacctaaacaaaagcttatgtttcaaactaaattttgttctcaatactcgctttgaaaattttgccaggcagtgtctgtctacaagccctaaattaatattttacaaatgagacactgccacatgtctgtgtttgctgtttttaaagtaatgtaatatatttttattgcagattctgagaatcatcttgcagtctgttaaaacaaataatgcaatgtccagccgtcaggtttctgatttagtagatctattatatgatggggctaaaaaatttacatttckacaagttcccaggcaatgctgatgctgctgttctggggaccacattttgggaacgaacctctgctttgttatatgagccagtttgattcaaggtacttctttagttgcatccaaacatctcccaaatgatcgcatttgggatttctattgttttaagataaatattttattgaagaagaattgttgttcagagaagttaaaggctagttgctattggtatttctgaaatggttgcagataacacataaag

SEQ ID NO: 885091 - DNA, 621 bp, Homo sapiens
aaaattccagggttccagtttgtgtggtttgaataatgatggtatttctcttcctatatatatggcagaaagagaccataaaatagaatctcaaacaggaggtctcttcctgattctatatatgataaatctgaatcttcagatcacgtaaatggagaagtctcacatttttctttcttgttaccacttactccattttttaatctctactggaaatgtctgccatggacaatgatgtattcttcctggccgtaacctcattttctgactgttcattytactgccaactccaccttcaccatcttcaatacagtcttttacatcattgctcagcagttcttagtgaaaatcagctcatgcggctcttaaatccagctgaagatagccaaacccgagggcctgggtcaggtaaggttgctgaactgcttactctcacagttgaggagacatatacaagaagcaaggaaagactagaaaatacaatgtattagtccattctcatgctgctatgaagaaatacctaagactgggtaatttataaagaaaagaggtttaattgattcacagttctgcatagctggagaggcctcaggaaacttacaaccatggcagaaagcactt

SEQ ID NO: 885092 - DNA, 621 bp, Homo sapiens
aaaattccagggttccagtttgtgtggtttgaataatgatggtatttctcttcctatatatatggcagaaagagaccataaaatagaatctcaaacaggaggtctcttcctgattctatatatgataaatctgaatcttcagatcacgtaaatggagaagtctcacatttttctttcttgttaccacttactccattttttaatctctactggaaatgtctgccatggacaatgatgtattcttcctggccgtaacctcattttctgactgttcattctactgccaactccaccttcaccatcttcaatacagtcttttacatcattgctcagcagttcttagtgaaaatcagctcatgcggctcttaaatccagctgaagatagccaaacccgagggcctgggtcaggtaaggttgytgaactgcttactctcacagttgaggagacatatacaagaagcaaggaaagactagaaaatacaatgtattagtccattctcatgctgctatgaagaaatacctaagactgggtaatttataaagaaaagaggtttaattgattcacagttctgcatagctggagaggcctcaggaaacttacaaccatggcagaaagcactt

SEQ ID NO: 885093 - DNA, 643 bp, Homo sapiens
taaagtagaccactagggtacaataagtgagttagaaagaaaaataaaggactgtgttctcagatagataaatagatagataatagctagatgatagatagatgatagacacatacatatatgtacacacatttataaacacacacaaatacatacacagtattttgagaataaataataaatatgtcaaataycacagagaaatgttgatcccatcattaaatgagaatttacagcagtgcttggctcctaggttatggattggtgctggatggggaactgaaagagaagctctccgtagttatattgtctctacaacttcattcaaggcagctgacaagatgctgagttcagcaatgtggggagttttgatacaatgaggataaaaatctctggaaaaaatgtgtgaaggattcagggtaagcagtttacacaaactgtcatgagatggttgaaggcaggagttggggtgaagtaaaatgttttcttctaggttacaaaattctcaagctgcttgagttggaaagcaggaattcaataggttacactgacatgatactatgtgaccagatttggatatgggatatagagacattttgtgaatagagcatttggcaaagaggaaacagatttctggaagatg

SEQ ID NO: 885094 - DNA, 643 bp, Homo sapiens
taaagtagaccactagggtacaataagtgagttagaaagaaaaataaaggactgtgttctcagatagataaatagatagataatagctagatgatagatagatgatagacacatacatatatgtacacacatttataaacacacacaaatacatacacagtattttgagaataaataataaatatgtcaaataccacagagaaatgttgatcccatcattaaatgagaatttacagcagtgcttggctcctaggttatggattggtgctggatggggaactgaaagagaagctctcmgtagttatattgtctctacaacttcattcaaggcagctgacaagatgctgagttcagcaatgtggggagttttgatacaatgaggataaaaatctctggaaaaaatgtgtgaaggattcagggtaagcagtttacacaaactgtcatgagatggttgaaggcaggagttggggtgaagtaaaatgttttcttctaggttacaaaattctcaagctgcttgagttggaaagcaggaattcaataggttacactgacatgatactatgtgaccagatttggatatgggatatagagacattttgtgaatagagcatttggcaaagaggaaacagatttctggaagatg

SEQ ID NO: 885095 - DNA, 643 bp, Homo sapiens
taaagtagaccactagggtacaataagtgagttagaaagaaaaataaaggactgtgttctcagatagataaatagatagataatagctagatgatagatagatgatagacacatacatatatgtacacacatttataaacacacacaaatacatacacagtattttgagaataaataataaatatgtcaaataccacagagaaatgttgatcccatcattaaatgagaatttacagcagtgcttggctcctaggttatggattggtgctggatggggaactgaaagagaagctctccgtagttatattgtctctacaacttcattcaaggcagctgacaagatgctgagttcagcaatgtggggagttttgatacaatgrggataaaaatctctggaaaaaatgtgtgaaggattcagggtaagcagtttacacaaactgtcatgagatggttgaaggcaggagttggggtgaagtaaaatgttttcttctaggttacaaaattctcaagctgcttgagttggaaagcaggaattcaataggttacactgacatgatactatgtgaccagatttggatatgggatatagagacattttgtgaatagagcatttggcaaagaggaaacagatttctggaagatg

SEQ ID NO: 885096 - DNA, 643 bp, Homo sapiens
taaagtagaccactagggtacaataagtgagttagaaagaaaaataaaggactgtgttctcagatagataaatagatagataatagctagatgatagatagatgatagacacatacatatatgtacacacatttataaacacacacaaatacatacacagtattttgagaataaataataaatatgtcaaataccacagagaaatgttgatcccatcattaaatgagaatttacagcagtgcttggctcctaggttatggattggtgctggatggggaactgaaagagaagctctccgtagttatattgtctctacaacttcattcaaggcagctgacaagatgctgagttcagcaatgtggggagttttgatacaatgaggataaaaatctctggaaaaaatgtgtgaaggattcagggtaagcagtttacacaaactgtcatgagatggttgaaggcaggagttggggtgragtaaaatgttttcttctaggttacaaaattctcaagctgcttgagttggaaagcaggaattcaataggttacactgacatgatactatgtgaccagatttggatatgggatatagagacattttgtgaatagagcatttggcaaagaggaaacagatttctggaagatg

SEQ ID NO: 885097 - DNA, 671 bp, Homo sapiens
tacaggttgaaaaacctgtgatgtttggccagctcattcctattcctcccccatatggtacagcatgaaacaaacagagagaaacttttcccccagcccccagactgggggtcctccctcaggatggaaacaaaagagtagactgtggatcataattctggcttgtcttcagtgcagcccaagagactggcttctatcttacctgagtgctggtaggattggaaccagagtttagaaatcattgaaaatagaggtaagcagcatgttaaaccwgcagttccatgggcagacaccaaaggaacgagaggtcagaaaagatttgaaaggtcctagaatctgtggctgggctgaatggtaaaggtctttccctgaacaaagacagtatacaaagactgggagaggtgactgattatttttaagatgtctgaatactagcaaaaaattacaaggcatatgaggaagcagggaaactcagcccaatcctaagaaataaaataaaactccagaaactaaccctaaagaatcacagatctataagctgcctgattaaatatttaaaataactgctataaaaatgctcaatgagctaaaaacaaacaaaactaacaaaaaaaacatcaacaacacacacacacagacaagtaaacaaaatcaggaaaatgacataccaa

SEQ ID NO: 885098 - DNA, 612 bp, Homo sapiens
ctttgtttcgaaaaaagaaacgtacatcactctatggctcatcagtgatccattttgacacaatttcaataatgtagacctggacttctcatttaaccaaaaattgtgataaaactataatgcagacaagaaggaatagtaggtagkaaatacaattctccaaaaataaaaagccaagataatatatgaaattggtaaatcaaaaaagaataacataatcatgttatttaagggatgaaataaatatcagaagaaccaactaaaagaattgagcaactgcatctggagatcaggaccagagttggctagagatggaaaacaaaagtcactgttttgtactgcacatattttagtaatatttgatttttttaaaatgtgcaaatattttcatggattaaaaaaaaactgtctactcccagctccactaaacacacactgtcagatattagtcatgaagttgacttaaaaattccgagttcctggctgggggcttaaagtccatcaaatgtaaatagtaacagtatgctggttgcagcatggacctcaactgtgatgatttttatgtgtggttaaaaatggaacctgagaggtgccaacttcagccaatttgtc

SEQ ID NO: 885099 - DNA, 641 bp, Homo sapiens
ggatgttctcttctgagttctttgattttctcagtgtagtgggaagcaaggtcttcaactcagagtgaagattccagaagacattttagagatctgaggaaaagggtactatgtagtcatctaggagagtagaaaataaaatagactaagaaaatataatatgattgatggttagctttaagactcaccaggtcataaatttaatatgggaccagtcaatgtggttgtgagttattcttcaacgctgtttggtggcaagcctctaggaatggagtaggcagagtytgatttagccatggctgtggttctgccatgagtgtgtaacaaattgaaagagggcagggagattgaaggtgtatataatatggagtggctgaaatgattgatcatgggctttaagtttgatatagaaaggagagaagatgtcatgaatgtgagaggcagtgaaatgaaggtaggataaatgaattttagatcctgctggcattaaagaacattagatattaaaggattattgttaaagattgaatatatatcttatctttaaaatatacatgttaatatagttacagatgaaaacatcacgccttatatttacttcccattataatggatgaaaaaaatggccgtgaatgataatt

SEQ ID NO: 885100 - DNA, 629 bp, Homo sapiens
taataaccagtttggaagcagagtagagataaggagttcagttggggaagtaagtacctagtttggggtctatggaacactcaggtagggatgtccagaagacgatgttcatgaactagcaatgatgggcagcacttcattttttgtggcctttgtcccatttctcaacaagtaacaaatgacctacaaagaccagccatcttcatttctgagtccacgaacaatgtagaggcgrcccaaccctgcttcacacttgaacagagctaatgataagtctcccaggaaattctgttattcctgcactgctggggggctaacagggaatttctttctaagctagagacatattggacggagaagagcatcagaaaatagcaatgggcaggttccagtatgtcaggcacccgttgtttctctcaagcattaattctaagaggaaatatagagaaagctatactggattcttagaaagcctatttaagccagcaattttagctaacacccaaaaggggaggaataatgtatcattagccaccccaagaaagacctactgaatagagggagaaaaaaataaatatattagttatatacaaccaaaaagtatacatgacatcataatctttcaattt

SEQ ID NO: 885101 - DNA, 654 bp, Homo sapiens
tggattaggaagctcgagaaaggtttcttggaagaggtgatgcttgagctgaatttagaaggatgagtaagtcttagatgatgtgggggtggagagagcattttcctggaagagggaacaatatgtgcaaagacttggaagcctaaagtgcctgtcatattttaaggaacaagtagtttcaaatgactgctttgaaggtgtgtgatgggtggtgggggtaggcrggaggagaggtgtgtgcagaggtggggataacagagcaataagggatggtatagccaaaacttctgaacttgatcctgaaagctttgtgaaatctgaaaacagggtcacagtgacacggccagaatgacattttagaaagagggcagaattgataggaggagttcgcctggaggcaggaagctcagtcagagcccaagcaatagcagtaagggcatgaactaaggcatcctggccagcaggatgggaagcagtgggagagctaatagaacctgcagaagttgaaaatacgaagctctgtgactgagtataataagtgtgacaagtcagaatgactcccagaaacgaaaatgtatggataatttgggtttagtaacttgctacttttacttaactgtttctttacctcactgggagggtaggtatctgcta

SEQ ID NO: 885102 - DNA, 654 bp, Homo sapiens
tggattaggaagctcgagaaaggtttcttggaagaggtgatgcttgagctgaatttagaaggatgagtaagtcttagatgatgtgggggtggagagagcattttcctggaagagggaacaatatgtgcaaagacttggaagcctaaagtgcctgtcatattttaaggaacaagtagtttcaaatgactgctttgaaggtgtgtgatgggtggtgggggtaggcaggaggagaggtgtgtgcagaggtggggataacagagcaataagggatggtatagccaaaacttctgaacttgatcctgaaagctttgtgaaatctgaaaacagggtcacagtgacacggccagaatgacattttagaaagagggcagaattgataggaggagttcgcctggaggcaggaagstcagtcagagcccaagcaatagcagtaagggcatgaactaaggcatcctggccagcaggatgggaagcagtgggagagctaatagaacctgcagaagttgaaaatacgaagctctgtgactgagtataataagtgtgacaagtcagaatgactcccagaaacgaaaatgtatggataatttgggtttagtaacttgctacttttacttaactgtttctttacctcactgggagggtaggtatctgcta

SEQ ID NO: 885103 - DNA, 620 bp, Homo sapiens
acagtccaaattctctttgatattatataatgcaaagactaaattaatcattactatcaatacattgtatgtaagacaataggagaaggagagaattataaaagtggcctgaatcatttttgcttacattctgctrgccagtcatctagaagaaaaatggaaattatctggtgaacaatagcattgcctctgtaatgcaagagagcacaacgtttcagaaaagagagacttttgattaaccacatgtatctatctcttatttccctgactctggaataagccttcaaaatgacaaaacgggagttttaaatacgtagaagttgaaaagggcaaagagaataggaggttgaaagacagtgaaagaaaggcatcaacaaaatttggaaaatgatcagttgaattagatggagaagtggtaaatgtttgaaaagcgggatgacaaagagaaaacccatctccaaaccccctgaaaacttcaggtattggaagaaaagggtgcattggttaggaataattccaataataatgggtgggaaacaatcttaaaacctcgggggcatacaataatcccttgttattcaaacttcagaagactagttggttcactcatgcatttgtgg

SEQ ID NO: 885104 - DNA, 591 bp, Homo sapiens
gaattacagaatattactctttgtgtctgtcttattttgctgaacatgtttttgagattcatccatgttgcaagtaattcattccttacattcattactgagtagtattccgtcagttggatatatcacaatttatctactcacctcttgatagatacttgggttgtctgtagatttttggctattacaaagacagaagttgaagttaacattgtttctcagcttggcttgttgaaaataatgtcttttacacattgaattacttgtgttaatgatctattgctctgtaaccaattgacccaaattttattggcttaaaacaacaataatcattttttttctgtcaacagtttctgtggatcagggatttgagagtgrcttggttggagggttctagctcatgatatctcacgaggctgcagatatttgttttaaggctaaaatcaagataagcttcaaaggtggttcactaacataattggcaagttggtgctggttcttggtaggagtcctcagctcctcttcaggtgtgcctctctgaagggctggtgttcacctgacatggtgactggcttctctcagagcaaatga

SEQ ID NO: 885105 - DNA, 591 bp, Homo sapiens
gaattacagaatattactctttgtgtctgtcttattttgctgaacatgtttttgagattcatccatgttgcaagtaattcattccttacattcattactgagtagtattccgtcagttggatatatcacaatttatctactcacctcttgatagatacttgggttgtctgtagatttttggctattacaaagacagaagttgaagttaacattgtttctcagcttggcttgttgaaaataatgtcttttacacattgaattacttgtgttaatgatctattgctctgtaaccaattgacccaaattttattggcttaaaacaacaataatcattttttttctgtcaacagtttctgtggatcagggatttgagagtgacttggttgragggttctagctcatgatatctcacgaggctgcagatatttgttttaaggctaaaatcaagataagcttcaaaggtggttcactaacataattggcaagttggtgctggttcttggtaggagtcctcagctcctcttcaggtgtgcctctctgaagggctggtgttcacctgacatggtgactggcttctctcagagcaaatga

SEQ ID NO: 885106 - DNA, 646 bp, Homo sapiens
atatggactgtaatcataccctagaagcttctcattaagtattagctctccactccctaaatttaccactcataattttatagatgtggagattgcaactaagggagaggtaaagagtctcgcccaaggttgcagccctgtgaatgcagagttgccagctctacaaatgcacccactatcctttcccagtgtattatttgaagctaagtgaatgagataaggtaggagaactgccccccttagaagttatattgaatagggagcattcattaccatatagtgtacattgttcaatttygatgtaaaacacagaaggcaaactggatcaaggagttagaggggaatagttagcaacatctctctactccaaaaggggtgctgaggctgaagacagtcctttttcactcatatatgtactcaatatagatctacaatctcctgttcacaattccaaaatccgaggtctgaaacctgacctttctctctctctctctctctctctctctctctctggtaaatttggtcccccaactcactgacagcaaaatctgtccttatctaatatatgaggcattttatatgctttattaatgcaacatgaagtgagtatttatgtgatccactacagatatattaatatgttaaa

SEQ ID NO: 885107 - DNA, 625 bp, Homo sapiens
ggaaaaaagaaaagaagaagaggaagagaaaaaaggaagaagaaaaaagaataaattgttatttcatgaacacatataactgctaagaattgtggaacccctctttattttttatcatacatggatatgagcacctatgcactatggagaagcagcttccaaatgagttcacatatatcaaccaaatgagtgtgcaaatgtttaaatgaatttatgtaatttgttggagacaataaatattgaaatcaggatactgcataattcatacatatattaacctcttttctcaactttggaacaatctccttatatttaatagttgtaattaaatatctgtctgatttgggctttgctgactgaccagatcactttttctggtagtttmggtttccagcagtttgctgacaatattaaaatttaaggtagtttcattggtattttagtaaaaaccaaaaatgtattccttccctatctatgcagggtgaccatacatctcgattttccaaggatagtcctagtttatgcctgttttcctgatgtatgcattatagcatcttctttcactcctaaaagtgtccttgtttggaaaataaattatgtttgcactacttgtcagttttacagg

SEQ ID NO: 885108 - DNA, 630 bp, Homo sapiens
gctagatttgtgagtgatttgaggatatagatgttgtcatacatgcacacatgtgtgtatatatttaactcaaaacatctagtgcccaccacatagtagatgttcaataatgattatttaatgaatgataaggcagataaaagaatgaggaagcaagagaatgattcagcctcagggttaaggtggctagctagaaaaaygaaaagggagattggacatgtgcaaacagtaaattgtagtgtatataggagaagctggatgattttggtgagacttggccattgtgtttctataggagccttctttttatgcagaccttggtgagctctatcacttttattgtaggatattgagagatatgccccaggctggatgtatgcatacatccccatgagggaaagaaattcacaagcctcttaatcactcagcatttccacacagttacagttaaggggtaaactcatagcataagataacgctgagatattgggaaattttaaaacaaaactatgcatgatcagattcacatttcctgctgcatgaatttcactgtgtcttaattctttcttattttataatctatatgaggtttatactttctatttaatgaaatataaaattcactgggat

SEQ ID NO: 885109 - DNA, 647 bp, Homo sapiens
ttgggaagtcataagtttttcatggattttcaactctgaaatgtgtccgtgcccttaacctctgcattgttcgagggtcaactgtacatattttgaagggaggagtacagacgttacttgaagctcttttattaaaatattcaacaaatatttaatcaatccttgatctctgcctgtcactgattctgtggatatagcaaatytaatgatatctctgcctttaagtagcttacagcatagtggggaacagatgggatgacttagggaatgtgcgtagtgaagtaagagaagatagttgatacctgaatcattgggagactaccaccaacaatagatgaaaaaaaatgaagtgtatttcaccaagaagcaaggaagatgagagttaccgaaagaataacaaaggcaatattgtcaaatgctgcagagttcaaataaaacctgaaaaaaaaaaaacagacttcacaattggttaacaatctctgagacatcggttccagtggcaacaggtgaggcagatttctatgattcaacatggttacggtagtaatcttcagcaccctaatattgtttgtggagctctaaacaccatattatatcttttaaacaataaatatttgttgcattattaaataaaggaattttgaaga

SEQ ID NO: 885110 - DNA, 709 bp, Homo sapiens
aaatagacacaaacagaaattataagggggatattaccactgaccccacagtaatacaaacaaccatcaaatactataaacacctctatggacataaactagaaaatctaggagaaagggataagttcatgcacacatacacsctcccaagactgaaagaggtaaaaatggaattcctgaatagaccaataacaagttggaaatggaggcagtaataaattgcctaccaaccaaaaaaaaaaaaaaaaaacccaggaccagagggattcacagatgaattctaccagaggcacaaagaagagcttgtactatttctaaggaaagtatttcataaatttgaaaaagagggaatcctaactcattttatgaggccagcatcatcctgaaaccaaaacctggcaaagatgcaacaaaaacaaaaactttaggccaatatccctgttgaacatggatgcaagaatctttaataaaatactggcaaaccaaaaccagcagcacatcaaaaagcttattcgccataatcaagtttgcttcattccccagatgcaaggtcagttcaacatatgcaaataaataaatgtaattcatcacataaacagaattaaagacaaaaaccacatgattatatcaatacatgcagaaaaggcctttgataaaattgaacatgcgttcacattaaaaactctcaataaactaggtaatgaaggaa

SEQ ID NO: 885111 - DNA, 638 bp, Homo sapiens
tctagggacttgcctatttcttctatatttccaatttattgacatgtaggtgctcatagtagcctgcttttttttcttattctggctgaaagtttgtcaattttgtttaacctttaaaaaaccttttagtttcatttatctttcaagttattttctccaaatcaattttttcttctgatctcatctttattatgtattttcttttagtaatttggggtttggcttgattttgcttttcttgttccttaagaagcattgctagattctttatttcaatattttattcttttttgatgtaggtgtttataattataaatgcccccttagtcctgctatcgtcatatctcacaagtttttgtctgttttgtttaattatcatttttttcataaaattattccattttcttctgaatatcttcattgatgccctggtcattccagaacatattgtttaatttctamatgtttctacagtttccaaaattcctctacttattcatttctagtttcattccattgtagtctgagaagatgcttgatattatttcaattatttgaatgttttaagacttgcgttgtgacttaacatatggtctatccttgaaaatgatccatgtgctgaggaaaagaatgtgtat

SEQ ID NO: 885112 - DNA, 632 bp, Homo sapiens
ttatttcacttaacataatgacttccagtactatccatgcagttgcaaatgacaggatcttattctttttatggctgaatagtactccattgtgtataattaccacattttctttgtccatccattgatggacacttaggtagcttccaaatcttgagtattgtraacagtgctgtaacaagcatgggagtgcagatatcttttcggtatactgatttcctttctttggggaatatacacagcagtgagattgctgaaacatatggaatctccatttttagttttttgaggaaacttcaaactgttcttcgtagttgtcatactaacttaaattctcatcaacagagtacaagtgttccattttctccatatcctcagaagtgcttgtcattgcctgtcttttggataaaagtcatttgaactgggtgagataacacattgtagttttgatttgcatttatctgataatgatgttgagcacctttttatacactcaagtgccatttgtatgtcttcatttgaggaatgtctattaagatcttttgctcattgctaaatcagattattacattttttcctacaaaatagtttgagctcctattatattcaggttattattgccttgtcagatg

SEQ ID NO: 885113 - DNA, 664 bp, Homo sapiens
catgctatataaaggtgacaaggatgaagacttttaggatgatgcatttccacttaatgaattgtaaatttattttatcttccttgtgattttcttaaaaacacatgtgctctagcttaatttattgtaagaatacagtatataatatatataacttgcaaaatatgtaatattgactctgtatattgttactaaggcttctagtcatcagtaggctattagttattaagtttttggcaagttaaatcttatagacaatttttttacttgatggggcattggcacccctaactggtgttttgttccagggtcaactgtattttataaaatattaatttkcactggaacaaaaatttagtataattcgaggttcaactgtgatagaattaattttcaagggactcagaaggataatctagcattttgtattgtgaaaaaatgaatgtcagttccattttgcataactttatctctctttatattaagatatctactaagtagtataaatatattacctgaaaaagaagtcacatcattagggtatcctcacttcatgtgaattggctattatgacacgaatggtagaaactgctaaatcttagtgataaggagaccaataaatgctatcttgaagtacatgtctataccaggtgccaaaatccaa

SEQ ID NO: 885114 - DNA, 610 bp, Homo sapiens
ggctgaggtgaggaacttactgggaactggaataaaaatgactcttggtttgctttagcaaagacacttggtggcattttgcccctgccctagagatctgtggaactttgaacttgagagagatgatttagggtatccagcagaagaaatttcaaagcagcaaagcattcagtaggaagcagagcataaaagtttgagctgggcatggtggctcatgcctgtaatcccagcactttgggaggccaaggtgggtggatcacgaggtcaggcattcgagaccagcctggccaacatagtgaaaccccatctctactaaaaatacaaaaattagccaggygtggtggcaggtgcctgtaatcccagctactcaggaggctgaggtaggagaattggttgaacccaggaggaagaggttgcagtgagctgagatcacaccactgcactccggcccgggcgacagtatgagactctgtctcaaaaaaaaaaaaaaaaaaaaaaaaagttgggaaaatttgcagcctgaaaatgtgatagaaaagaaaaacctattttctggggagaaattcaagccagctggataaatttgcataagtaatgaggaggtgaatgt

SEQ ID NO: 885115 - DNA, 583 bp, Homo sapiens
caatcttggtagcttgtatgtacctaaaaatttgtccatttcatatagattttccaatttattgatatatagttactcacagtagccactaattttcctttgaatttctgcagtatcagttgtaatgtctcctttttcatttttgattttatttacttggatcttttctctttttttcttacttagttctggctaaatttttctcaatttttttttaactttacaaaaaccaacttttttatttttatcttttttattgttttattttattccaatgtcatttatttctgctctgataattatttctttttttctactaattttaggtgtgatttgctcttgcatttctagttcttttcttttatgagatcgagtttttctcttgttgcccaggctggaatgcaatgacgcaatctcagcttactgcaacctctgcctcccargttcaagtaattttcctgcctcagactcccaagtagctgggattacaggcatgcgccaccatgctgagctaatttttgtacttttagtagagatggggtttcactatgttggtcagaaaatttttcaactttcttcttaa

SEQ ID NO: 885116 - DNA, 697 bp, Homo sapiens
acattttttagcaaatatgtggaaccatcagttttttccctgttaagtaagtaagttgtgggggaggcatgcagaagatggaaggttccagtgtctgggtttagtatcatggcaggtcaaaatgcaccttagacattttcccccaagaaaagtttacagtagaagaggggctccaccgtctagtgacagccctagaaaaaaaattaaccctaccaagtaaatttgttcttataaaatgaagaatactttttttgtcccatagcataaacccattacaaaaatgaagagtctaaattaactggaaaagactttgacaatatcaaatgaaccctctgaaaatcttgtaagtcaaacattaaaaacctaatggaatgtaaagcctggtaagaagctgtttcttcaacagcccacgaaataatatgaaatcctaccctcctctttctttctttactaacactgtgctatctaccttgtaagaaggaaagcatcagtgaaagaaggcaaattgctggatttaagtccccaaacaaagatgttaaggctaacaaagaaatttyggagaagtcacaggtaaaagaaaacagccatagaaacaaagaataagacaaaagtccacagggacatcagcacctggcctacctgaggagttaattccccaattcagtctgtcctccctcagcagataaactaatatctt

SEQ ID NO: 885117 - DNA, 585 bp, Homo sapiens
ttttacttcttttggatttggtttcctcttgcttttctagatcttatttttatcaagttgagaaagttcctagtttgctgaaaggttttttaatgaatagatatcagattttatcaaatgccttttctgcatgaattcatatgatcatattatttttcttcttctgcctgttgataktttagaacttacttcttgattttcaaattttgagacagcattgcatacttggaataaatcccacttaaccatggtatatgcaatgctttttatgtatttttgattccattttgctaatattttgtttggaaattttccatgtatgtttgcaagaagtattgttctataattttcctttcttataatgtgctcatctggttttggtattatagtaatgctggctttgtagaatgacttaaaaagtaattcctctgcttctaccttctggaacagattgcatagaactgttataatttcttttttacatatttggtggaattcaccattgaaatatctgggcctggttctttaattttttgaaaagctattaattattcattcaattttttaaaacagatataggactat

SEQ ID NO: 885118 - DNA, 596 bp, Homo sapiens
gaatattattgaactttgttgataaggcagtggctgggattgagaggattgactccaattgtgtaagaggttcttctgtgggtaaaattctatccaatagcgtcatgtgctacagagaaatgtctcatgaaagaaagagttaatagaggtggaaaacttcatagtattcttattttaagaaawtgaaacttccactccttcagcaaccaccaccctcatcaatcagtagccactaacatcgaagaaagaccttctaccaacaaaaagatcattacttgccaaaggcttagatgattgctagcatgtttaggcaataaaatatttttattaaggtatatatattatttttagatataatgctattgcacacttaacaactacaatatagtgtaaacataacttttatatgcattgagaaaccaagtgaattgtgtgactcactttattctgatatttgctttattgcagtgctttggaactgggcctgcaatatctccaagttatgcctgtggtctgatgctgtcttggtaggtgcatatatgtgaaggattgttatgctttctcagactcatctactttttcttatcattatgtat

SEQ ID NO: 885119 - DNA, 435 bp, Homo sapiens
ttctttgtctagtttcactttggctgcagtgttggcactgggtggagacattggcgggggcagttctggtggcctttgtgcctgcctttgttcttgttcacacacgccagcagcagtggcagcatcattgtggcagagtgcacactcattggctgcagcagggtgctagcagatgctggagttcctgtctctgcacaggtgytcacaggagcaatggaggcagcacaaattcaacatggccaaactccatgttttgaaaaaacaattcataataagactactcagttttttaataagttactaatatggtttggatgtacccctgcccaaccacaccttaaattgcaataattctgacatggcaacagtggggccaggtggagataattgaatcatgggggcagtttcccccatactgtactcatggtagtaatt

SEQ ID NO: 885120 - DNA, 590 bp, Homo sapiens
tgtagtaattcgttttcatgctgctgataaagacatacctgagactggacaatttacatttaaaaaaagtttaatggacttacagttccacggggctggggagacctcatgattatggcagaaggcaaggagaggcaagtcacgtcttakatggatggcaggaggcaaagagagacagagcttgcgcaggggaactactctttataaaatcatcagatctcatgaggcttattcactatcaccagaacagcatgggaaaatcttgcccccatgaatcaattacctcacaccagctccctcccacaacatgcgggaattcaagatgagatttgggtggggacacaaccaaatgatatcattagtcaacatggtaaagtaaggaaaaatagtataagaattccaatttttttaaaaaagttaatcacttgtaaatgacatttttgtctacatagaaaacccaaaatactctacaactatatttgtacatttaacaagtacatatagcaagtttggtagattagattagcaatttacaaaatcaattgtatttttcatatctggcacaaactgttaacaaatcagtttttaaa

SEQ ID NO: 885121 - DNA, 575 bp, Homo sapiens
aaaggaactcttgtacactattggtgggaatgtaaattagtacaacctctaaggtaaacagtttggaggttcctcaaaaaactaataatagagctaccatacaatccagcaatctcactgctgtgtgcatacactaaagaaaggacatcaatatatcaaagagatatctgcacttccatagttgttgcagcactgttcacaatagccaagatttgaaagcaacctaagtgtctatcaacaccttctgtccttttttttttttttttttttttgacagagtttcactctgtcacccaggttgaagtgcagtggcacaatctcagctcactgcagcctctgtctctcaggttcaagctattatcctactcagcctcctgagtagcaggggttacaggtgccgccaccactcctarctaatttttgtatttttagtagagacggggtttcaccatgttggccagggtgctcttgaacttctgacatcaggtgatccacccaccttggcctcccaaagtgctgagattactggcatgagccgctctggccacttaatcttagtgaaaacatatttcccc

SEQ ID NO: 885122 - DNA, 663 bp, Homo sapiens
aacatgggtactggtatgatagtggaattgatctgctgctctagcttactagagggcttccaccagttgagtttgaaaatatattcatatgtcaagtgtagaagatattctgataccttaattagggtttcacatacactttttttttttccagaaaagctacttgctgaaaagggtaagggtactagagcactaacacctactagtatgaaagctaaggggcatgaccgtttgaaaaacagatgtttggtcaatgaaaaataatatatttcaccttagacagctctgctcaagtaatttttctaagagtatgggggattttagtctttcagaatttcccctaaaatatttgcttataaaatatcgtgtttttatgaacagtttgtaaatattttactcattaattgtaacaggcaaactattttgttctatatatttgctccataattatacayttataatcctggaaggtagaaattatgatagtggattcatgcccctacatccctgcctattctgggagtgacttgaacaggtgacaattatgtaactatcaataaaagaaaaaacttggatgttataaagacaatggcagccctcagatgaagaaaacacagccattcccagattttaatgcatgttttaaatcatttccatgggaac

SEQ ID NO: 885123 - DNA, 667 bp, Homo sapiens
attgctaaaggaaacacccaagactgggtaatttataaaggaaacagttttaatttactcacagttcaacatggctggagaggcctcaggaaccttgcaatcatggcggaaggtaaagaggaagcaagacaccttcacaagacagccrgaaggagaatgaacgcaggaggaactaccaaacacataaaaccatcagatctcatgagaactcactatcatgagaacagcatgggagaaactgcccccatgattcagttacctccacctggtctctcccttgacacgtgaggattatgaggattatggggattaaaattccatatgagatttttgggtggggacacagcaaaactgtatcaattagataatggagatggttgcacaactctataaatatagtaaaaaccattgatttatacacttcaaaagggtaaattttattgtatataaattatatttcaaagattatataaaatatgcagtgctagctgcctttgttataagttcaagctgtttctcagtacttcattacgcaataattagataatatgctggtgataatcactctgtcttgcaattttaacaatgaaaccatatgaaaggtctgtatagcttcatgctctgttgaaatctgcaatgtgattattccatttcctcaagtttcccc

SEQ ID NO: 885124 - DNA, 667 bp, Homo sapiens
attgctaaaggaaacacccaagactgggtaatttataaaggaaacagttttaatttactcacagttcaacatggctggagaggcctcaggaaccttgcaatcatggcggaaggtaaagaggaagcaagacaccttcacaagacagccagaaggagaatgaacgcaggaggaactaccaaacacataaaaycatcagatctcatgagaactcactatcatgagaacagcatgggagaaactgcccccatgattcagttacctccacctggtctctcccttgacacgtgaggattatgaggattatggggattaaaattccatatgagatttttgggtggggacacagcaaaactgtatcaattagataatggagatggttgcacaactctataaatatagtaaaaaccattgatttatacacttcaaaagggtaaattttattgtatataaattatatttcaaagattatataaaatatgcagtgctagctgcctttgttataagttcaagctgtttctcagtacttcattacgcaataattagataatatgctggtgataatcactctgtcttgcaattttaacaatgaaaccatatgaaaggtctgtatagcttcatgctctgttgaaatctgcaatgtgattattccatttcctcaagtttcccc

SEQ ID NO: 885125 - DNA, 667 bp, Homo sapiens
attgctaaaggaaacacccaagactgggtaatttataaaggaaacagttttaatttactcacagttcaacatggctggagaggcctcaggaaccttgcaatcatggcggaaggtaaagaggaagcaagacaccttcacaagacagccagaaggagaatgaacgcaggaggaactaccaaacacataaaaccatcagatctcatgagaactcactatcatgagaacagcatgggagaaactgcccccatgattcagttacctccacctggtctctcccttgacacgtgaggattatgaggattatggggattaaaattccatatgagatttttgggtggggacacagcaaaactgtatcaattagataatggagatggttgcacaactctataaatatagtaaaaaccattgatttatacacttcaaaagggtaaattttattgtatataaattatatttcaaagattatataaaatatgcagtgctagctgcctttgttataagttcaagctgtttctcagtacttcattaygcaataattagataatatgctggtgataatcactctgtcttgcaattttaacaatgaaaccatatgaaaggtctgtatagcttcatgctctgttgaaatctgcaatgtgattattccatttcctcaagtttcccc

SEQ ID NO: 885126 - DNA, 653 bp, Homo sapiens
gctgtgtgactttgggcttaacctctctgaatttcagtttcctgatttacaaaaggcagtatagtagcgttgtaaagtttaaattacctaattcatgtaaagactttagcacagtgcttggcacagagtaactgttcaatacgtattcactattattattaaagataagtggtacagcttgttcatctttctgtcttcagcagttcctcgagcttcatctcttcctgcacccctcttctccttccagggcttagcccagaaccttgcacagactaagtaattgctaaattcttctggagcaaatgctgaaaacatcagacagtttttatataaaacatttaattcagtctgagtaggaacagttcatgtttgtatgagacaccaacaaacgaatgcttatgggatgtccctgcaagatatatcaatggaacatcctgtctgagcaccaaagagcagcccctttcagtattgtctgaacaagctggccttackaggagtggtgaaagagaagggggaggtttcatatcctaaggaagtgtttggaacttaatgagaagtgtaggctgagaaaatgaccctgctctttgaaaatcaaatgcagctactgaatgtgaggcttacacacagccaaggccatgtatgagcaacagggg

SEQ ID NO: 885127 - DNA, 615 bp, Homo sapiens
gattcttggataaactatttcctcatcattttagtaggttagacataaagcttgagatatgtactattactcttaaagagtttggcaaattttatgcattttcatgggtttataatcttggcactttgttgttacaataccttatgtttaattacagaaggctgaaaaaagaaaaaatagggaaaacactagcgaatgttaaaaatgtttattattaaacatcattcactaattcaaaaagtgtatgctgaaaataggattgtttgagatttttcatatccttgaggctattattggtctattggaaacgacttttgtagatcatgctactcttcactttgtgaatggaattttggctatggcagatagtacacagcatcgttcccagtatgtctagcaggcagcagactgaagtatcttttaccagcactatttctttccctccctgcatcacagatatttttagaasctgatactggatttaagtgaatttgtcatcgctctgcatacattgtaaaacacagcctattgaaagctccttttcagctctcccttgctactagtaaaggaggaaaattgcaagcagggtctccttaaacctgcttagaagtgggg

SEQ ID NO: 885128 - DNA, 622 bp, Homo sapiens
cagtggaggatatagaaaatagctggatgtttacagccggcaggtctcccatggggccactgccatgaggagcaagttgacgctactgcaagggccgcaggtggacaatctaactctggggctggatggaggatgtggttgagattcagagggcctgaaaggcagacaagggaagaggtgagtctaagtcagcagaatggtggataactctgggcctagatgagctgagagaatagaccttgtatttcacaagtcctggacttcatcgtcgaatgcccgaatagttcccaatgattgagggggacattgctgaggaaattactgcagaggccaataaggacccacacaaagatgtccawgtcaactcattgcctcttctctgtcttagagaggaaggaggtaggtgtggcgagttgaaattctaaaacactgagaagtatccaaaggaactcagttaacccagaaaagactttttaatggaaagagactggttttccattatgatttagcatagtaataagacacgttgacttagttctcaattgagcacaatggaccaaggcctgtacttaactgctcactcacagtgccctgaagagtctaggggactatactgggctct

SEQ ID NO: 885129 - DNA, 587 bp, Homo sapiens
atacagacaattataaataagaagattaaaaacaataccactaaaatataaacactggtaatgttttggcatatagtcacttagtcttttatctgggcaagagaatagaggtatggctgcttgtgttatgcttctttttgttactacattgmgatacaccagtctaatgtgcattttacccttcttctttactaaaggaattcaattctctgcagtatagcaatagttccagcaaaaaccaatgtttccagttagttaaagattctggatgaatgagatggaagggaaagtttattggagatttcaggcaacatcttgctttccttattatttcctgggagcatgcatgtgaggctggatgtggaacagccaccttgtaaccatgagatgacaagcatgaggacaaaatcacgggctaagagtggtagaatggaaagatagaaggagcctgggacatggatgatgacgggaaaacattggagaagctcaggatgttctaccttcatatttttggtaatatgaggaaaataaaatcctatttgaaaaacctattatagtcaaagttctagtatatgaaaataaacatg

SEQ ID NO: 885130 - DNA, 619 bp, Homo sapiens
gtcatccattaaaaaagaagtcataccaatgtactgtttaaaaatgatttgctggagtactgaggctaagtaatggtgtgatgcagaaacagtggtccctaaaaacttggtttgtgatggcaagttcacctaagtcatgggatatagaatccaagtatggactttaagacaagcaacactgtaactaataatatttgagaaatcagaaatgatggttcctagttgttatatcttagcaggtaaaaaaagtgtttcaatgtgttgaattactawtaggcagatatctaatttttaatagataggcagaaaatttcactaacagatattttaactcttgatttttctatgtatctaaaaatagatattttcctaaaagtaatttaatgctttgaaacattaaaattacacacacacacacacacacacaaacacacacacacactttgttactctgtaggagatggaaaatccaagagctaaaatttgggagatggcagggctacatcacattaagtggtagaagcaaaaggccctttgggaataaatgtatctaactccagaaatactgttactcttgaaacagatcagatcctgttcatttcaggtaaatgatctttga

SEQ ID NO: 885131 - DNA, 616 bp, Homo sapiens
ctccccttgccccctacccctcgacaggccccagtgtgtgatgctccccgctgtgtccatgtgttctcattgttcaactcctacaactccttaagctgataagcaacttcagcaaagtctcaggatacaaaatcaatgtgcaaaaattacaagcattcctatacaccaataatagacaagcagagagtcaaatcatgagtgaactcccattcacaattgctacaacgagaataaaatacctaggaatacaacttacaagggatgtgaaggacctcttcaaggagaactacaaaccactgctcaacaaaataaragaggacacaaacaaatggaaaaacattccatgctcatggataggaagaatcaataccatgaaaatggccatactgcccaaagtaatttatagattcaatgctattcccatcaagctactattgactttcttcacagaactagaaaaaactactttaaatttcatatggaaccaaaaaagagcctgtatagccaagacaatcctaagtaacaagaacaaagctggaggcatcatatttttcatgaaagctggaaatcaaaattcatttgtgaaatctatttttatacattgagaaacaaccaa

SEQ ID NO: 885132 - DNA, 616 bp, Homo sapiens
ctccccttgccccctacccctcgacaggccccagtgtgtgatgctccccgctgtgtccatgtgttctcattgttcaactcctacaactccttaagctgataagcaacttcagcaaagtctcaggatacaaaatcaatgtgcaaaaattacaagcattcctatacaccaataatagacaagcagagagtcaaatcatgagtgaactcccattcacaattgctacaacgagaataaaatacctaggaatacaacttacaagggatgtgaaggacctcttcaaggagaactacaaaccactgctcaacaaaataaaagaggacacaaacaaatggaaaaacattccatgctcatggataggaagaatcaataccatgaaaatggccatactgcccaaagtaatttatagattcaatgctattcccatcaagctactaytgactttcttcacagaactagaaaaaactactttaaatttcatatggaaccaaaaaagagcctgtatagccaagacaatcctaagtaacaagaacaaagctggaggcatcatatttttcatgaaagctggaaatcaaaattcatttgtgaaatctatttttatacattgagaaacaaccaa

SEQ ID NO: 885133 - DNA, 627 bp, Homo sapiens
attagttcattgtggtttccatccttaaataatatctatctttagggtataattgaggagttaataataacaagcaaacattcataaaatcctcactatatatcagacactatggtatgtactaaatacctcatcccatttaatcctcacaaattgcagaactaacattaatcttgcttcagctgagaaaattgaagattagaggtaagggatgtgcctaaattcaccaaattaataaagttgggtaaagcatctatcacagcaatgacaaactcagtagtagcaatcattatgattacttctagctgagcaaagttctggtcatggagatatttagtgacckttctcaaagttgcccatgtgttgagtattaggcaacaataccatagacattccccttcaaactagttctttttcatcaagccagattgccttgagttttaaagtgtcttgtctctgagttcagttatttcagtgagcttcatcaaatgcaataaggcttttctttttgtctccctccatctttacctaatcaatgtgtcagcagtgcatgaagcaatttcctcaagaaagtgggtggaagaaattctgtagtcatatgcttcttcagaaatcttttcttttaaa

SEQ ID NO: 885134 - DNA, 658 bp, Homo sapiens
tagatccatatccagcactgagattgctggatcatattgtagttctagttttaattttttgagggacttttatactggtttccataatgactgtcttaatttacatttccaccaacagtatgacagggttccctttcaatacattctcaccaatacctattatctttgtctttttgataataggtgttctaacaggtatgagatgacatctcattgtggttttaatttacatttccctgatgattagtgatattgagcattttaaaatacacctgttggccatttatatgtcttttttatttttattttatgaaatgaatggttcttttttgartaaaagttagcaaaaattacagtggtcaagagcatggtctctgaagtcagaatgactagtggtgttcatagttacacctatacaattttttcctgttcatgtatgtttttattgatacataaaaattgtacatatttatggggaacatgatattttgatgcatgcataccaagtataatgatcaaatcagggtaattagtgtatccatcagttcaaacatttatcatttctttgtgttgtgaatatttcaaatctcttttacctattttgaaatatacaataagttgtaaaatatagtcactctatttttgagaaatgtctatt

SEQ ID NO: 885135 - DNA, 674 bp, Homo sapiens
cattttgttggttgttttcctttgctatgcagaatgttctcagtttggtgtattcccatctgtctggctttttttttttttttttttttttttttttttcagttttttcacctgtgctttggggatcctatccaaagagtccttgtccagaccaatgtcatggagctttcctcatatgttttattctactaattttgtagtttctgattctacacttatgtcttttttttcattttaagttagtttgtgtacatatatgarataagggcctaatttcattcttctgtatatgtatatctagttcttccaataccatttatttatgaggctctcctttttccattgtgtgtttttggcagtggtactgccatcttttgattgcctttaaaaaattcaggttgagatcttcctggttcttggtataatgaatgatttcttttgttgaaatttggacattttcatattataagatgatggatcttatttaaaacttcttagctttctctgataccaatgcagaaggagaaagttggggctattttattacagctggtcaaggtagaattctcatttcctattgcccttaattaacacacaagagaaagggagtactcttctttctaagtgggagtaggtggtcttgttaaccctgggtgctgctgcaagtctctact

SEQ ID NO: 885136 - DNA, 674 bp, Homo sapiens
cattttgttggttgttttcctttgctatgcagaatgttctcagtttggtgtattcccatctgtctggctttttttttttttttttttttttttttttttcagttttttcacctgtgctttggggatcctatccaaagagtccttgtccagaccaatgtcatggagctttcctcatatgttttattctactaattttgtagtttctgattctacacttatgtcttttttttcattttaagttagtttgtgtacatatatgagataagggcctaatttcattcttctgtatatgtatatctagttcttccaataccatttatttatgaggctctcctttytccattgtgtgtttttggcagtggtactgccatcttttgattgcctttaaaaaattcaggttgagatcttcctggttcttggtataatgaatgatttcttttgttgaaatttggacattttcatattataagatgatggatcttatttaaaacttcttagctttctctgataccaatgcagaaggagaaagttggggctattttattacagctggtcaaggtagaattctcatttcctattgcccttaattaacacacaagagaaagggagtactcttctttctaagtgggagtaggtggtcttgttaaccctgggtgctgctgcaagtctctact

SEQ ID NO: 885137 - DNA, 593 bp, Homo sapiens
ccaccatattgtcccttaagtctcaaggtccctagcaagtctatgttttctttaccttttgcaatcttatgtttgttttacacatactctccaaacgttttagttgcagttagtgggaagtataagaaacaataatctactctatcttctctgaagtggcactcctggtggtagtttccaatacagtatctgctttctccttctcactgggaaaaccccattttggtgggggaggcaatrtgccaagttagaaatactcatgtccctggatttccttgcctttaaagatggccatgaaatcaagctttggcccatgataaaatacccacaatctactgggtaagacatctggaaaaactattattcttctagtaaaaacagaaagatggagggccatgtttcttttctcttcttcacctttccctgcttctttctgtctgaaatgggtaatgatgcttggaggtttaacagccaagagagcaaactgcatgctaagattggtggagcaggaagctaaaaggagactgtgtcctccatcaactccttttacagctgtgttagcgtcaagctttctacctaaggagagtttatta

SEQ ID NO: 885138 - DNA, 593 bp, Homo sapiens
ccaccatattgtcccttaagtctcaaggtccctagcaagtctatgttttctttaccttttgcaatcttatgtttgttttacacatactctccaaacgttttagttgcagttagtgggaagtataagaaacaataatctactctatcttctctgaagtggcactcctggtggtagtttccaatacagtatctgctttctccttctcactgggaaaaccccattttggtgggggaggcaatatgccaagttagaaatactcatgtccctggatttccttgcctttaaagatggccatgaaatcaagctttggcccatgataaaatacccacaatctactgggtaagacatctggaaaaactattattcttctagtaaaaacagaaagatggagggccatgtttcttttcycttcttcacctttccctgcttctttctgtctgaaatgggtaatgatgcttggaggtttaacagccaagagagcaaactgcatgctaagattggtggagcaggaagctaaaaggagactgtgtcctccatcaactccttttacagctgtgttagcgtcaagctttctacctaaggagagtttatta

SEQ ID NO: 885139 - DNA, 651 bp, Homo sapiens
catatggtggtttgtgcctgtagtcccggcttctcaggaggctgaggtggtaagatggcttaagtctagcaatttgaggttgtggttagccatgattgtaccactgcactccagcatgggtgacaaaaggagatcctgtctcaaaaaaaaaaaaaaaaagtccaataaattggctggataaaacctgagtggagtcaattgtcattattcttgattctgtctttgcaaatctgcctattaactcaaatttatttgtaacccccaaatcaatgcttgccatgttttgtgttaatttgcagatgtgcamagggtggcaaaaattttgagtggcacattcaaattttgggtggcacattcctggctgaggttaaacaaggcaagcctctgccttcttgtttcagctctcatattgtaaacaagtgtgccttttgtgaggtatttaatacctttttttttcatttttgtggttttttcttagtgatttcattaattaaaatgatcccaaagtgtagtgctgaagtatagtctactgttgctaggcacaagaaggctgtgatgtaccttatagaggaaatacatatgttagatcagatttgttcaggtataagttatagtgccattggccgtgagtttaatgttgatgaatcaata

SEQ ID NO: 885140 - DNA, 642 bp, Homo sapiens
attagagaaaagagtgtgggagtaaagaggggttttaaattagagattgatgagaaaatcatgacctttaaggataatttgtttattttaaaattttctctgacattaattttatcttgcccaacctattgttgtgcctgacctcctagtagtttgctaatacattttaaagaggggatttgtaattactttataattcccyattagttaaaagtgggaatttacaattccttccatccagatatctcatatggtaactaaatttagtactttggtccctgtttctttatagtaccctaactaattgtatttggcttttgtcaatgaattcataattataaagatccaaaaacgtgtcacctaaaatatgttttgactgcttctctcctgtgctttctttcccatcttcacttttaatcaggccatcatatcctgtttttaatgataagggctaaattcccattgtcttttgagcaacaccaatgactagaaatacagtttgtatatgattcgggatacttgcttatgctgctttctccgtcttttagcattcccattaagggactgatatagataaatgtagacccatatttcacaaagcatattatgcagaatggtaatgactatttcttgaaattgttg

SEQ ID NO: 885141 - DNA, 611 bp, Homo sapiens
accaaaatcagagccaaactaatgcaatggagatgcaaaaagaccataagaaagattaataaatccatgagttggttttttgaaagaataaataagattgatagactgctagctagactgataaaaaaagagagagatccaaataaacacaatcagaaatgacaaaggggacattacsactgaccccttagaaatacaaaaaaaatcctcagagaccattattaacacctctatgtgcacaaactagaaaacctagaagaaatgaatgaatttttggaaatatacaacctcaacatcataccaactggacaaaagctgaaagcattccccttgaaaactggcccaagacaaggatgctctctctcaccactccaattcaacattgtactagaagtcacaaccagagcaatcaggcaaaaaaaaaaaaaaaagaagaagaaagaaggaaagaaagaaagaaagagagagagggaaggaaggaaggaaagaagaaagaaaaaaaaagaaagaaggaagaaagaaagagcatccaaataggaagaaaggaagccaaaatgtctgtttgcagatgatataattctgtatctagaaaactccatagtctctgcccc

SEQ ID NO: 885142 - DNA, 492 bp, Homo sapiens
ggtgagtattatgtggttggccctcctatcagaaacagtatggatagttagtggtcaagagcaaagcatccagacccagattacctgagtatgaactctagttccactcctagtaagatgtgtaatcttgtacaggctacataacttccctgtgccccagtttcctaaaatgaggtccaggaaagaaaaaaatatcttttcttcccattggaggtttatggctgaggctcgtatgaaagtcagattaacaagagaaaagcaygcaaatttatttaatatgttttatgtgacacaggagacttcagaaatgaagactcaaaaaaaaaaaaacaaggaaatctgtgcatttttatgcttagtctgataaagaagtggatagtcctagagaagtatgcctgaacaaagcgggtaggatctaacagtaataaactggggaaaacagcaagttctgtttgttcagattcttctcatgtctcctgtgtcttcagagat

SEQ ID NO: 885143 - DNA, 555 bp, Homo sapiens
ttggatatgacactaaaagcacaggcaacaaaagaaaaatagacaaattcgacttgtgcatcaaagaataatatcaacagaataaaaaggcaaccaataaaatgggagaaaaatttgcaaatcatacacttgataagaaattagtatccagagtgtatagaaaactcctaaaattcaacaatgaaaaagcaaccaactcaaaaataatcaaaagacttgaatagacatttctccaaagaagatatatgaatggttaaaaagtacatgaaaagatgctcaatttcactaattattatggaagcacaaataaccaggaaatamcttctcagaaccattaagatagctactaccaaaaataataaaaaaacaatacaaatgctgacaaagttgtgaagcaattagaacccttgtgcactgttggcaggagaatggagggttattgtttcatacatattatctcagtcaatttgtgctgctataacaaaacaccacagaccaagtaatttatatacaacagaatgtatttctcacaattctgaagactggaaagtacaa

SEQ ID NO: 885144 - DNA, 555 bp, Homo sapiens
ttggatatgacactaaaagcacaggcaacaaaagaaaaatagacaaattcgacttgtgcatcaaagaataatatcaacagaataaaaaggcaaccaataaaatgggagaaaaatttgcaaatcatacacttgataagaaattagtatccagagtgtatagaaaactcctaaaattcaacaatgaaaaagcaaccaactcaaaaataatcaaaagacttgaatagacatttctccaaagaagatatatgaatggttaaaaagtacatgaaaagatgctcaatttcactaattattatggaagcacaaataaccaggaaataacttctcagaaccattaagatagctactaccaaaaataataaaaaaacaatacaaatgctgacaaagttgtgaagcaattagaacccttrtgcactgttggcaggagaatggagggttattgtttcatacatattatctcagtcaatttgtgctgctataacaaaacaccacagaccaagtaatttatatacaacagaatgtatttctcacaattctgaagactggaaagtacaa

SEQ ID NO: 885145 - DNA, 657 bp, Homo sapiens
ctgcagcagcagcaagatcaggcccaggcggctcaggctgggggtggggaagactagacttacattccctccaagatgctgcgtggagcagaagccattgcatcttggctcaggctgtcccctgtgcctggctgggctctgctttccactcccactttccctggctggctctgctccatcctttggattcagtttagctctcacacctttaagacatttttcctaataccgacccgctggccgttcagctgtcctgtctcrgtcagatgcccttgcctgctcccacagcaaacctcgcataggcccttcacagtacttagcaccttgcactcatcacctaggctggaaccaagtacataaaaggtactcagaacacatttgctgagctctgagtataggaatatgaaatgttcctgttgtctgactttccattatccaagtcttcacagctccgaggtacatgcagaagcagcaagtgctccttctgtgtggccctgcttatacgttcttccccggtcctcgccactgctacggtgacagtgcagactggcttcttagacccgttatgcatgtgacacatgaccatccaacacaagggcagagctggcatcaccccacagccttcagccctcaaagacccatccgggaactgacgct

SEQ ID NO: 885146 - DNA, 657 bp, Homo sapiens
ctgcagcagcagcaagatcaggcccaggcggctcaggctgggggtggggaagactagacttacattccctccaagatgctgcgtggagcagaagccattgcatcttggctcaggctgtcccctgtgcctggctgggctctgctttccactcccactttccctggctggctctgctccatcctttggattcagtttagctctcacacctttaagacatttttcctaataccgacccgctggccgttcagctgtcctgtctcagtcagatgcccttgcctgctcccacagcaaacctcgcataggcccttcacagtacttagcaccttgcactcatcacctaggctggaaccaagtacataaaaggtactcagaacacatttgctgagctctgagtataggaatatgaaatgttcctgttgtctgactttccattatccaagtcttcacagctccgaggtacatgcagaagcagcaagtgctccttctgtgtggccctgcttatacgttcttccccggtcctcrccactgctacggtgacagtgcagactggcttcttagacccgttatgcatgtgacacatgaccatccaacacaagggcagagctggcatcaccccacagccttcagccctcaaagacccatccgggaactgacgct

SEQ ID NO: 885147 - DNA, 639 bp, Homo sapiens
aaattttgaagtcaggcagtgtgatgcctccagctttgttctttgtgctcaggattgctttggcgattcagaatcttttgtggttccatatacgttttagggtctattttccatttccgtgaagaatgtcattggtattctgataggaattgcattgaatctgtaaattgccttgggcagtgttgtcatcttaagaatattaattcttccatagtcctggataatttcagataatccatgagcatggactatctttccactttttgatgtcctcttcaatttctctcatcagtgtttyacagctttctttttataggtctttcacttctttggttaaattgattcctaggtattttatattctttgtagctattgtaaacagcattactttcttggtttccttttctgatttttcactattgatgtaaataaatactactgacttttgtatgttgattttgtaacccacaactttactgaattcacttatcagttataacagtttttttttggtggagcctaggtttctctaggtataaaatcatgtcgtctgcaaacaagggtaatttgactgttttcctttccaaactggattccctttctttctcttgcctgattgctctggccaggatttccagt

SEQ ID NO: 885148 - DNA, 634 bp, Homo sapiens
atagttgggtcttatttctttatccattcagccactctgtgccttgtaactggagtattcagtccatttacattcagtgtcattgttgataagtaaggacttactactgccattttgttgcttgttttctggttattttgtagctcctctcttccyttcttccgtcttcctttttagttaaatggttttcactggtaggatgttttaatttgttatttatttttagtgaatctattataggtttttgcattatggttttcatgaggcttacacaaaacatcttacagttattttaaagagatgacaagttattttaaagagatgacaacttatcttaaatcacaaggaaaataatagaaacaaacaaaaaatgaaaaggtctacattttaggtctaccccctccccatctggcttttagttgtctcaacttacatatttttatactgcttgtctcttcacagtttgctgtagctattgttgtttttgatagatttgtcttttgagcttcatactagggttatgagtggatttcacacaacagttactgtattagagttctgggtttgtccatgtacttaatcttaccagtgggttttctatcttcagttcttttcctattagtgtttttttttt

SEQ ID NO: 885149 - DNA, 610 bp, Homo sapiens
cctctcttcccttcttccgtcttcctttttagttaaatggttttcactggtaggatgttttaatttgttatttatttttagtgaatctattataggtttttgcattatggttttcatgaggcttacacaaaacatcttacagttattttaaagagatgacaagttattttaaagagatgacaacttatcttaaatcacaaggaaaataatagaaacaaacaaaaaatgaaaaggtctacattttaggtctaccccctccccatctggcttttagttgtctcaacttacatatttttatactgcttgtctcttcacagtttgctgtagctattgttgtttttgatagatttgtcttttgagcttcatactagggttatgagtggatttcacacaacagttactgtattagagttctgggtttgtccatgtacttaatcttaccagtgggttttctmtcttcagttcttttcctattagtgtttttttttttcattcaaattgaaaaactctctttagcatttcttgtaagtctggcctggtgctagtgaattctctcagcttttgtttgggaaagtctttatctctccttcgtacctgaaggataactttg

SEQ ID NO: 885150 - DNA, 607 bp, Homo sapiens
ttaaaatcttagacatatttatagatagaaattattacaatgaggagcttgagagaagcgactctggaaaagaaaaattgaatttatattctgtcactgattagttgtgtagatatagtcaagttccaatcatttttccctccatttttaaataacaatatctctatcagtggtttgtataataaatgtactaacacgcgttagcacttagaaaycaaaagagaataagctttcaaaactgtttaatttcttccattgcaaaatgaaacttctcaggctgattcaaagtgatgactcttggggttagctttctatttgctatttagaaagagaaggttaaatatattgttttaaaaactataaaatgttgcttaccttaaaccttagcctaggtttatattctgtttatctgtagcttcctcggttataaaggaagaaacagatgtgttaagatcactaaagtagttagagaaaaactaaataaattaatatcttacccaacaaacagtaatagatgtgattctaaacaaggtgtggatgactcacttagcgtatgaatctaaaaatgcacaccaataaagttcaatacaaaattagttattttgat

SEQ ID NO: 885151 - DNA, 625 bp, Homo sapiens
cttggtctaatgccttcagcctatattgagtatcaatgtaaggtagaaccctgtgcaactccctgttgcatctattatcttaaaagccatagtacaatacatcaaattgtatatacctatcaggatttcaagagaatggttgccttagaactgttgtattattcctcagtaattgaattactttcatgaattctgtaaattgtgcaattatgtagtttttcaatttaaagtggcttagaggatgcttttgtaaaaattttggataattttaagcaagtatataaacaatatacagacaaatttgtgaagcacttttgccatcattctatcctactgaatccatagaytatattaagaattcaacagcatctattgtgctgaggaactacacatctcaatatccttctcaagagtttcagtcaggtatacaaattaattacatagctggtgtggtatagaattaataccacagtttgacatacttggtgtggatcattatcatatgcatattgatattcctcatttatggactattttatgtttccacgattctttcttctgcactcacttctaacttttaccatttcattgtaaagtaagggtagtttcatttctattctttttt

SEQ ID NO: 885152 - DNA, 587 bp, Homo sapiens
ttccactatgattgtgaggccttcccagccacatggaactgtgagtccattaaacctatttttcttcccagtctcaggtatgtctttatcagcagcatgaaagtggactaatacagtaaattggcaccagaaatgtggtgctgctgaaaatgtggaagcaactttggaattgggtaacaggcagagtttggaacagtttggagggctcagaagtcagaaaaatgtgggaaagtttggaacttcctagagacttgayaaatggctttcaccaaaatgctgataatgatatggacaatgaaatcaggctgagatggtctcagatggagatgaggaacttgttgggaactggagcaaatgtgactcttgctatgttttagcaaagagaatggcagcattttgcccctgccctagagatttgtggaattttaaacttgagcgagatgatttagggtgtctggtaaaataaatttctaagcagcaaagcattcaaaatatgacttgggtgctgttaaaggcattcagttttaaaagggaaacagagcataaaagttcaaaaaaatttgcagcctgacaatgtgatagaaaag

SEQ ID NO: 885153 - DNA, 649 bp, Homo sapiens
tgaggcccctatgattctcgtggcctttttctcatagatcgagatgcctctgtagctctagcctttccatttacattccctacagtaaaaggaaaagagatctatatcaggaaacacattttcccagaaccctccagcaggcatctgcttacatgtgatttgccatgtggcacatgttggtcacccagctgctaaggacattggaaaatggatatttttttttcagttgaacatattattggcctgagcactgttgggcctctgttaggcaagaaggataaaatagatatgagatagcatttggcagaaggtcccagctagaaaatggtagaattgtgttctgaaatccaataaattataaccatgataagctagaacaaggatctgcaatatgaaagtcaggaagagccattaaataaactgatatcaatattttacttttaaattagaagacaagaaaaaaaaaaaaaactgtgtttaagagtcactattccaagrccttcacaggcagtgagaatggtcaaagatggaacaatcaaggccaaagacaaagaatcgttcttatagcagaggaagaactaacgggattgagttaccaagggcaaaataccctcttcatttgaagagaagaatctagcttgcaaaaagg

SEQ ID NO: 885154 - DNA, 609 bp, Homo sapiens
ccaccgctttccacggtaatgatccaatgacccaaaaattgccactcctatcatagaaatttctgtattaaccaccccttaatctacatgtgattaaaagtaagtataaatacaacctcaaaactgcctgagctgctactctgagcacactrcctatggagtagccctgctctgcgggaacaggcatggagctgtaacactgctgcctcagtaaagttattttcttctaccctaccactggctcgtccttgaattctttcctgagtgaagccaagaaccctcgcaggctaagccctactttggggctttccagccctggatcagtgtgaagccgttatgtttaggaagatatttgaaatattaatttcatctcaccttagcattttaaaatgtttagttttaagatgtataagctatgtaagcaattagtatgctgctatgtgcttataaataaatatatttacatactttacagagctgtgctcagaaagtttttactgagggggtgcaggatctaaacagtttggatctaaacacctactttgctcatacggtggtaaagtaggtgagaggacaagcatgtaacatgctttcatttttatgcctgac

SEQ ID NO: 885155 - DNA, 622 bp, Homo sapiens
ttctacctataaagtcctctaaaaacttgatgcatttgcagtttgtccgtccagacaatcccctctttgtgtattctctgaaagtctgaaaacaactgaggacaacttgaaggtacaagtgtctttctcggtctaccccttgcgtatcaatatgctcaacaaagagctgcattcaaaaatagatacgttattgagtacaggtcaaataaagagtgaacttgtttcttaaaggagaattctaacataatcaaggttagtgttgataaaaatgaaataaatgaagaaaagatacagttttaaagataaaatgaccagtgctggaaaagaaagcaaagcatagtttaaatcaatgtgctccatcaccgaaaaaggacgttagtaagaaacttggcttgttacatactttaaattctctgtttacattcagaactatayggttttaaaatattgtggtttcttctgagtaagtgtttctcaaatctaagtgttcctttagttcatacacagaaacctttttaaatttttttttcccaaatgttaaccatccagatgtagaatcatgtggtgagtcctcaaatacttacccttcagattcaatcagcagcatcattttaccagcctg

SEQ ID NO: 885156 - DNA, 596 bp, Homo sapiens
aagatcaagcacgagaggcaccaaagacagaactgatgacagaggcagctaagaagctctaataccgttcccaaaatttatatttttgcccaaaaggtatttttttaattttatctttaggttattgtattgtaaaattgacttttgtcctttgttgtacagttttatgaattttaacacacaaataggttcatgtaaccaccactataatcaggatgcagaacagttccataacctcaaaaaactccctttacagtcacatcctcccctaacacctaacccctggcagtcactcatctgttctccattattatatttctgtctttttgttaatattatatcaayggcttcatagaatatgagacgggcttctttcattctgcataataccttcaaaattcatacaagtagttgcatgtatcaaaagttggcttttttattgttgtgtagtattccatcatatggatgtttaactattgctctgttggaagccatttgggttttttctagcttggggcaattataaataaagcgaccgaaaacacttgtgtacagccaaaaaaaaaaaaaaaaaaggctgtgtcagtgtgagaccc

SEQ ID NO: 885157 - DNA, 667 bp, Homo sapiens
ggcagtaatcaacctttttacctgtcatcatgcattggttaatgatggggatatgttctcagaaatgctttgctaggtgatttcaccatcgtgtgaacatcaacagagggacttacacaaacctagatggtgtagcctactacatacctaggctgtatggtawagtctattgctcctaggctacaaatgtgaacagcatgttactttcctgaatactgcagacaattgtaacacaatggtatttgtgtatctaaacatatctaaacatagaaaagatacagtaaaagtatggtataaaagatttctttaaagggtacacctgtgtagggcacttgccatgaagggagctttcaggactagaagctgccttcaggagtgagtgagtgagtggtgagtgagtgtgaaggcctcacacattacagtaccctactgtagactttataaacactgtacacttaggctacactaaatttatttttaaaaagtttttcttcaataataaagtaaccttaatgtataaatttttaaatttataaaatcaaaatttgtttaaacgttttgactttttggaaataatagcttaaaacacaaagacattgtatgttgtacaaaaaatactttttctatatatatgtgttctataaactttttttgtatttttaccttt

SEQ ID NO: 885158 - DNA, 605 bp, Homo sapiens
aggtaattggatcatggtggcagttcccccacactgttcttgtgatagtgagtgagttctcacaagatctgacagttttataagcgtctagtgtttctcttgcttgcactcactctgtcctgccaccctgtgaagaaagtgcctacttctcctgtgccttctgccatgattgtaagttttctgaggcctccctagcaatgcaaaactrtgagttaattaaacctctttcctttatcaattacccagtcttaggtattgctttatagcagcatgagaacagactaatacagaggccatgccaccctaaatgtgcccagtctcatctaatcttggaagctaagcaaggtctgccctgattagtacttggatgggagatatttaggaaaaatctgaatgggatatatttgaaaacaaggtccaaggtaagaagtcttagagtgaaagtgttttgggataagcatcagtagttaacttggctgaattttatgcctaatgaagaccaaggaaataacttgtgccaagtgctctaccattaaaattatcctaatgtgaaaggatcccagctggtacacgtagcagccttagatttctcttcagaaagacac

SEQ ID NO: 885159 - DNA, 626 bp, Homo sapiens
actatgaagacactcaacaagcagcatgtaccagaaaacatgcatgtgactctctatagcttaccaaggctttcatgcttgtacaaggtctcatgtgaccctaaccacaacctggtaagatgcagtggacaggcaaccctgatagaagtaaggaagtgagatgattggagaaatgcaaatccaaaccacaatgagataccatctcacatcaatcagatggctattactaaaaagtcaaaaaataacagatgctggtggggttgtggasgaaagggaatgcttatacactgttagtaggactgtaaattaattcaaccattgtggaaagcagtatggcaattcctcaaagagctaaaagcagaatgaccatttgacccagcaatcccattactgggtatatacccaagggaatgtaaatcattctaccataaagacacattcatgcaaatgttcactgctgcactactcacagtagtaaagatatgggatcaacatgaatgtccatcaatgacaaattagataaagaaaatgtatacatatacaccatagaatactatgcagccataaaaaaagaaggagatcatgtcttttgcaggaacatggaagtagctggaggctattatcct

SEQ ID NO: 885160 - DNA, 549 bp, Homo sapiens
taagtatagaacaacagccatgatgatgatgataggagcttagaagacgaattgaccacttaccacatgccagaaaatgtgcttagtcctgtaagaagattatctcagttagatacttctttgtggggagttcctcctctagattttctatcatctaggccctcctagaattacctcacttcggattgggaaatctccaartgtgtgtgtgtgtgtgtgtgtgtgtgtgtgtgtgtgtgtgtttgtatgtgtgtgtctagtgcttttttattcttatagagctgaactagtaagtgctaggcagggaaatatttatttcctactcaacatgtttccatggtgaggaatttttattagaagaagatgtgagcttcttcctttccccccaccccctccactgagggcaggagagtgacttatctgattgaagagtttggaagagggaattgggcatttgtggattagccactcttgtacattttgggcatgactgcttgcagagaggatacattctggtttgcagtctccaccatgctacgacttagcaaa

SEQ ID NO: 885161 - DNA, 585 bp, Homo sapiens
tgagtataataggaaatgagaagtatgtatggctattgttaaagtgaaatatctaatctgaaattagaatctttctgcctaaccaagtatccctaacttaattatgatgtgtgttattggctgatagtgtactcctccaatctaaccatcaattggaaaagtacccttctttcttctagaagatacttctccacaagtctacctgccacaatgctgctaatttgttgtctcagctttaaaaaatttgccctggtgaggcctaactctgctargcagctctaacaccctacatgtatctccatcacggaatttatgtcataatacatgcaatcctttgtttgcatgtcactgatcatctaaaggaatgcatcatccatatatctcctggtgttgagcacaatgcggatatatagcaagtccctaaaaaatgtgtagatttaatggtcaaaacaaattaatggtagtttacctactaaatgtctacatatcatcctttaagactcaaatgtttactccttaagaagtcttgtttgtgtcatttccgtatcatacttattgccattgctgtttttcataccatattgc

SEQ ID NO: 885162 - DNA, 696 bp, Homo sapiens
acatacctcaatattcaattagatgattattgtgattgtctagctctgaaaatacccatgaaatctctaatccactcaatttataataactgctatttccaaagtttttcactgtttgcaaaatccctttatctctgtcatctcatgtggatttgaaaaattgggccataggatggtcagggacaggtgcccttattttacaagtcaaaaactgaagctcagagacataaagcaattcacccaaggccacacagcatgaggggactctcaaactcacatcttttgattctatttcagtgctctttccctcaccgggccttgattaaatcctccaggattaaatgaagactcaaatttaacctttagcctgtcaaattggccaggcaatgtgtgtgtgtgtgtgtaggagagcagagtttggtagagagaaaaatcaggaacctagtctggacttgggagtgaagaaggtttgaacccacctatctagattggacccaagcaaaaaaaaattacttccttttagtatattttgtgaagaagagagargactgggttaaaaacagcactgtgagatatgcaataggccaaaaattagagcaactacaatagattaccccacccttgaaggaggctatggatgggtgtttgggatctttggtgtggcacaatgaaagttctatctcccctctctcttct

SEQ ID NO: 885163 - DNA, 641 bp, Homo sapiens
caggcttgaaattcttgctgccagcacagtggtctgaagtagacctgggatgctcaagcttggttgggggagggacatctgtcattactgaggattgagtaggcagttttcctctcacagtgtaaacaaagccaccaggaatttcagactgggtggagcccaacacagcgcagcagagccactctagccagattgcttctctagattccttctgtctaggcaggacatctctgaaagaaaggcagcagtcccagtcaggggattatggataaaactcccatctccctgggataaagcacatggaagaagggrtggctgtgggcgcagcttcagcagacttaaacgttcctgcctgcgggctctgaagagaacagcagatatcccagtacagctctcaagctctgctaagggactgactcctcaagtgggtccctgaccccagtgcctcctgatgggaagacacttcccagcagacgttgacagaggcctcatacaggagagctctggctggcatcttgcaggtgcccttctgggatgaagtttccagaggaagaaacagacagcaatctttgctgttctgcagcctctgctggtgacacccaggcaaacagggtctgtagtggacccccagcaaattccag

SEQ ID NO: 885164 - DNA, 641 bp, Homo sapiens
caggcttgaaattcttgctgccagcacagtggtctgaagtagacctgggatgctcaagcttggttgggggagggacatctgtcattactgaggattgagtaggcagttttcctctcacagtgtaaacaaagccaccaggaatttcagactgggtggagcccaacacagcgcagcagagccactctagccagattgcttctctagattccttctgtctaggcaggacatctctgaaagaaaggcagcagtcccagtcaggggattatggataaaactcccatctccctgggataaagcacatggaagaagggatggctgtgggcgcagcttcagcagacttaaacgttcctgcctgcgggctctgaagagaacagcrgatatcccagtacagctctcaagctctgctaagggactgactcctcaagtgggtccctgaccccagtgcctcctgatgggaagacacttcccagcagacgttgacagaggcctcatacaggagagctctggctggcatcttgcaggtgcccttctgggatgaagtttccagaggaagaaacagacagcaatctttgctgttctgcagcctctgctggtgacacccaggcaaacagggtctgtagtggacccccagcaaattccag

SEQ ID NO: 885165 - DNA, 617 bp, Homo sapiens
tgttatgtaagtatacaggttccatggtggcttactgcacccatcaacatgtcatatacattaggcatttctcctaatgctctccctcccctagccccacagcctctgacagtacctggtgtgagattctcccctccttgggtacatgtgttctcattgttcaactccgacttatgagtgagaacatgcagtgtttggttatcttttcttgtgtgaatttgctgagaatgatggtttccagcttcatgcatgtccctgcaagaacatgaactcatccttttttatggctgcatagtattccatggtgtatatgtgccacattttctttatccagtctatcattgatgggaatttagattgattccatgtctttgctgttgtgaatagtgctgcaacggacatacatgtgcatgtgtctttacaatagaatgatttatattcmtttgggtatatatccattaatgggatttctaggtcaaatagtatttctggttttagatccttgaggaattgccacactgttttccacaacggtttaactaatttacgcttccaccaacagtgtaaaagcgttcctatttctccacatgctctctagcctctgttgttttctgact

SEQ ID NO: 885166 - DNA, 588 bp, Homo sapiens
aaaggttggatgacgcatctcacagggataatgttgaaatgattcctctattttgtggaagattgcactactagatctaagactctttccacttctgagatgctgtaattgtacattttttcctgctgtaattttaggcttatttgtctctttctagtatgtgaagaagaataccagctgaagaaaatgaataaaaataaaagtttatgaaaaataaaaatcaggacaaaaggcaatattaactcactctaaaactatggatgaattgyacttacaaactgtgactaacagtagaaaaattgtgtcttttaaaacagagcttcattgcaaattttaagatagaaatatccaagtgactaatctttgaacaatttgctaatttcaggtctatattcataccaagtggctactggaggatgcaactaattctgggtgccagatattagatatctattagatttaagctggcagtttctaatatactttatccagaaaaattcagtgattgcggaagcttaccctaagctataatattagagaaatgagtccctatcacattaccaaaagaaatagcaaaatggctgcagt

SEQ ID NO: 885167 - DNA, 588 bp, Homo sapiens
aaaggttggatgacgcatctcacagggataatgttgaaatgattcctctattttgtggaagattgcactactagatctaagactctttccacttctgagatgctgtaattgtacattttttcctgctgtaattttaggcttatttgtctctttctagtatgtgaagaagaataccagctgaagaaaatgaataaaaataaaagtttatgaaaaataaaaatcaggacaaaaggcaatattaactcactctaaaactatggatgaattgtacttacaaactgtgactaacagtagaaaaattgtgtcttttaaarcagagcttcattgcaaattttaagatagaaatatccaagtgactaatctttgaacaatttgctaatttcaggtctatattcataccaagtggctactggaggatgcaactaattctgggtgccagatattagatatctattagatttaagctggcagtttctaatatactttatccagaaaaattcagtgattgcggaagcttaccctaagctataatattagagaaatgagtccctatcacattaccaaaagaaatagcaaaatggctgcagt

SEQ ID NO: 885168 - DNA, 696 bp, Homo sapiens
ggctatttcatgttgaactgttccttttgaatcagtttcagttccctcaagaaagagggtactgacaataagcaaatgacataaaagatgcctcatttaattatctacatgaaacagaaaggatgctgctgttgtttgtcgcctccaaaatttatgttgaaatttaattgcctttgtaacaataataacagctgggacttttgagaggggattagtccatgagggctctgcctttacgggtggaattaatgccatcattctccctcttgccttctcttgcccttctgccatgttaggacacagcaataaggtgccatcttggaacaaggtggcatcttggtcctgatcaaggaatcagcagcttcaatgtctcaaccttctcttcagatgttgaagctgctgattccttgatcttggacttctcagctctcagaaccgtgaggaatcaattgcttttktttatagattacccaatctcaggtattctgttatagtaacaaaaacagacaagacagatggcaggcatggttttatggttggacgtccagtgtttgatttcagagctggggctgttaaaggggaaagaaagccctatgaagtggatacaaaaattttttttccatattatgtggcttctttcagtatgggacttggtgctagattggcaacaatagcagcatgtcatgctactggata

SEQ ID NO: 885169 - DNA, 696 bp, Homo sapiens
ggctatttcatgttgaactgttccttttgaatcagtttcagttccctcaagaaagagggtactgacaataagcaaatgacataaaagatgcctcatttaattatctacatgaaacagaaaggatgctgctgttgtttgtcgcctccaaaatttatgttgaaatttaattgcctttgtaacaataataacagctgggacttttgagaggggattagtccatgagggctctgcctttacgggtggaattaatgccatcattctccctcttgccttctcttgcccttctgccatgttaggacacagcaataaggtgccatcttggaacaaggtggcatcttggtcctgatcaaggaatcagcagcttcaatgtctcaaccttctcttcagatgttgaagctgctgattccttgatcttggacttctcagctctcagaaccgtgaggaatcaattgcttttttttatagattacccaatctcaggtattctgttatagtaacaaaaacagacaagacagatggcagrcatggttttatggttggacgtccagtgtttgatttcagagctggggctgttaaaggggaaagaaagccctatgaagtggatacaaaaattttttttccatattatgtggcttctttcagtatgggacttggtgctagattggcaacaatagcagcatgtcatgctactggata

SEQ ID NO: 885170 - DNA, 625 bp, Homo sapiens
aaagatgtagactgggaggctaagccagtctagacttttcatgtttttctctctgctttatattcaggcaacactggcagctgattagatggtgctcacccagattaagggttgatctgcctttcccagcccactgacttaaatgttaatctcatttggcaacacccttacagagacacccagatcgatactttgcatccttcaatctaatcaagttgacactctgtattaagcatcacaggcacctaaggtctttggtcttttgttagtctgagggtagtaagggcagttccactgcagaggtagtggcagagaacctttcagttgcccctcagggctctgcccatggagttgcagagctgcttttgtagaaatcactggacaggagagaccaatgggtgggataggaggattttattaggtgrccactaactcagtggattaacatccaagggctgagccccaaataaagacagggcttgatttttatagatacatctgaaaagggcatgaaacctgtaaggcgagtaagcaagcttacaaaagcagaacaaaggcagtttatcagtgacaggttttataactcaggcatgtcttgtgacctttgccatactgcacagctgga

SEQ ID NO: 885171 - DNA, 704 bp, Homo sapiens
agaatggtgttttcattttctattggaattgaggtacaatgatataagtctaagactaataatgggtcccatatcgagagataatgtctaagagctttttttttttttttttttaagagcctttgaaaacacagtggagaaagggtgagagaggtactgggctaggtgacatcacttgagatcccaaaactaactgtatctgaagtaagtaatacctcttcactttttcgttacatgagcaaaggaaactttttttttycttaaactggtttgctaggtttttgtaaattagcagaaatggtgcttacatacacacatatatgtatgtatgtatattttggttgagattaagaaatagagacctaggttctaatgatataactgactaaagataaaattaatccaattattgaaagtttcagcacctcagttgcctctttaaacaatgagttagttagattacatgactgacagttgtctagatctaaaatcattggatccaatcaattgattttcatgaatgaacaaagacatttaaatctggaagtaagttctattaaacctagtatcttgataaccccaggccagataaaactataaaaaaaaaatgactggtctctatatcagtcgatgggcaccattttatagttaatttatttcaggaacatggcagttataacacaggtaactataggacaagctgg

SEQ ID NO: 885172 - DNA, 602 bp, Homo sapiens
aagcagaaaaaaaatacaagaaagaaagctctatataaccaatccctgatttaaaattgtgaaacaatctcaaataggtccagtcccatttcattaccaaacatctacaagtttatgctctgggtttaccatcttttgatatctcctccctaataccagtgaaagggatatggaaatttgttgatacagatgttactgtagaattaatactgacagtgatcagtgaaatttacattggggtggtaattagttattaatgatttaaaatttttacagygtcacctttactgtcttctaacgatgtgtgtccaaaacagtatttatacatgagactcttttttttttttttttttttttgagacagagtctcactcactctgtcgcccagcctggagggcagtggtgtgatctgggctcactgcaacctctgcctcccaggctcaagcaattctcctgcctcagcctcccaagcagctgagattacaggcactggccaccacgcccggctaatttttgtatttttagtagagacggggtttcatcatgctggccaggctggtctcaaactcctgacctcaggtaattcatcccctcagcctccc

SEQ ID NO: 885173 - DNA, 607 bp, Homo sapiens
gtctccccaagcattcggggagcagagtttttaaggataacttggtgggtggggggaagccagtgagccaggagtgctgactggtcagagatgaaatcacagggagtcggagctgtcttcttgcgctgagtcagttcctgggtggaggccacaagatcagatgagccagtttattgatctgggtggtgccagctgatccatcaagtgcagggtctgcaaaatatctcaagcactgatcttaggagcagtttggtgggggtcagaatcttgttgcctccagctgcatgactcctaaaccataatttctaacactgtggctgatgttagtcctacaaacgcaagtcccaggcaagaaggaattttgctctgggaaagggctgttaccatctttaaactgtaaactaagtttctcccaaagttagttcagcytatgcccaggaatgaacgaagacagcttggaggttagaagcaagatggagtcagttaagttagattgttttcactgtctcagacctaattttgcaaaggtggtttcaatcccttcctttgggttttctaacactttaaccctaaggtataggctataaagatgggaaaaggccgtcga

SEQ ID NO: 885174 - DNA, 629 bp, Homo sapiens
gggtggtcacaggaccaccatttccatttgtaaagtggaaataataccttccctgtccttgctcctgtgaagccatggccatgaggacactggtcaaggcctctgagcctttcagaagatgatgcctggtccaggcggtgctgcctcctttctcgctgtccccatcttactgatgaatagcttagaaccaagtactctaatcagtaaacccccagcaggggtcttggggagcacttgtttacactgatttccattcctcatggaaatgtgtactagaatgcagtaggcatgtcagcttcaggaggtgtgagacctttacgtcttttgtttaggttttattttcaacacgtagaacagtgcctggtacaygtgtgctcaaaaataatcactgaatgagtgaacaaatgttacagcttctgatacttatcccctaagtgcaaatgagaaaaaaaagccatatacagtggaagattcaggttatacacagagtaaataggtagagtctcccaaattgtaagctgttcagtttatggaactctatgcttttatacccaataacaatatttcaaactgggagaaggtggtgagtacaagaaatcctaaaatacaaaagttgaaacaattctaac

SEQ ID NO: 885175 - DNA, 598 bp, Homo sapiens
gctgcaaataaaataaaataaaatacttgggatatacctaaccgaggaggtgaaagacctctacaaggaaaactacaaaacactactgaaagaaatcataaacaacacaaacaaatggaaacacatcccgtgctcacagatgggtacaatcaatgtgaaaatgaccatactgccaaaaacaatcaacaaattcaatgcaattcccatagaaattacaccagcattcttcacagaactagaaaaaaataattctaatgtagaccaatgaacagaagagaaaactcagaaataaaaccaagtacctacagccaactgatctttgacaaagcaaacacaaacagtcgagaaargacaccctagtcaacaagtggtgctgggataattgactagccacaggtagaagagtgaaactggatcctcatctctcaccttatacaaaaatcaactcaagatagatcaaagatttaaatctaagacctgaaaccttaaaaattctagaagataatatcagaaaaatccttctagatattggcttaggcaaagacttcatgaccaagaacccaaaagcaaatgcaacaaaaacaaagataaatagatg

SEQ ID NO: 885176 - DNA, 642 bp, Homo sapiens
tatttactttgagtaaagtaattgtagattcacgtaatttctggcactgtctgtaaattataagatactagttggacacatatatctacatgtgcctaatcttacatatttatgaaggcaatattagcctatctgatttttaaaatcagtataggttgactctcccttatccaaaatgcttaggaccataagtgtttcagattttgggtttgtttggttggttggttggttggtttgcattttggaatattaccataaacataatgagatatcttgggtataggaccctagtctaaacaggaatttcatttatgttttgtgtacaccttgtacacttggcctgaaggtaattatatttttcctttgaggatgctgaatmaactgaattttatgtgcctgtgttttgactatgacctgtcacatgagatcagctgtggaattttctacttgtggctgcatgttggtgcttaaagattttcagattttggaactttgcagattagggatgctgaacctatatattagtcttggaagtttagattagttaaactttctttgagaaagcctacatatcagaaccaagttttatatcactagaatattatgctaatgttatgtttacactgataaaataagggaaaa

SEQ ID NO: 885177 - DNA, 615 bp, Homo sapiens
aaaatggagaaacctcgtctttactaaaaatacaaaattagccaggtgtggtggcacatgtctgtaatcccagctactcaggaggctgagacaggagaatcacttgaacctgggaggtggaggttgcggtgagctgaaatcacaccattgcactccagcctgggcaacaagagcgaaactccatctcaaaataagtaaataaataaataaataaattaattaattaattaaataaaagtccacacatggtagttcttcttgaagcagcatgttttagtaaataagatgatggacttgttatgagctcagaacaagctcatatttgccatgtgtcttggggaaagattctccatttatgccttgggaaccctattgttatcagttagctacagctgtataacaaactacgctaaaacatggtcgtttctaacgctaagcatttactatggctyatgagtccataggtcagctgggcagttatgttgctctgggccaggatcagctggtggttgctgagcttgttcatgcctctgtgatcatctggtggtcagcttggggctggctcgattaggatggcctctcatgtcttgtggttggctggcttttggctggcac

SEQ ID NO: 885178 - DNA, 621 bp, Homo sapiens
cagttgtgccatttttggctagtgatctgtggctgggctgccagccgatgacaggcagttccccaagcaggtcacaacaaggtggcaattgaccttgctccccgaggatgtctgttcgggttctgctagaagccaagggctccctgatgtggggtttcggtttcacactgtggcactctgaacaattctttatgggctggcaaaaggcgtttcacacttcagataggccccaggaggatgatttgctttcttcaaggagaactgagaattctcagatgattggaaggttctgtactctcattttagcacctccgatagattctcccacatgtggcaaacacagtcatagctggaggtccattgtcggttgttaacaggcagtgaactgttgctgaatcagacagtccasgtatagggcatttccatcatcacagaaagttctgttggtcagagcatctaaagcatattcggcctctccccctagccaccctgtttatctcttgcttgcattcctccttggtatttgtgctgctgccaccccagttccagcccccaatgcctaataacatcctgatagatcaatagagttgtgttttagcaggtctaacatcatgttgtatc

SEQ ID NO: 885179 - DNA, 625 bp, Homo sapiens
aaaatgtctagcattttcaaaaattctgggattcagtgaagacaatgggagccataaatcagccagacaccaagtcgtgccgactccccctgggcaggagcacagagtccaggccaggttggccctaggggctggggagaggtcacctgacctgaaatggactttgctgaggagamaatgagaatgatctcaaggtctttgctgaggaggcagacttctttaagtgttcccaattaactctctttgcaaaatttttaaaaatagaatctcttgatttctttttttaaaaatttcctacttttattttaagttcaggggtacatgtgcaggatgtgcaggtttgtgacataggtaaatgtgtgccattgtggtttgctgcaaagatcatcccatcacccaagtattaagcccaacatccattagctattcttcctggcgctctccctcctcccacccctctgacaaaaggccatacacctacaaccatctgacctttgacaaacctgacaaaaacaagcaatggggaaaggattccctatttaataaatggtgctgagagaactggctagctgtatacagaaaattaaaaactggactccttccttacaccatgtacaaaaatcaa

SEQ ID NO: 885180 - DNA, 536 bp, Homo sapiens
tctgtaggggaagagggaaggcaccacatcaagggattactttgtgggacaaaagaatctgaacagcagcccttgagttccagatttttccactgacatagtctacccaaatgagaaggaaccagaaaagaaattctggtaatatgacaaaacaaggttctgtaacacccccaaaagaccacactagctccccagcaatggatccaaaccaagaagaaatctctgaattgccagataaagaattcagaaagttataaagctcctcaaggagataccagagaaaggtgaaaaccaacttaaagaaattttttaaaaaaatacaagatatttatgaaaaatactccagagaaatagatgtcataaagaaaraaatatagcttctggaaatgcaagacacacttagagaaatacaaaatgcacttgaaagtttcaacagtagactagaacaagtagaagaaagaacttcagagcttaaagacaaggctttcaaattaacccaattagacaaaaaaaaaagaattattaaaaaatgaaca

SEQ ID NO: 885181 - DNA, 597 bp, Homo sapiens
cactaaaatctcagaaatcactaaggaacttttccatgcaaccaaacaccaactgttctcccaaaaatattgaaataaaaaaatttaaaaattagcaaactgagtcaatatacaaaaaggataatcatgactgagtagggtttattctaggaatgcaagtttggtttaacataagaaaatcggtgtaattcaccattttaacaaactaaaaaaaaaccatatgtttatctcataaatatataaaagacatttgaaaatctaacattaattcctcataaagactcttagcactttttcaatttgacaaaggttatttttgaaaaacttacagcaaacrtcacacataatggtgaaggactaattgtttcacccttaaagtcaggaacaagttaagaatgccttttctcaccacttctaatcaaaactgtactgaagatttgaaccagtgcaaaaagataggaaaagaaatgaaaggcatccagattaaaaaggaataattaagactatctttcactcacagacaacatgactacctatgaaaaaaaaatctgatggaatctacaaaacagctactataactaatatataaaaaattaa

SEQ ID NO: 885182 - DNA, 626 bp, Homo sapiens
aagcccagacactgaagttctgccagaggaccaggttctccaacctgtctcctctccagattctgaccagtgaaggagtctacccagaagtcagctagggattgaagtacccctttctcatggctaacactgaaccagagaacaaagcttggaccgagaacacaaatgggcttcccatttctccttactgaattaagtgcccccatgtggttgtaggcaggcctcacctgtggggcagggtctccccactcccagctaattgcatggaggggaggagaaaacacacaacctgggagcaggatgtgctgtcagaaagagaaagcacgatgyaggcacagggtccagtttttgaatctcacattagcatatgctgttggagccccacccatatcctctagcacgtattcttcctgagcactctgtgaagacaaggactgcaagtgcctggtctttcttccatgccatgtttgcagcagggcaggctgtttggggaagcagccatcagccagtgactgaagggattggagaatcaatttgccagctccttcacctcttaggtgggaccactctgcactgtgttctctaggctttcggagatccaggtggggttgattcaccatagtcac

SEQ ID NO: 885183 - DNA, 626 bp, Homo sapiens
aagcccagacactgaagttctgccagaggaccaggttctccaacctgtctcctctccagattctgaccagtgaaggagtctacccagaagtcagctagggattgaagtacccctttctcatggctaacactgaaccagagaacaaagcttggaccgagaacacaaatgggcttcccatttctccttactgaattaagtgcccccatgtggttgtaggcaggcctcacctgtggggcagggtctccccactcccagctaattgcatggaggggaggagaaaacacacaacctgggagcaggatgtgctgtcagaaagagaaagcacgatgtaggcacagggtccagtttttgaatctcacattagcatatgctgttggagccccacccatatcctctagcacrtattcttcctgagcactctgtgaagacaaggactgcaagtgcctggtctttcttccatgccatgtttgcagcagggcaggctgtttggggaagcagccatcagccagtgactgaagggattggagaatcaatttgccagctccttcacctcttaggtgggaccactctgcactgtgttctctaggctttcggagatccaggtggggttgattcaccatagtcac

SEQ ID NO: 885184 - DNA, 617 bp, Homo sapiens
caatcctttttttaaagagatagggtctcactttgttgcatgcaatgtcacaatcatagctcactgctgcctcaaactccttggcccaagggatcttcctgcctcagcctcccaaatagctgggacatgccaccatgcccagctaattaaaaaaaaaattgtagaaatggggtcttgtcatcttgcccaggctgggctcgaactcctgggctcaagtgatcctcccatctcggcctcccaaagtactgggattacagaagtgagaactgtgcctgggcaaatttaatcatttcaacatataatcaatatgaaaacttattaatgagctatttacaatctttttctcrtactgagtctttgaaatctaatatatatttcacatttatagtacatcacaatacaagtactaaattttcatcagaaatagttcatctgtatttgtatgttataaaatttacagttggatacgtagattcacataatccaagcacacataaaacttttccagtaatggaattaagtatccatttttttaatttaaatgaatttaaatgaaataaaatttaaaatttagttcctccgccaatactagccacatttcattgtctactgtactg

SEQ ID NO: 885185 - DNA, 692 bp, Homo sapiens
atactaaaacttagaatgcatggtagattgtgcaagattcctccctgttgatcaagaggtacagtcaatttcatgtcccttaaatcttggctcagccatgtgacttgtgttggtccatgagccattactaaatgtgatgcaggcagaggattaaaacacatttgtgcaytggggcttgctctcttgcatacttgagaccctaggaccaccacgttaatgagcccaagctatcctgctagaaatggaaggccttgtggcagagatccaaggtggaccagctgagagtcagccagcccttggctgatacctgtcagctgccagacataagagtgaccaagcatcctccaactaacccttcagccatcccatgctattgggagaagagctggaagtgaagctcaggctgttacattttaagtttatgtttttaataagaacactgtgctcacttctcacaaatgtgtactgttcctcagaatactgatgaaactaacagctgttaaagtatctatatagacagcctggcatacagggaaacagaggcagaaattagccttacctgtaaaccccaagtgcctttccgcacaacaaagacctatggaataagcctcaggacaacaaaaatccatgaagattttaaatgaggagtgttaaaataaaactgcaagcggcagggatatggactgggcaaa

SEQ ID NO: 885186 - DNA, 692 bp, Homo sapiens
atactaaaacttagaatgcatggtagattgtgcaagattcctccctgttgatcaagaggtacagtcaatttcatgtcccttaaatcttggctcagccatgtgacttgtgttggtccatgagccattactaaatgtgatgcaggcagaggattaaaacacatttgtgcattggggcttgctctcttgcatacttgagaccctaggaccaccacgttaatgagcccaagctatcctgctagaaatggaaggccttgtggcagagatccaaggtggaccagctgagagtcagccagcccttggctgatacctgtcagctgccagacataagagtgaccaagcatcctccaactaacccttcagccatcccatgctattgggagaagagctggaagtgaagctcaggctgttacattttaagtttatgtttttaataagaacactgtgctcacttctcacaaatgtgtactgttcctcagaatactgatgaaactaayagctgttaaagtatctatatagacagcctggcatacagggaaacagaggcagaaattagccttacctgtaaaccccaagtgcctttccgcacaacaaagacctatggaataagcctcaggacaacaaaaatccatgaagattttaaatgaggagtgttaaaataaaactgcaagcggcagggatatggactgggcaaa

SEQ ID NO: 885187 - DNA, 692 bp, Homo sapiens
atactaaaacttagaatgcatggtagattgtgcaagattcctccctgttgatcaagaggtacagtcaatttcatgtcccttaaatcttggctcagccatgtgacttgtgttggtccatgagccattactaaatgtgatgcaggcagaggattaaaacacatttgtgcattggggcttgctctcttgcatacttgagaccctaggaccaccacgttaatgagcccaagctatcctgctagaaatggaaggccttgtggcagagatccaaggtggaccagctgagagtcagccagcccttggctgatacctgtcagctgccagacataagagtgaccaagcatcctccaactaacccttcagccatcccatgctattgggagaagagctggaagtgaagctcaggctgttacattttaagtttatgtttttaataagaacactgtgctcacttctcacaaatgtgtactgttcctcagaatactgatgaaactaacagctgttaaagtatctatawagacagcctggcatacagggaaacagaggcagaaattagccttacctgtaaaccccaagtgcctttccgcacaacaaagacctatggaataagcctcaggacaacaaaaatccatgaagattttaaatgaggagtgttaaaataaaactgcaagcggcagggatatggactgggcaaa

SEQ ID NO: 885188 - DNA, 680 bp, Homo sapiens
aagctgagatgagccagggaatcaaggactagagagcccatcttggctcatgaaaatgagcaaactcagtatgacgttggaactgcaatccagaaacaacaatctcaacaatgcgactggagtgttattctaattgaaatatataaaagtacatcatcatcctcctcttcagctaattgttccaaagccatctattacccaactgtgttggtagaggaggatttgatttaagaagactcagaaaacatttaaaaattgtgtttgaatggaatatggtaataagccttttatgtgagagcatcaaataaaagaaagcagctcagttatgacatgtcctgcatttcctttcattgaatgcatctgaaatattttgaattttaaatataggataaacataatttcttctaaaaatagtttttgggtcttagtttttaagccagcacaagtaaattactctgtgtaaaggttgaataaacccaaactcttgcttctatctttaaacagcatatacyatgtactaaagctctctgaaagaaaaacaggtgagctgctaagttgagatcctacaacagatagactcccatcgagatatcatcagagaagcagcagcagcaacaatattaaaaatctcaggagaaaaattgagttaattttaggtctactttcaaaagttaagtgct

SEQ ID NO: 885189 - DNA, 632 bp, Homo sapiens
tctatagttttcctttttccagaatgttatataaatggacttatgcagtaagtagccctttggtcctggctttgctcacttagcatactgcatctgtgattctctgtgttgttgcatatgttaataattccttttttatcatcgagtagcattccattgtagggatacaacacaatttagttaaacattataacacagtttggttaaacgttcaccagttgaaagacttttgtgctgtttccagtttttgaagattattagtaaagtcactataaacatgtgtaaataggtatttttgtgaacatagatttttatttctcttgggtaagtacctaaaagacagattgattatataaaaagtatatggttaactttgtaggaaactgtcaaactactttccagaggggctgtaccatttcgtattcccaccagcagtgttcatatgcatgggaatgtatgtmtgtgaatcttggtgtttctggatccctgccaacatttggcattgtcagttttataataataatggtgatggtgatgatgataatgttgatgacaactttagctattctaacagatgtgtattgttagttctttgtggctttaatttgtattcctaatggctaatgatactg

SEQ ID NO: 885190 - DNA, 615 bp, Homo sapiens
tcctagatgcaagcaaacaatttagtgtgcaacagtgttacagatgctgatagaagagtctacaatctactcctgcataagagctacagaacagttctttactcacagtcatagcaatagccagaatattagtatttttgcatggtttttctgaatcccagctcctaaagggagatacaaagagagccaggtgacatccaaacaaacactcagtgtgctgcattacagaaggggagccctgagcttagggagcctgaatgttttatagtggacaaaggcttgcttgctctttcttccaggagacattctctttattacactggacagtgtgcctgtgcttttgtctagagggggacactacctcccaaagctgttcactatacaaacaatcytgaagagatagtccagagaaaaggacagtcagtgcccttgctcacaaggcatgcagaaacacaagagaccaatagagaattgtcttcccacagcaatcaactctgattgtcattatacagctatcagtatgacattttatttgttgtcaagcttttacattagacccttatttccatgaaagtatgaacgatgtttattttttctactactgcatgcataata

SEQ ID NO: 885191 - DNA, 657 bp, Homo sapiens
agtgaacacttagattgaattgtcatcttggttattgcaaataatgctgcaatgaacatgggagagcaggtatttcctcaacataacgatttcatttgtgttggatatacacccagaattggattgctggatcatatggtagttctatttttaattttttgagaaactgccatactgttttccataayagttgtactaatttagattcccaccaacaatgtgcaagggttcccttttctccacactgttgcccaggctggagtgtgttggcacgatctcggctcactgcagcctctacctcccatgttcaagccatcctcctgtctcagcctctggagtagttgggattacagatgtgtaccacctcgcctggctaatttttgtatttttagtagagatggggttttgccatgttggccaggctgatctcagattcctgatctcaggtgatccacctgccttggcctcccaaagtgctgggattacaggcatgagccactgcacccagcctattttttgtctttttgatcatagcccttctaacagtgtaaagtcatatctcactgtgcatttaatctgaatttctctgatgactattaaatcatattgcactctttttcatatacctgttggccatttgcttgtcttcttctaaga

SEQ ID NO: 885192 - DNA, 635 bp, Homo sapiens
ggagcaaagatttgaaagcatgtgctctttattctgtttgaccctatgctatatatcttaaggattcttacatacagaaaatgcaagacaagaaaccatttgactttataactaaagcaattatataactgtgttcttttctgtaataacaattctccattttcctttgcatacaaaccaatcattacatgttaaattattgttgttcaccttctttcatgggacctgctagccatttattatcagtttatgtaaacagtacttcttaggcccataatatgtactatatagtgtttgtgttttttttttaaagttatgtcaatggaaagaaatatgtagacctgamaattatagtaagaatagaatgttggtatatttgaaaaagggaagagacatacatagcaatacattaataatgatcagattgatgaactagagacggtgaggactaaaatacagttttctaatttccacacgttctaggatgagcatgtatttaaattaataattagagaaaataaaaggcattattttaaaagaagcggacgtagacacaaatttgttacagacatttaaggattacaggctctaagaaacttttatagttccacagcatcatcaaaaaagagagtagg

SEQ ID NO: 885193 - DNA, 618 bp, Homo sapiens
atgcacacacacagagacatcaaccatctctaatttgttggcacccaccagggataccttgggcatctgaagtcagtctccatgtctgtgggtctcgtgtaaccataactacttggagttttttaaaactgcattatttctttgttcctcagtgtctgacaatgcctgccaggatgggcactgatgaatatggttgaacggaactccaaggaccacccaggttgatagtagtgaggtgaggggttcacagcactggcagtggtccccagggcttcttcccagcttgtacgtggggttgggggtcctttctttagtctctcagtgatcagactgggcaaactctctgataagcaagacagggcayctaccaggagtcttggcaacactagtgtgtggctgcccagattagcatggaataagacacattctatttagaaatgtcagcctttttaacttagttgatgaaggttgaaggagaggcagcttcaggtgatggaaagaaaagtctctgagaggcaggacacctcagcctcagctaccccgtgagcagtgatttaacctctctaagcctcagtttcccacttggaatatgtgccaagggaggttcgagttttgagc

SEQ ID NO: 885194 - DNA, 618 bp, Homo sapiens
atgcacacacacagagacatcaaccatctctaatttgttggcacccaccagggataccttgggcatctgaagtcagtctccatgtctgtgggtctcgtgtaaccataactacttggagttttttaaaactgcattatttctttgttcctcagtgtctgacaatgcctgccaggatgggcactgatgaatatggttgaacggaactccaaggaccacccaggttgatagtagtgaggtgaggggttcacagcactggcagtggtccccagggcttcttcccagcttgtacgtggggttgggggtcctttctttagtctctcagtgatcagactgggcaaactctctgataagcaagacagggcacctaccaggagtcttggcaacactagtgtgtggctgcycagattagcatggaataagacacattctatttagaaatgtcagcctttttaacttagttgatgaaggttgaaggagaggcagcttcaggtgatggaaagaaaagtctctgagaggcaggacacctcagcctcagctaccccgtgagcagtgatttaacctctctaagcctcagtttcccacttggaatatgtgccaagggaggttcgagttttgagc

SEQ ID NO: 885195 - DNA, 673 bp, Homo sapiens
gaggaggtgcagatgttggatgtttctgtattagaaagaaactagagcaacaacagatagaagcagagcattgtcccatggggggtaccacagtgtctgggttgccctacacaaggatgggtggacatgacccacttggctttcccacctgtaagggctttacccmtgaccctcaggatacctttgccttgtggggcctgccctcagccgctttgtttttcctctccagccaataccttggaggctttgcatattttagactaccttctggtgactgaaggtcccctgtctgtgttcttgccccatccctatcttcctatctgtgccccctgcacaccagggtgggccactccttcctatccctttgcagataacacatccacttcccaatgcttggcccagttcctggcccagcaccctcactctggcccaccagcagacttgctttactcctgaaacagctcccttgaagaacacccatctggtcctaaatactgttgccaaaatcttgttttcagccatccttctagaagccttggtgccatttgcacttgtgacccttcaccattctcaaggctcctcctccaattacttttgagacacatgttttcctcccttcctctcctgtgagccttggggaggcccctgggatcctcttgtaccacccactaga

SEQ ID NO: 885196 - DNA, 673 bp, Homo sapiens
gaggaggtgcagatgttggatgtttctgtattagaaagaaactagagcaacaacagatagaagcagagcattgtcccatggggggtaccacagtgtctgggttgccctacacaaggatgggtggacatgacccacttggctttcccacctgtaagggctttacccctgrccctcaggatacctttgccttgtggggcctgccctcagccgctttgtttttcctctccagccaataccttggaggctttgcatattttagactaccttctggtgactgaaggtcccctgtctgtgttcttgccccatccctatcttcctatctgtgccccctgcacaccagggtgggccactccttcctatccctttgcagataacacatccacttcccaatgcttggcccagttcctggcccagcaccctcactctggcccaccagcagacttgctttactcctgaaacagctcccttgaagaacacccatctggtcctaaatactgttgccaaaatcttgttttcagccatccttctagaagccttggtgccatttgcacttgtgacccttcaccattctcaaggctcctcctccaattacttttgagacacatgttttcctcccttcctctcctgtgagccttggggaggcccctgggatcctcttgtaccacccactaga

SEQ ID NO: 885197 - DNA, 673 bp, Homo sapiens
gaggaggtgcagatgttggatgtttctgtattagaaagaaactagagcaacaacagatagaagcagagcattgtcccatggggggtaccacagtgtctgggttgccctacacaaggatgggtggacatgacccacttggctttcccacctgtaagggctttacccctgaccctcaggatacctttgccttgtggggcctgccctcagccgctttgtttttcctctccagccaataccttggaggctttgcatattttagactaccttctggtgactgaaggtcccctgtctgtgttcttgccccatccctatcttcctatctgtgccccctgcacaccagggtgggccactccttcctatccctttgcagataacacatccacttcccaatgcttggcccagttcctggcccagcrccctcactctggcccaccagcagacttgctttactcctgaaacagctcccttgaagaacacccatctggtcctaaatactgttgccaaaatcttgttttcagccatccttctagaagccttggtgccatttgcacttgtgacccttcaccattctcaaggctcctcctccaattacttttgagacacatgttttcctcccttcctctcctgtgagccttggggaggcccctgggatcctcttgtaccacccactaga

SEQ ID NO: 885198 - DNA, 635 bp, Homo sapiens
ttgatcgtggtccctcgcttagaggaccatttgtcttgtagctttattccttaggctgtctcgttcatcttctttctaactccagcatgtatgtaatctattatgagtccagcaggttaagacatttcctcatccatattgtagctttgcaaaaagtgagtatgcaatgtaatcaagtaagttaagttctgtkaacacttctcaagggaattctacttatgtctcagtcttccattgcatctttgcagagattcctggtgaacatttactgaaggaaatgagtgtggtcctctcatgttacaatcagtaagctgaaaactgctacttgattgtgccatcagatcataatgaaaatcaaatttaccacagctttgtacaatttctgaaaagaggaccctattcgcctgttcactgcaacacagcagcatcaacacaaaccccaccagacagagaagttcgaatgatttcataaatcccattgctgtgggaaaaacagggcctcatgctaggggtctgtggcctcaccaattgcataggtcaagatggtggtggggaggaaataaggtaagagctgatgaatatatgactttcagaagctacataagccaagggacagtagacttggtagagtttaa

SEQ ID NO: 885199 - DNA, 563 bp, Homo sapiens
aaaactgtaagtcagaccattgtaagtcagaaactgtgtgtatggtagcacctgcttatccacgatttctcttttcatggtttccattacctagagtacagtacaataagatattttgagagagagagagagagagtacattcatacccttttgttatagtatattgtcataatcattctattttataacagttaatctcttcctgtgcctaatttataaattaaactttattatagatgtgcatagaaaaaaacagtatgtatagatgtttctccacttataatgggattacatccttataaactcattgtaagttgaatatattgtaaatcgaaaatccatttaatacaccyaacctgacaaacatcatagcttagcctagcccaccttgaacatgcccagaacgcttacgttagcctgcagttgagcaaaatcatctaacctgaagccccttttataaaaaagtctagaatatcccattactttatgcaatactgtactgaaagtgaaaaacagaatggtttcataccatcctaaaggcaaaaataatcttaagttgaac

SEQ ID NO: 885200 - DNA, 563 bp, Homo sapiens
aaaactgtaagtcagaccattgtaagtcagaaactgtgtgtatggtagcacctgcttatccacgatttctcttttcatggtttccattacctagagtacagtacaataagatattttgagagagagagagagagagtacattcatacccttttgttatagtatattgtcataatcattctattttataacagttaatctcttcctgtgcctaatttataaattaaactttattatagatgtgcatagaaaaaaacagtatgtatagatgtttctccacttataatgggattacatccttataaactcattgtaagttgaatatattgtaaatcgaaaatccatttaatacacctaacctgacaaacatcatagcttagcctagcccaccttgaacatgcccagaaygcttacgttagcctgcagttgagcaaaatcatctaacctgaagccccttttataaaaaagtctagaatatcccattactttatgcaatactgtactgaaagtgaaaaacagaatggtttcataccatcctaaaggcaaaaataatcttaagttgaac

SEQ ID NO: 885201 - DNA, 635 bp, Homo sapiens
catgtgttgtgggagggacccagtgggagatgattgaatcattggggctggtctttttctgtgctgttcttgtggtggtgaatgcatctcatgagatttgatggttttgaaaatgggagttctcttcacaagctctttttttgcctgctgccatccatgtaagacgtgacttgttcctccttgccttccaccgtgattgtgagacctccccagccacgtggaactgtgagtccaattaaacctttttactttgtaaattgtccagtctcgagtatgtctttatcagcagtgtgaaaatgaactaccataatatgcaaacacacaattcatgttatgctcagattcttccatagtctatcaatakcactgacacaaatttatgtttccaaaacaagacttagagcaggactggctgtgtatctattagtggctattcatgggcagggcaagtcatgaaccactgtacttgttccaagtcacctagctggtcattggcaaagccagggctgcaacctagctctctagatgaagagctgaactatcttaccaggccactatgctatcatatctgtttgtgaatacaagggataaagtgcagaacatggaagtgctttgaaaggtataaagtgatcaat

SEQ ID NO: 885202 - DNA, 635 bp, Homo sapiens
catgtgttgtgggagggacccagtgggagatgattgaatcattggggctggtctttttctgtgctgttcttgtggtggtgaatgcatctcatgagatttgatggttttgaaaatgggagttctcttcacaagctctttttttgcctgctgccatccatgtaagacgtgacttgttcctccttgccttccaccgtgattgtgagacctccccagccacgtggaactgtgagtccaattaaacctttttactttgtaaattgtccagtctcgagtatgtctttatcagcagtgtgaaaatgaactaccataatatgcaaacacacaattcatgttatgctcagattcttccatagtctatcaatatcactgacacaaatttrtgtttccaaaacaagacttagagcaggactggctgtgtatctattagtggctattcatgggcagggcaagtcatgaaccactgtacttgttccaagtcacctagctggtcattggcaaagccagggctgcaacctagctctctagatgaagagctgaactatcttaccaggccactatgctatcatatctgtttgtgaatacaagggataaagtgcagaacatggaagtgctttgaaaggtataaagtgatcaat

SEQ ID NO: 885203 - DNA, 652 bp, Homo sapiens
aaataccatttgacccagcaatcccattatggggtgtatacccaaaggattataaatcattctactataaagatatatgcacaggtatgtttattgcagcacgattcacaatagcaaagacatgaaaccaacccaaatgcacatcaatgatagactggataamgaaaatgtagcacatatacaccatggaatactatgcagtcataaaaaagaatgagttcgtgccctttgcagggacatggatgaagctggaaaccatcattctcagcaaactaacacaggaacagaaaacaaaacatcccatgttctcactcataaatgggagctgaacaatgggcacagggaggggaacatcacacaccagggcctgtcagggggtgaggggcaaagggaacgatagcattaggagaaatacctatgtagatgatgagttgatgggtgcagcaaaccaccatggcacatgtatacttatgtaacaaacatccacattctgcacatgtatcccagaacttaaagtataattttaaaaaaagaaaaaaaaaagaattacaccaaaattaaaaaaatgtaaaaagcaattttcatgtatacattttaaattttatttatattatacatttttatatataaataaatatatatttttattata

SEQ ID NO: 885204 - DNA, 648 bp, Homo sapiens
gataccaggaaagctttttacaaaatccaatacccattcataatattttaaaaactctcataaaattaataaaaaagggtgctttctgaaacctaatttgaaaacatccacaaaaatcccatacctagcatcttacttaatgatgagagactagctacttttttttctaaaactgagaatgaaagatagatgtcctctcttaccactcatatttccattgtactggaatccctaactagtacaataatagaaaattaaagaataataacagagaaattaaagaaaagcaacaaataaaacagtctttattcacataaggcatgattgtaaatctcaaaaatttcaaaatttctaccaaaaacttccagaaactaatgagtgaatagagcaaaactgtaaagtacaatatcaacatgcaaacgccaattgctttcttatatacccagaatgaacagatggaattggaaatttaaaatggtatttaaaratattatttaaaataatatgaagagagagaaatatttagtatatagctaacaaaacataacaggaactgggtgtagaaaactacaaattgatggtgaagaaaataaaaaatataattatagcgagatagtccacgttcatagattatatatactgtagaga

SEQ ID NO: 885205 - DNA, 590 bp, Homo sapiens
atcacttgtactgtattcccttcattagaagtgagtaaagaagtccagcctacgctcaaggagaggggattacacatgggcatggatgctaggaggtacaagggatcattgatggctatcatagaggttgcctatcacagttggtgaccatattttccattttaaatggatgccaagtttatttgccttcattcaatcctagtaaggttatttatatgagacgaaatgcttattttgaaaaggaagtctggtttattatacagaccatagtyatcactagatgtaccatcttggttagtgatcgttagctggcttgtttggaggcaatgggaggctatgttattaggcagggagatgtgtgagctgggctcttaggactttggacagaaatctaccactttctttatctgtagaataggcttgaccatgagaaatttccctggtaatctttggctaaataatggaaacacgtgctttaaaagtgtcagaatagggtagagtcacctctagaaatagctagtatcacttatttcatacatatgctacatgtcttttgcattatagtgagaaatttactatgtgtgggtatt

SEQ ID NO: 885206 - DNA, 584 bp, Homo sapiens
acacacacacacacaattcaaaaatgaaatagggagtgaaaaaagttttataaataaaaaagattaagagataaagaatgtatgtaagaaaatctaaataatatttaattgaaattttagaactaaaggaatgagagaatgggttatagagattttttaaagagatagtggttgaaaatttaaaatatcaatccattcaagaaatttaacaaattacaggcaagataataagaatcatcccctcttatatatttcataaaacaaaacaaacaaacaacagcaaccmagaaacaaaagtaaaataatggaataaaatagagggagggagggagtagattactttaaaggtaaaacaggctttccaatgattcttcaatacgtctatgtagccagaagacaagaaaatggctggcaacctagaattcagtatttaaccaaagtacccatcaagaaataaagaaatatgaaaacattttagacaacctaagagagtttcttttgagcagatctttttaagacatttcaatacataacaccttgtaggaagaatgaaagtgatcccagagagaagaaaatgaaagtaa

SEQ ID NO: 885207 - DNA, 584 bp, Homo sapiens
acacacacacacacaattcaaaaatgaaatagggagtgaaaaaagttttataaataaaaaagattaagagataaagaatgtatgtaagaaaatctaaataatatttaattgaaattttagaactaaaggaatgagagaatgggttatagagattttttaaagagatagtggttgaaaatttaaaatatcaatccattcaagaaatttaacaaattacaggcaagataataagaatcatcccctcttatatatttcataaaacaaaacaaacaaacaacagcaacccagaaacaaaagtraaataatggaataaaatagagggagggagggagtagattactttaaaggtaaaacaggctttccaatgattcttcaatacgtctatgtagccagaagacaagaaaatggctggcaacctagaattcagtatttaaccaaagtacccatcaagaaataaagaaatatgaaaacattttagacaacctaagagagtttcttttgagcagatctttttaagacatttcaatacataacaccttgtaggaagaatgaaagtgatcccagagagaagaaaatgaaagtaa

SEQ ID NO: 885208 - DNA, 654 bp, Homo sapiens
gccatttgagggtcccgcaatttgtgttttaacaagtcttccagctaattttttacatgctaaggtttgaaaagccttggtttgaggtaatattgatgcctgaaaaagtaatgtgtatgtggagtcaaggagagaaagagaacaagagtaaacttggaattcttcctatacttcccattattagctccaaattctgtttttaggtcggtaattgatgttattactcaaagaaagakgttcctttgttaaagcagctgaattgatagagatattgatagattgaaataaaataatatactaattacatcatcaatgcacttctattattgtgaaaagtagagattatcaatatgaaaatttaacaaaattaatcatttaaatgtgatcagctagagtagaccaaagtttattttcaactgtaagttagtatttggatgggtggactcttactccagagactggagaagtcaaagacatccagactttttaacctatcacctcataagcacttcaagtggaactgcataggaagaactagaggaaggataagagtagtcacaactaagcataatgaagacatggtgcaaacatagtcaactagttgatttctaagactccttccaaaacataagggtccagttttatggatcatag

SEQ ID NO: 885209 - DNA, 540 bp, Homo sapiens
agttttatggatcatagtggggagatataattttagaaggcccatagattgctttatttcaaaaattgcttcaattcctcatgtctggcaggaggaaattgccattcaaaaagttccttgcagagggttccatggcacagccacactgagaacaaggttcctggtccccatgttgtgccaaaggaaaaaaaaaaaaacacaacaatgtaatttgttcctattagtaagtaaataagtgataaatgagtgcttgaagctgtaraaaacattttggtgtctttgaaatggcccatcattgtctctatttaaagagtctaatctgtcagatgaatcctcccaattagaaagacccaaaggagagccttctttgcattgaggttgcctatgagtagctctggcatgaagttaggtgagtcatttagtaaggtgagccatcaatttcctcatctatttttttcttaagggagtggggagaggaaaatatcccaatcaactacaaagaaaaacttaacactttgaaataagcaaaagagattactg

SEQ ID NO: 885210 - DNA, 501 bp, Homo sapiens
tgtttcacttaaagtcatagtgatatggttagactttgtgtccccacccaaatctcatcttgaattgtggttcccataatccccacctgtcatgggagggaccaggtagagagaattgaaccatggggctgtttcccccatcctgttctcatgatagtgaataagtctcgtgagatctgatggttttataaagggcagttaccctgcacatgttctcttgcctgccaccatgtaagacatgcctttgcacctcgttcgccttctgccatgattcrttgtctccccagacgtgtggaactgtgagtcaattaaacctcttccctttataaattacccactctcaggtatgtctttattaacagcatgagaacaggctaatacacatagtttccaagaatttattgacgaagttaagtaaggacttaaactctatgccatttatgcattgtctttggatactttctcctaaaagggctgaatcgaaaagttgtgacaaagaac

SEQ ID NO: 885211 - DNA, 501 bp, Homo sapiens
tgtttcacttaaagtcatagtgatatggttagactttgtgtccccacccaaatctcatcttgaattgtggttcccataatccccacctgtcatgggagggaccaggtagagagaattgaaccatggggctgtttcccccatcctgttctcatgatagtgaataagtctcgtgagatctgatggttttataaagggcagttaccctgcacatgttctcttgcctgccaccatgtaagacatgcctttgcacctcgttcgccttctgccatgattcgwtgtctccccagacgtgtggaactgtgagtcaattaaacctcttccctttataaattacccactctcaggtatgtctttattaacagcatgagaacaggctaatacacatagtttccaagaatttattgacgaagttaagtaaggacttaaactctatgccatttatgcattgtctttggatactttctcctaaaagggctgaatcgaaaagttgtgacaaagaac

SEQ ID NO: 885212 - DNA, 576 bp, Homo sapiens
gttggtaggttattaattactgctttaatttcagaatttgtattttgtcttttcagggatttgacttcttcctggtttagtcctgggagggtgtatgtgtccaggaatttatccatagattctatattttctagtttatttgcgtagaggtgtttataggattctctaaaggtagtttttatttctatgtggtcagtagtaatatcccctttatcattttttattgtgtctatttgattcttctctctcttmttccttattagtctagatagtggcctacctattttgttaatttttcaaaaaatcagctcctggattcattgattttttggtgggtttttcatgtctctatctccttcaattttgctttaatcttaattacttcttgtcttttgctagcttttggattagtttactcttgcttctctagctgttttgtgatgctagggtgtcaatttgagatcaatctagctttcaggtgtgagcaagtagtgctataaattttcctcttaacactgctttagttgtttcccagagattctggtacattgtctgtttgttctaactggtttctaa

SEQ ID NO: 885213 - DNA, 625 bp, Homo sapiens
tgatgctatctcatcattctgcacactagttgatgcagtttcttcatagtgtcattggtctttatattttggtgtgttttgcagtgactggtaccaacttttcctttccatatttagtgtttttttcaggagctcttgtaaggcaggcctgatggtaacaaaatcactcagcatttgcttgtctgaaaggattttatttctccttcacttatgaagcttagtttggctgtatataaaattctaggttraaaattttttttttaagaatgttaatattggcccccaatctcttctggcttgtacagtttctcctgagatatctgctgttagtctgatgggcttcccttagtaggtgacctggccttactctctggctggctttaactgtttgttcttcattttgaccttggagaatctgatgattatgcattccggtctgatcttctcatggaatatcttaatggtgttctctgtatttcctgaattggcatcttggcctttcttgctagtttggggatgttctcttggataatatcctgaactgtgttttccagcttgtttccattctccctgtctcctctggtactccaatcagttgtaggttcagtctttttatggagtcctg

SEQ ID NO: 885214 - DNA, 625 bp, Homo sapiens
tgatgctatctcatcattctgcacactagttgatgcagtttcttcatagtgtcattggtctttatattttggtgtgttttgcagtgactggtaccaacttttcctttccatatttagtgtttttttcaggagctcttgtaaggcaggcctgatggtaacaaaatcactcagcatttgcttgtctgaaaggattttatttctccttcacttatgaagcttagtttggctgtatataaaattctaggttgaaaattttttttttaagaatgttaatattggcccccaatctcttctggcttgtacagtttctcctgagatatctgctgttagtctgatgggcttcccttagtaggtgacctggccttactctctrgctggctttaactgtttgttcttcattttgaccttggagaatctgatgattatgcattccggtctgatcttctcatggaatatcttaatggtgttctctgtatttcctgaattggcatcttggcctttcttgctagtttggggatgttctcttggataatatcctgaactgtgttttccagcttgtttccattctccctgtctcctctggtactccaatcagttgtaggttcagtctttttatggagtcctg

SEQ ID NO: 885215 - DNA, 663 bp, Homo sapiens
acccatcttctgaagcctacttttgtcaatgcatccatctcatcctccatcctgttctgtgcccttggtggagaaatgttgtgatcatttacaagagaagaggcactctggccttctgggttttcagcattcttttgttgattctttctcatcttcatgagtttgtctagtttcagtctttgaggctgctgacccgtgaatggggtttttgtgggggctttttgttgttgttgttgtggttgatgctcctgttgttgctttctgtttttttttttccccccagtggtcagttccctcttctgtagggctgctgtagtttactgggggttcagttcaggcyctattaatctgatttgctcctgtgcctagagatgtcactcaaggaggctggaaaacagcaatgatgggtgcctgctccttcttctggcatctttgacctagaggggcaccaacctgatgccagcaggattgctcctgtatagggtgtctgacaactccgattggtgggtctcacccagttgggtagcacagggaacaggacctgtttaatgaagaactttgtcctttagtggagagggtatgattcactggggagaaacacacttatctgtgctgcctggatttctcagaactaccaggatgagaggctaagtctgctgctcc

SEQ ID NO: 885216 - DNA, 683 bp, Homo sapiens
acattttggattgtgatgttatgaacggacaagtactccctcctttgttgaactgtgaggggtagagactgtggggtcccacatcagtcaaggaagactctagatttgggggagaaataaaggacaggtgtttttcaggtaaggtagaaggcacagacaactaggaagagatttccaagtagatatagcaggaatgacaatacatggcctgggaggagccagtggatccgtctagaaatattgatataaattattttcacatgtatcctgcagaaagcaagtggtcagaaagtcaagccctggatatctcatagtttgagaggaaaaggacacaaagaggaaagagatgactttggaaatgagactgaggaattagaatagtgtggtatttctagaaagccaagagagggcagagtcccagggtgtcttgaagctgaaagctgcagagaaaggaagcctgaaagtgctgcatggatctgctcagagtgcacyggatcagcatagctcatcagaaatgcaggtttttggggtcccaccttagacctactcatttaaaatctcccaaggtgaaggcctgggtatctgcgttcacatgttctcccagagattcttatgcttgttcaaatgtgagaagctctgctgtccaatacatcttgtcaaggttttgtctcatagcatatcct

SEQ ID NO: 885217 - DNA, 597 bp, Homo sapiens
aaagatcacttcttaaaaggagcattttgtttaatccgctgagacagaaatcaagatgttctatcttatttttccctgtatcgttgacgatttttaactttcagtgatccctcaactgctttctcatctgaaaaatgagttgatatttaccataataaataagtgaaataaagagagataagtaagtatccagagagataagattaatgactaggttactaccactatttttcctgtataaaaaattttggcagaacttgagggtcaacagtcagagtcttgtgaaaattactgagaattcctgaacagttataattagttcagtaacatgataaaatgggtgttttctaaagatcattttctcttatttcagctgaattaattgctttgtggagataagaaaaatatctttggccacggtggcagtattactttcctggrtggaaattttattctttaaaatttgaaccataagatgctttaatttagaaaactggggccccaaattacttagggagctccctttaccacatcgtgttttaattattactaataagatcttgattgttgtagatttgtgaatatttaaaattatat

SEQ ID NO: 885218 - DNA, 544 bp, Homo sapiens
gtcaggaggaaattgctgagtttctgaagcacagccagaaaacctgaacactagggacagactctgatcctttctcctccaactcttccaaacgttttataagcacccaattttctgaattaaatttccttctgctggggatgtctggagtgctttccatattttggactgactgcatcctggctgatakagcagataggaaatttgtccaagatcacaagcgaaaaagtagaaccaggagtcaaacctaggtgtgtctgattccggagcttgcattaaagaaaacaaaaccacaaaacttaaaataataaaacatttaaaaaattgtggtaaaatacacataacataaaatttgtcatcttgaccatataaaataaactttgccatcgtaaccatttctaagtatacagttcagtggcattaagggcattcacactgttgtgcggccatcaccaccatccatcttcagaactcttttcatcttgcaaaactaaagcattgtacctgttaaacaaaaactctttattctccttccccaccaact

SEQ ID NO: 885219 - DNA, 638 bp, Homo sapiens
ggcctttttcaccacggtttttgtgtgcggattttttctgcacacttcaaagttctttattagagagtcaggccaatctcagaggtaaattattgcagagaaggaacaaagattggagagatgattaacctcgactttctcttgtgcttttcctgcatatggaaagtgatctctacagacacctcttcctttctgaaccttgctttcctccctcggtttctgtccctgcctacacatcyccatttttccaacattgcacccagctaccctcctgactatctttggaaaattctgctccttctgccgtgtggggtttaagctccggagctcaggcttggggtagacagactccagctgtggttaagagaatgaattggaggaagacaacatggagggagagagaccagttaggggacattgtgattatctgggatggcaatcatggcacagtgggtgcagagagtggccatgtttgagagattttcaagaggtcttttggaaggtgtgtggcttggacctatggatggacctacaatggacataggcactgaaaaaagaaacacaggaggcaagatggggaggcagagtggggctgggggaagtcacagtgtggaacttggagtcacacaacttcataa

SEQ ID NO: 885220 - DNA, 618 bp, Homo sapiens
tgagagggctctggtttgttcaaggaggataaggtggcttccctgcagagggaatgtttcatctgggatctcaaaaatgagtaggggctggggacagtggcttgcacctctaatcccagctacttgggaggctgaggcaggaagatcgcttaaggccagaagtttgagaccagcctgggaaacatagcaagaacactccctcttaaaagaatgagtaggagttagcaagatgtgagagtgtggagaggcaggagcaagaaatagtccagagagcaccaaaagcatatgcaaaggccctgggccgaagagatcctgggtctgtccggagaacagtgaaaaaagtctgggtggtgtcttgaagttggagcacaattagctactgaaatattttaagcasaggaggggacataatcatgtttgaatttggaaactatccttctggctcctacacaagggggtatgcttcattgtaactgctgagagtaagcctggcaagaagggactgggagctgaatctcggcaagtcaattccttttgagaggcctcaatttctccatctctatagtgagtttgtagtcaatggtggatactttccatctagtttaaatgctctgtggc

SEQ ID NO: 885221 - DNA, 584 bp, Homo sapiens
tcttctgttcctgggcagaggccgctgggaagcgcgtctgattgatattgctactgacagtcaaagcctttaaatcattcccacagtgcgtctctgggaggtggtaagccggcagtgttttgtctgtacccgagaaagacaggggtttctaaacaaatatatacattctcagaaatccaagtgattgtatttctccattgatccatgctgagtaagtgtaaagcttgcctgstgtctgcagggaatcacagagtgagcgggctgtgctgggtgaggaaggaggagggggctgaaactggcccaatggggcccaggctccaaggacctgaacaaagtggcttacttgtagaagggaaagggattacttcctgttgggagaatcagagaaagctttatgatgcttgagcatcatctcttttgtgaaacccttcctgaccacctctctcatccctaaagagaagtgacagctcccctcacatgtgagctccactgtgtatggatgtctggctcagcacctagaactcttttttatttttattttactttaagttgtgggatacatgtgcagaatgtgctggtttgtt

SEQ ID NO: 885222 - DNA, 650 bp, Homo sapiens
ttcatttccaagccacagttgcccagggttcctccctgtctcgtagggaagtgacctccctcacgtgcctgagaagatgcatgtgatgatggcgtgccccaggcaaacaaagggctcttgcaaaacctatgattctctccttgttgcagaggaatgaaagggagggaggaagtaggcacccctccttcttgcatggcccacaaggggtcttaaggctatttttatgaagatggactctgggtgattcagggactcaccctaaaagcacttctttcttgctttccttttccttctcctccttctccttcctccttttctcttcctcttcccttttcttttaataacataccttctatgcattttmttgaactttctcccatagaaggtaaccctcagaaaacagtgaactactctaggctccaaggggcttagtaggagagcttgttcattctgtggtttgcaccagcctggcagctggagagcacaagacaatgctcccaggagggcggtaaggcataaacctggttcacagaactcagagaggcttcagagacctggaactaataggctataatgtcaatgagaagttcaggcccagcagaggaggtgagcaagatgggaccctgctcttcctcctattggtcagactc

SEQ ID NO: 885223 - DNA, 514 bp, Homo sapiens
aagagcttaaaaactgccccactttggtcagaacccttatctatttcttcctggttgtgaggatgtatgtgtgtacttcaaagggagaatcgagggtgcctgttagtgttctctatccacccatcttaaaaccagcaacagtttagcttctgtgactgggtggtattcctcatcagatttagccactatcccaaagtggcagcaccctaggaaaggatgccccaggattctttgagtccaatcacctgcccygtttacctgttggctaggccaggtgtggccaggtatctgtgagtcgggccaacccattgtgggtctaggactggagtgctgtaggtttatttttttcctaaaccccacagacccataggctgggtacaggcaggtggacatgagaaatctgcccatctgtgaaaagctgtggcctttgggatgctgtgtgtctgcctgccagccatttgaccttcagggctagaaccatcccatccagctcctatattaaaatttctcaaat

SEQ ID NO: 885224 - DNA, 679 bp, Homo sapiens
ctgaaggcctgagagcccctggcaaatcactagtgtaagtccaagaatccaaaaactgaagaacttggagtctgatgttccagggcgggaagaatacagcacaggagaaagatggaggccagaagactcagcaagtcggctctttccrtgactgcttttatgctggcagctgattagatggtgcccacccagactgaaggtgggtccactgactcaaatgttaatatcctttggcaacaccctcacagtcacacctaggaacaatactttacatccttcaatccaatcaaattgacactcaatattaaccatcataataattattattatttatggcttttctgtgttttacttattttacttattaaagattagttaacttattgtagttccccataagatttcactggaaacaaagtttgctgccaacaagcacaaaatataagtttgtaactatgatcatggacaggtgtttttatgtgttttggcatttgtgaaatggtgggtgggcaaaatgtgggaggctgtgcttatctaaagcctgcagggtcctagaaccctagttcactgggcattaaggttcatggaggcgtagcaaagatctgcttggatttggagaaagagtttctcagtggttgtgtttcactctttgaaataacataaaaaatccctggttctt

SEQ ID NO: 885225 - DNA, 612 bp, Homo sapiens
caactctggcagtcatctgtaactcgaccagttaacgtcccgaacgtgcctgttcgcggagatattagcaaacgtttcaaggatgtggctgtcagatgtcattagccaacgcttgctcacccaaccatttgcctaactgggaggagggcatggccacggcgtataggcgtagaatttggggggagggaggggtgccacagtttgttccctgtaatagccacatgtcccgaattgtgcagacatttatcaaatgactagagaaaagctggcacatgaatgctggggtacagagacgtggaaaggggagcttctctgagactgaractgaacatgcaagtcattcaagtcttctctagtgtggaaactccccaaaccagacaggtctactgcgcagaatagggtggaggatcgagtccagtcactgagccctagcacttgccatgtgaaccataaggccctgaacactggaaattcagcgtccggactctcgatcagatgccctagagctcagaagcacctgattgcgcggaaggctggtggtggttacttgggcaaagagagtgcgactcgaaactcgagtttctcggatttaggaaatccgatctttagaca

SEQ ID NO: 885226 - DNA, 593 bp, Homo sapiens
agaaaaaaaacatattctgttgagcacatgcatgatatattatacattcagacattctaagggtttatgagtggtggtagagagagtaattatggactactgttcacagaaaaggcaagagaaagacrgaattgcattttaatgtcacaaatagttcaaagacaagcctgagacatttttagaaagggaagaatttgagcaggaaggaagatacagagccgtccccaaagagacttgctcagagcagagagccctccagatcatactctggagaatggtcttagagttagaaggagtcattgaagacctggagcttaaatttcctttctgctgaatgtctttgtggaaatactgcttctttttttctgtgtttgctttttctcttttaaaagaaaaatatcagtcctggctattcattccttgtcagagtttttttaatatataatgcccaacaaattattggtattccacgtttcttaagtcaaacctatttcagtcaatttctatgtaatcaattccattccaaaacaaggtctacatttctaaatgcaagcatcaatattggaacaaaaaaaattgctcttcttgttatt

SEQ ID NO: 885227 - DNA, 623 bp, Homo sapiens
ttgtcctttccagaggtaggagacccacttttctggtcccataatgttctgtgtagatacctattattatacttatcacattatttcacagctattgttttcattacatagtgattttcttgacagcaacaactgtgttctcacatttgtcaactcaggacctagtaaatagaaggcactttatatatgcctgctaaattaaatatgaactaaatttaatattttaggggcaagaattctttctctagctcctaaaacaatatcataaaaaggctacttcttctacttgccttggtggaatatcaatatttccattctataactcttgcactcagggtttataactcggtgaagagttaaatttgatctacrtagtttcatttgattaaaataattttacataatagtgggggagttgaaatgagttggaatggagtagaaaatatgtttctgaattttaactgacacaagaaaccaattttcaagccaaataatatcctttggttttagtgacattttgtgccaattctgagtcattgcatagctaactagaagcttcggaatatttaaaaaatatgcatgctgtatggatggtgggatgtccagaaagttgtaaccttgaa

SEQ ID NO: 885228 - DNA, 631 bp, Homo sapiens
cataaaaggagaataagcaaagtctgtctttataagtgatacaggtagtgaattacttaaaggagatttatagcatatgtaattacatagtttaaaccattttggtagcattctgtgtacattgttgtaaattttaaaaatgtcagatatgtctttgagtctacataaactgccaaaatcaatccaggggactattgttattaattaaatacctgtgttttcagaggcaaacacatgtagtcgtaaaaatatatgacttcttgtttctaagaaaaagaattcataaaacctttttaatttaatttaattaatttttttcaaaacattatcatgtgcctaattttgaaaaaagaagcaaaagggttattttatttcatttttaaagataagtgacatacacatttattaatgtgaatgaggggctgrggtagggaaaatcatagagtaattatctcatctacatgataggggtacagatagtaatataccaaaaaggttattgtagattggatgtatccattttcattaaaattaaaaaagaatttttaaaaacctagattttgaaataagaatgaaatgacttcatttaagtaaataacatggccagcattagaaatgggattctgcatta

SEQ ID NO: 885229 - DNA, 542 bp, Homo sapiens
gtattacttggaaatggttcattctgtttgaggttggcttttacattttatttatttttattttttatttttttgagacagagtttcactcttgtcacctaggctagagtgcagtggtgtgaactcagctcactgcaaccttcggtttccgagttcaagctattctcctgcctcagcctcctgagtagcttggattacaggtgcgtgccaccacacccagctaatttttgtrtttttagtagagacagggtttcatcatgttgtccagggtggtctcgaatgcctgacctcaggtgatccacctgcctcaggctcccaaagtgctgggattacaggtgttgagccaccatgcccagccagcttttacattttattaaggtgggtctagaagagcttttactataaggttaatatagttctactactaagatgatacccctctgaggattctaatcaatggtgcatgatttaggaaattttatctggtggaaatatcaacatttttcagtcctacatcggctccaagaatatgcacagcattc

SEQ ID NO: 885230 - DNA, 421 bp, Homo sapiens
cattattgcagtttcatattgttttatgactctattgttatcttgcctctatgtctacttagattctgcagtagcatataaaaagtacctggtttcatgcctgacatgtcatagtgctcaataattgctagattttacaagttaaaggaatcccatatttataatamgcacaaggtattttaaataatagaacaaattatcattaaagacaaaattcaggtacacagaacggtcaaacctgaaaagtagcatccgtatagcacaatgcctaaacagctaacatttattaaacacttactaagcctaaaatgtgtaagaaaataccaaaaatacgtaaggcctgtatgaggaagaggggtggagagcactgccagaaagccttaaatgcactcaggcctctaggaaaggcagtgtccggtgc

SEQ ID NO: 885231 - DNA, 596 bp, Homo sapiens
acttcataaatgccaaaagggatgagaagtgtctattctccctccaaagcagtcatgctgtgtgccaaactgataactgttaaacacagctgcagagcaaatgtgcagttttggtcctgtaaatacagtgttcacacatcaacctgcgctgtgagtgatgtagaattcagaacaaccgactgcagattggctcatgttacatgagtattatagatgagtgctgtttcacccagcacagcttgagcagattttgatgggccatgaaagttccctctacctaagaatatatactgaaactctaaaaaccccaaatattgataaatttattggatcaacatctggttgaagtggtttgcttttaagctccatagctcacaagaataaaagtataaaggtcattttgtgtgtctgagarcacatttatggaatggttaacacaaaaatctattatttaatgtcatccctgaagaaatatatgctgtctttattataaatgtttttcctttaattccagtaggtaaaagtgcaaaacaaacctataagcaaatctaagctaaaataaactctttttattttagaaactcaatttccatgga

SEQ ID NO: 885232 - DNA, 716 bp, Homo sapiens
agaaatattacactatgcgtaaaccaagctgaattgctttcacaagtgttaagaagtatcatatagtaaaaggtttgtttgttttttctacaagcactccattttcacagcaagagtggtacagaatacttaaacaaggaagagagtattcatggaagatatagtatgtagctctttgatatactaatgcataaaattcaaaatgattaaactatagtacatgtggagctttttacaatggcaaggtggtggttacagaaagcatggccctrgggtatcagtctctagaaagcaaccaccacccttctatgtgtgttctcatttttcatttttcttaatcagctctgctgttggctgcttcttagcaaaactggtaaaaacaaaattgtaatcattgaacatagtactctagcaatcaggacatttaaaatcttccatattctaggggcaaagaaggtagtgagtgacatttaaaactatgatttacaagcaaagtggtaaaaacttttcctgcatgaaagacttccacaactttcccaatcaggtcatcacagaaggtctgacttaaggtggttttgaagccaacgtaaaaaattctgtttctggagtgatgtgaatagtctggtaaattccatcctatttcattccattgattaaatacccacaaggatttaacagtgtggcagaacctagtattaggtcactatttccactct

SEQ ID NO: 885233 - DNA, 559 bp, Homo sapiens
atagatcaataacaagtaaggagatgaaacccttaataaaaggtctcccagcaaagaaaagccagggacccagtggcttcactgctgaattttaccaaacatttaaagaaggatgaatatcagtcctactcaaactctttcaaaaagtagaggaagagggaatacttccaaactcattctacaaggcaattattatgctgataccaaaaccagacaaagacacatcaacaaaggaaaactagaggtcagtattgctggtgaacattgatgtgaaatccttaacaaaatactaacaaactgaattcaacaacacattaaaaaggtctttcattatgaccaagtgggattcatcccatagatgcaaggatagttcaacatatgcaaatcaatgtgatacatcatrtcagcagaatgaaggacaaaaaccatatgaccattttaattggtcatatgctttatcaaatgctgaaaaagcatttgataaaattcaacatcattctatgattaaaaaacctcaaaaaaactgggtatagaaggaatatacctcaacacaataaaa

SEQ ID NO: 885234 - DNA, 624 bp, Homo sapiens
ggcgaagtgggagcaggcacatcacatggccagagcaggagagagagagaaagagagagagagacttttaaaacaccagatcacctgtgaactcagagcaagagctcacttatcaccaaggcgatggcccaagccattcttgagggttctgtcctcatgatccagagctcccaccaggccccacctccaacattgaggattacaattcaacatcasatctgggcagggacaaatacccactttatatcagaaggcatcagtaagctcaactttgtcagactatagtttggcagatttgtcctgttggtattgggctaactgggttaggacaaagaggcatgaaaatctagttaagtttgatgccagtgaagtataatagtcttttgaggcaatgaaaatgtataagaaaagtaggattcaacagcatgatgttatgtgaaccagaaatgccacaaaaatggctcagcaacatttgacccaccactttaattgggatctctgtgtgtgtgtgtgtgtgcgtgtgcgtgtgtgtgcatgtgtgtgtgtgtaaaatgcgcttcctcaccagaaggaatgatagttcctagttgattctaccacctaggacaggaaaaaacaaaacct

SEQ ID NO: 885235 - DNA, 624 bp, Homo sapiens
ggcgaagtgggagcaggcacatcacatggccagagcaggagagagagagaaagagagagagagacttttaaaacaccagatcacctgtgaactcagagcaagagctcacttatcaccaaggcgatggcccaagccattcttgagggttctgtcctcatgatccagagctcccaccaggccccacctccaacattgaggattacaattcaacatcacatctgggcagggacaaatacccactttatatcagaaggcatcagtaagctcaactttgtcagactatagtttggcagatttgtcctgttggtattgggctaactgggttaggacaaagaggcatgaaaatctagttaagtttgatgccagtgaagtataatagtcttttgaggcaatgaaaatgtataagaaaagtaggattcaacagcatgatgttatgtgaaccagaaatgccacaaaaatggctcagcarcatttgacccaccactttaattgggatctctgtgtgtgtgtgtgtgtgcgtgtgcgtgtgtgtgcatgtgtgtgtgtgtaaaatgcgcttcctcaccagaaggaatgatagttcctagttgattctaccacctaggacaggaaaaaacaaaacct

SEQ ID NO: 885236 - DNA, 641 bp, Homo sapiens
ccagactgttttccaaagtagctgaaccattttatattcccggcaatgtatgaggtttccaatttctgcacatgcttgtcagcacttgttactgtctgtttgtttgattatggccatcttagtgagtgtgaagtgggatctgattgttattttgatttgtatctccttgaccatgcctgaccttttttttttttttttttttttgagactgagtctcgctctgtcrcccaggctggagtgcagtggcacaattttggctgattacgacctctgcctcccaggttcaagagattctcatgtgcagcctcccaagtagctgcgactacaggtgcgtgccaccatgcccggctaaatttttttttttttttttagtagagatggggtttggccatgttggccaggctggtgtcgaacttctgacctcaggtgatcctcccaccttggcctcccaaaatgttgggattacaggcatgtgctactgcacctggcccattaactgccttttgaagactggccggtacagtcctggctccctcaataggtgaggaatcaatgtttagggagaaatttcataaatagtccactgattgaggctatttactctagtttcatcagttttgagttggtgaaaagcccgtcca

SEQ ID NO: 885237 - DNA, 640 bp, Homo sapiens
aaaaaatgagaaagataaagagggttaaatgataatgttgtactcctgatatttaacaggatttcaatataatgtactcagaatataatgataaatcagacacaggccttgccttccaaagacttacaggctcctaggggagctcaatataaagaaatttaattcctttattattccacaaatacactgtaagctgttctccccaagtccaaagttaacaccctggttcaagccaccatgttctctcaccttgatgactgcaattaccttctttatatatatatatatatatatatatatatatatatatatatatatatatatatatatatatatatatggaacatttcatgaatttgcatgaaatrtttgcacaagggccatggtaaccttctctgtatcattccaattttactatatgtgctgccaaagtgagcactgcaattatcttctaactggtctccaagttccctctcttgctcctccagtctgttctcagcagagaagccagcatgatcctttcaaaacaccagtctgatcacatcatgcccctgctcaaaacctcccagtggcttctcattcaacttaggggaaaaaacctaaattctttaccttagcctagaaagtctgatgatctggg

SEQ ID NO: 885238 - DNA, 585 bp, Homo sapiens
gcttagcctaacctactttaaacatgctcagaacacttaccttagcttgcagttgtgcaaaatcatccaacacaacaaccgttttataatgaaatgttgaatatctcgtataatttattgaatactatactgcaagtgaaaacaagatggttctatggatacttagagtacagtttctatcgaatacatcgctttcatgctattataaagtcaaaagggccgggcacggtggctcatgcctgtaatcccagcactttgggaagsctgaggcaggcggatcacgaggtcaggagatcgagaccatcctggctagcacggtgaaaccccatctctactaaaaatacaaaaaattagccgggcatggtggcaggcgtccatagtctcagccactcaggaggcagaggaaggagaatggcgtgaacccgagaggcagagcttgcagtgagcagagatcaggccactacagtccagtctgggcgacagagcaagactccaactcaaaaataaataaataaataaagtcaaaagatcataagtcaaaccatcataagtcagggactgcctgcacagaaaacaatgaaacct

SEQ ID NO: 885239 - DNA, 585 bp, Homo sapiens
gcttagcctaacctactttaaacatgctcagaacacttaccttagcttgcagttgtgcaaaatcatccaacacaacaaccgttttataatgaaatgttgaatatctcgtataatttattgaatactatactgcaagtgaaaacaagatggttctatggatacttagagtacagtttctatcgaatacatcgctttcatgctattataaagtcaaaagggccgggcacggtggctcatgcctgtaatcccagcactttgggaaggctgaggcaggcggatcacgaggtcaggagatcgagaccatcctggctagcacggtgaaaccccatctctactaaaaatacaaaaaattagccgggcatggtggcaggcgtccatagtctcagcyactcaggaggcagaggaaggagaatggcgtgaacccgagaggcagagcttgcagtgagcagagatcaggccactacagtccagtctgggcgacagagcaagactccaactcaaaaataaataaataaataaagtcaaaagatcataagtcaaaccatcataagtcagggactgcctgcacagaaaacaatgaaacct

SEQ ID NO: 885240 - DNA, 591 bp, Homo sapiens
caccatactgaggattagatttcaacacatgaatttggaaggggacacagacattcagtccattgcagtagctattgccaaagttctctccaaagtgattttaccaatttaaactcctgtagcagtgtatgagaattcctatgactccatattcttgttactacttattgtcagatttttaaatgtttaccagttttatcctggggatatgaaatggcatctcatcatagttttaatttgcatttcttcaattactaataaggctgagcatcttttctttcttttttttcttttcttttcttttttcagacagaatctctctctgttgcccaggctggagtgcagtggcataatctcagctcactggagcctctgctccccaggctcaaacaatcctcttacctaagcctcctgagtgactgggactacargcacatgacaccacactcagataatttttgatttttaaaaattttttgtagagaaaagttctcagtatattgcccaggctggtctcagattcctaggctcaagctgtcctcctgccctggcctcccaaagttctgagattacaggcatgagccaccgagc

SEQ ID NO: 885241 - DNA, 615 bp, Homo sapiens
aatatttttctaaaatactaaaacattccatgttcagggggcttttttccttctgattctgaaagaaattaaaatattgccttggttgctgaaagtctcatgggcccgaggcactgtgcctgctgtacctgatggatgagtatccacatggaattactgtgaagttcctcctcccttctctaagtctgtccttatctgtgatgtcatcctgcccctaccttgaggaagaacaaccacagtttattgtattttctctcyccactatgtccatgcaacaggaaggttcacaacgttggcaagcattggaatcaccaggggcttgtgagcatgcagattcacagctctgctcctgaaggccaagattctttaaatctacaatagaccttggattagctagacttttacagtctcctcaaggggttctgggacagatcaccttcccaaataccttgaactttgcgagacccactttgggaagtcctgtgtgtgatgctggaacatcacagtgtcctctgtaagagcaaaggccatgccatgctcatctctgggttctactgcacaacactgtgcctggtggcagcgggtgctgagaaaaggttgaattgaattgagctg

SEQ ID NO: 885242 - DNA, 558 bp, Homo sapiens
taaaatgcaaatggtccacaaaataatactgcaatttaccaaagatgcaggatgtcatgaagtcaaggaaagtaacagggaagaactgcataaatcacaagcaaaatcaccaataagtgataatctggcagagttagacacatttggcagatcacagatggcagaattagacacattagccattgaagaaaatcaaaaaggataatggcatgataggtgcttcaraggaaaatatttctgatataaacaaagctaaaggaaaaattaataagacttttattatatttacaaaattactctgttgttgaccacgctgcaaaggtcaaaggtaaagaatgcatttttgctagcatacaatgttatcaggataactacactgaagaaacaaacaattgattcattcttggttcatcataagcattcacatataattgcaacgcaactcaattgtattaaataaacatgacaattttttgttccattttctaaataatttcccaccaaatcttggcctttttatgattctctatgaaaccattgtcctcattttaagtttat

SEQ ID NO: 885243 - DNA, 595 bp, Homo sapiens
aatgagggtcgtgatcaactcagtatacgactggaggctatatgagtaaacagcaagctgttctcatgaatgcaggatgttggcaagctgacaactatgtcggcacccagaaggaatgctgagggcagtcacgccccaggcacagtgtttcttgtggttaggcacatctgaggcctgttagcaatgatgtgaacccgtgatcaatcaaacagctgaccaatcgttacctcctcctccctgctctttctacccaataaatacgaagggctgtagaagctcagggctgcagaagctcagggctgcctttgctcactagaagcaaggagtcccctgacccrttctttaaaacaaatcctttttttctttgtcttcatttctgtgttcgtcctacttcgttcagtcccgtagtaactgtcacaggagggaattggtaaacactgtaggctttcagttgagacccctaaaagactgtgctcaatagtaaggatcacattgtaggagtaaggtcagtgtcttggaaatagggcaaaactgaaataaatcagccctgagaaagcccaaagctagcaatagcaaactattttccaaagatggc

SEQ ID NO: 885244 - DNA, 547 bp, Homo sapiens
gtgacttagggcccacctggctaatccatgatgatatccccatctcaagattctaggaactagaaaatgagttatttactctcaaaaataaaatggtgggacaggcataggataaaagttgtaaacactccattaccaaaagggagaaaatggaaggaagaaaggaatcaccagttccaagcaattttgaaatccaatcagccaagctccattaagttttaaagtcctgagaataatcctctgggctgcagactctgccctactgtgcccatagctttgcccttgtgggttcacagttctgcccttggaagaacmcttccacccttccttcttcttgaaggatagcacatgtctcagctgagtaaattttatcagtctgtttcccgccacagaattctgggaggccaatgatctgcctttattttgtcttctttctgtttctttcagtccaagttggtaatgtttccgctgatataatattgtcaaaaactgtgtgagtttttcatgtatgtcatgagaatgtactctgttaaagaagagagtccca

SEQ ID NO: 885245 - DNA, 417 bp, Homo sapiens
ctgagttgatgtccaactgcactgatccagagtgggttagaggtaagcttaggcaatcaggaatgaggcccccaaaacagactcagagccagacaggtactgggtcctaatcctgactccattgctaataagctgtgtgtcttaaactttccggtcctcagatatttatgtgaaaactaggactaaggatgcctaccctgccatagtgytatgaggcataaataataggcatagaggtctattgtaggtattcagttaatagttttctcctttgtctttcctccatctctaatttattaagcacttactatgtgtgagtcactgtgccaaattctaaagatgcaacaaaggataaaaagtcacacacactctgcccacaagaacttaaagtagatgtaaataattccataataagtt

SEQ ID NO: 885246 - DNA, 666 bp, Homo sapiens
gtgttcaatccttcccatgttttgaatatctgtgacttcttctgcaaccagccagagaaaactcttggcttttaaagagctcatgtgattaaattaggctcactcaaataaccttggagtgatacctcattcctaggttctgtccatactcaaaggggggggggattatacaagattgagggtcatttagggtcattcttagaattctgcctaccacatatacaaaaagcaacaaatcaacaatgacaacaaaaacttcacttagggarttggggagattgggaaatgttggtcaaaggatacaaaatttcagctagataggaagtataaattcaagagatctattgtacgacatggtgactatagttaataacaatgtattgtatactggaaaattgctatgagaatagattttaagtgttctcaccaaaaataaatgataagtataggtatatgaggtgatgcatatgttaattagcttgatttaaccattccacaatatatacacattccaagacagcattttgtacaacataaatatatgcaatttatatttgtcaattaaaagaagtacatttttaaaaattcacctaaacctaccacaggaaaatttacacaaattcttcaagagaataataaaaaaaaacattcccaaatcactttatg

SEQ ID NO: 885247 - DNA, 668 bp, Homo sapiens
aaaagtaccttatttatagaggagcgaggatatgaattgcatgagacttcttttctgaaatcatggaagcaagaagagagtaaagtgaaatattacaagtgttgtaggactgaaagtagaaagatagctgktgtgcttgtattaatgctagaacaaatatactttgaatcaagagatattaccttatataaagatgaatatttttaatgataaagggatcaattcagttgtaaggcatatttataaatttgtattcaaccctatcaatagttgaaatatgtaaaacaaaatttgacagaaataaaaggataaatgaataaaattgcagtcataagtaatgatttaaacataattcagtaactgataaaacagtttagttaacaaatttttaaggatataggtaatttgaacaagaatgtttaacagtttgacataaatgatatttgtggaccactgcatgcaataacagagtttaccttcttttctcttttcactttttgacaaacaaaattgtacatatttaacgggatacaacacgatgttctgaaatatgtatatgtgtggaatggctaaatcaagctgtttaacatatgcattacctcacatcatttctttgtggtgagaataccgaaaatgtgctcttagcaattttcacatatacagtacat

SEQ ID NO: 885248 - DNA, 638 bp, Homo sapiens
ctgaaaaggatggagagaatggaaccaagttggaaaacatacttcaggattttatccaggagaacttcccaaacctggcaagataggccaacattcaaattcaggaaatacagagaacaccactaagatactccatgagaagaccaaccccaagacagataataatcaattctccaaggttgaaatgaaggaaaaaatattaagggcagccagagagaaagtccaggtcacttacaaagggaagctgatcagactaacagcagacctctcagcagaaaccctgcaagccagaagagaggggtgggcaatattcaatattcttaaagaaaagaattttcaacccagaatttcatatccagccaaactaagcttcataagtgaaggagaaataggatccctttcagacaagcaaatactgagggatttcatcaccaccaggcctgccttgcaagagcactaaatatggaaaggaaaaaccagtaccagccactgygaaaaaacaccaaaatatacacttgatcttagccaaaaggctgagaagcaataaacacaccaaaatataaagaccaacgacactatgaagaaactgcatcaattagtgtgcaaaataaccatatagcatcaagatgacaggatca

SEQ ID NO: 885249 - DNA, 584 bp, Homo sapiens
tgcctggcttggagggttccacacccacagagcctcactcattgctagcacagcagtctgagatcaaactgcaaggtggcagcaaggctaggggaggaaagcccacaattgcccaggcttgagtaggtaaaaaaagcggcctggaagctcgaactgggtggagcccaccacagctccaggaggcctgcctgcctctgtagactcaacctctgggggcagggcatagccaaacaaaaggcagcagaaacctctgcagacttaaatgtccctgtctgacagctttgaagaragtagtggttctcccagcacggagtttgagatgtgagaacagacagactgcctcctcaagtgggtcactgacccccgagtaacctatctgggaggcaccccccagtaggggcagactgacacatcacatggccgggtacccctctgagacgaaacctccagaggaacgatcagacagcaacatttgctcttcagcaatattcactgttctgcaccccccgctgctgatacccaggcaaacagcgtttggaatggacctccagcaaatgccaacagacctgcagctgagggtcctg

SEQ ID NO: 885250 - DNA, 611 bp, Homo sapiens
ctgcactcccgtgtttgttgcagcagctctgtttacaaaagccaagatttgcaagcaatctaagtatccatcaacagatgaatggataaagggagcactattcaaccatgaaaagaatgagatcctgtcatttgcaacaacatggatgaaagtggagatcgttatgttaagtgaaataagccaggcacggaaagacaaacatcacctgttctaacttatttgtgggagctaaaagttaaaacaattgaactcatggagatagagagtagaaggatggttaacagacrctgggaagagtagtggggaacttgggagaaagtagggatagttaatgggtacataaggtagttaaaataaacaagacctagatttgatagcacaacagggtgactatagtcaaaaataatttaattgtacattttaaaataactaaaagagtataattgtttgtaacacaaaggataaatgcttgagggaatggataccccatttatcatgatgtaattattatgcattgcattcctatatcaaagtatttcatgtaactcataagtatatacacctactatgtatccacaaaattaaattttaaaaagataaaagaatcccat

SEQ ID NO: 885251 - DNA, 611 bp, Homo sapiens
ctgcactcccgtgtttgttgcagcagctctgtttacaaaagccaagatttgcaagcaatctaagtatccatcaacagatgaatggataaagggagcactattcaaccatgaaaagaatgagatcctgtcatttgcaacaacatggatgaaagtggagatcgttatgttaagtgaaataagccaggcacggaaagacaaacatcacctgttctaacttatttgtgggagctaaaagttaaaacaattgaactcatggagatagagagtagaaggatggttaacagacactgggaagagtagtggggaacttgggagaaagtagggatagttaatgggtacataargtagttaaaataaacaagacctagatttgatagcacaacagggtgactatagtcaaaaataatttaattgtacattttaaaataactaaaagagtataattgtttgtaacacaaaggataaatgcttgagggaatggataccccatttatcatgatgtaattattatgcattgcattcctatatcaaagtatttcatgtaactcataagtatatacacctactatgtatccacaaaattaaattttaaaaagataaaagaatcccat

SEQ ID NO: 885252 - DNA, 616 bp, Homo sapiens
acacaaaagaaccaaagaattaagctgagccttgaaagacagattgggtaagctttagctttacaaattagtagaacattagaagcactggtgcaaaagaagtgggagtgagcatgggggtactcatggagcaatgaagaaactaacctgactcaagtagagagattgtattgaggagccatggagacaggggcgaacatgggaatcaataaaaccctttatcaccatatagtttgcttacatagcacttatcacaggtgcatatttgtattttttttttaatttttgtgtttgtacatagtagwtgtatatatttatggggtacatgagatactttgatataggcatgaaatgcataataatcacatcatgggaaatgggatatccatctcctcaagcatttatcctttgtattacaaacaattcaatatattctttcagttacttttaaaggtacaattaaattatttcgattatagtgtgctagcaaatactaggttttaataatcacatcatagagaatggcataggatatattcttgattgttagttaatgttaatatcaatttcccccaaaaacagtaagcttcctgaaggtaagaaccactttattcag

SEQ ID NO: 885253 - DNA, 619 bp, Homo sapiens
agggtagatggagggagaggatcagggaaaataactaatgggtactaggcttaatacctaatagtctgtacaacaaacactccttgatacaagtttacctatgtaacaaaccagcacatgtacccctgatgttaaaataaaagttttaaaaaagacaaatgtcttgatgcgaaattgaacctaccatccataaattttctttttccttttcgttcgttctttccttccttccttccttccttccttccttccttccttccttcactccctccctccrtccctccctcccttctttctttttctttctttctttctttctttctttctttctttctttctttctttctttctctttctttccttctttccttctctctctctctctctctctctctctctctctctctctctctttctttctttctttctttctttctttctgacagggttttgctctgtcacccaggctggagtgcagtggtgcaatcttggcttcctgcaacttctgcctcctgggttcaagtgattattgtgcctcagccttctgagttgctgggattacaggcacgcgccaccacacccagctgctttttgtatttttagtagagatggtgttttg

SEQ ID NO: 885254 - DNA, 619 bp, Homo sapiens
agggtagatggagggagaggatcagggaaaataactaatgggtactaggcttaatacctaatagtctgtacaacaaacactccttgatacaagtttacctatgtaacaaaccagcacatgtacccctgatgttaaaataaaagttttaaaaaagacaaatgtcttgatgcgaaattgaacctaccatccataaattttctttttccttttcgttcgttctttccttccttccttccttccttccttccttccttccttccttcactccctccctccgtccctccctcccttctttctttttctttctttctttctttctttctttctttctttctttctttctttctttctctttctttccttctttccttctytctctctctctctctctctctctctctctctctctctctttctttctttctttctttctttctttctgacagggttttgctctgtcacccaggctggagtgcagtggtgcaatcttggcttcctgcaacttctgcctcctgggttcaagtgattattgtgcctcagccttctgagttgctgggattacaggcacgcgccaccacacccagctgctttttgtatttttagtagagatggtgttttg

SEQ ID NO: 885255 - DNA, 619 bp, Homo sapiens
agggtagatggagggagaggatcagggaaaataactaatgggtactaggcttaatacctaatagtctgtacaacaaacactccttgatacaagtttacctatgtaacaaaccagcacatgtacccctgatgttaaaataaaagttttaaaaaagacaaatgtcttgatgcgaaattgaacctaccatccataaattttctttttccttttcgttcgttctttccttccttccttccttccttccttccttccttccttccttcactccctccctccgtccctccctcccttctttctttttctttctttctttctttctttctttctttctttctttctttctttctttctctttctttccttctttccttctctctctctctctctctctctctctctctctctctctytctttctttctttctttctttctttctttctgacagggttttgctctgtcacccaggctggagtgcagtggtgcaatcttggcttcctgcaacttctgcctcctgggttcaagtgattattgtgcctcagccttctgagttgctgggattacaggcacgcgccaccacacccagctgctttttgtatttttagtagagatggtgttttg

SEQ ID NO: 885256 - DNA, 658 bp, Homo sapiens
agaggttgcggtgaaccaagattgtgccactccactccagcatgggtgacagagtgagggtctgtcaaaaaaaaaaaaaaaaacatacacacaattaaatgaaataggagccatcactactgattccacagactactgattccaaggataatacaggaatattatgagcaactcacatccacagagttgataaccttgatgaaatccaccaattcctttaaagatataaactaccaaagatataaactacattcaaagagaaaaagataatctaaataggcctaacctattaaagacattgactcaataactagtagccctccaaaacagaaagcactaggcccatataggatcagcagtaaattctaccaaktacttaacaaggaaattataccagttctctacagtctcttacagaaaatagaggcagaggaaatacttcctaatccattgtatgaggccagcattaccctaatatcaaagccagaaaaagacattttaaaaagaggaaaactatagaccaatatctctgatgaacatagatgcaaaaatcttcaaaaaaattagcaaattggatctaacaatgtataaaaacagttatacaccataaccaagtgagatttattccagatacacaagcctggttcaagattcacaa

SEQ ID NO: 885257 - DNA, 547 bp, Homo sapiens
catggatcctatgaaggaggcagattgctcccacagaacctgggagacagcacaaatactgtgaattcccaaactgtgaaagtgggaaagggggatcatccacccctgaacacacaccatcactgaaggtgcagatcacaggagaaggatttgaccttacctggagctaagataatttagagagctgagtgaaayacaggggtagaggaagaagcaggaaaagacctgtaggtactcttggtccccagggaagccatttctgacttgtctctcaggggtccttggggaaggctgccagaggaactgggaaaagaccacaaggagaaggaaacctccagctgaattgtgtaacaattccaagtgaacatgaagtttcctgaccagaacttgggagagggcatgaatatggtgtgcagactcgacaggcagggaggtgcgaaagccctgcttgctttctcagcttggaggctggtatcctggggcaagttctcagccctgcctacccactgcctggaaacaaactcggtgctgttaggggggtgtaggg

SEQ ID NO: 885258 - DNA, 547 bp, Homo sapiens
catggatcctatgaaggaggcagattgctcccacagaacctgggagacagcacaaatactgtgaattcccaaactgtgaaagtgggaaagggggatcatccacccctgaacacacaccatcactgaaggtgcagatcacaggagaaggatttgaccttacctggagctaagataatttagagagctgagtgaaatacaggggtagaggaagaagcagraaaagacctgtaggtactcttggtccccagggaagccatttctgacttgtctctcaggggtccttggggaaggctgccagaggaactgggaaaagaccacaaggagaaggaaacctccagctgaattgtgtaacaattccaagtgaacatgaagtttcctgaccagaacttgggagagggcatgaatatggtgtgcagactcgacaggcagggaggtgcgaaagccctgcttgctttctcagcttggaggctggtatcctggggcaagttctcagccctgcctacccactgcctggaaacaaactcggtgctgttaggggggtgtaggg

SEQ ID NO: 885259 - DNA, 647 bp, Homo sapiens
gcaacatcaactcgtacttgaatttccagtctgcctgtctgccctacagattttggacttgccagcccccacaattgcatgagcaaattaaaaaaaaaaatcttatttctctctccccccatctcattggtctttttttccctctggtgtaccctgattaatataccatccaaactaaatgcaacataccaaaacatttaggagcatgaaaaaagaagaggttagaatgaaaagcacataacattaaaactttctattttgttaagaaccttgcatttcctcgctgatatttaacctgaggactacacctcaggttttttctttcagctttaactcaagaatgtataatttgkattatgctaataacacaaatagtatcccagcaaaaacaaaaccaaacaaaacaacaacaacaacaacaaaactgggatggtattgtgatgtcttttataatggagtttgactttggacttaagagttgatattcagcaaggatgattggtattgccgtactagtttatatgttgctccttctctagtttcctctgaagatcccctacctcatcctggtcacctaaggtcctacactaagactccttattgatcaagcagctatagaatgaagaataaagagtaaagattaaaga

SEQ ID NO: 885260 - DNA, 651 bp, Homo sapiens
tattaccattacttatcaaaaattaaaaacaagtttaaattgtgggtaaggactgcctaagagcaaaatttttaaaaaatggttaaaaatcacaaaggaaacatcaacaatttaaataaattttctatactttgaaagcaacatagaccgcattaaaaagcatactataaacatggatagataggtgcaacatatgtggcacatgcattgtaaatatattgactattgaagaactcatgtgaaccaatttttcaaaactaaaacctgtgggagaaacatgggcaaatactccattcacataagaggaaatacaagtggctagtaaatatttgaaagtgcgtgaccctaacaagaaataaattcatattaaaaaggtatctttctgcctattctataaacaaatacagattttaaraaataccagtgctggggaacatttggtgaatctactccaggagtgccaaatatggactatttttatttctcatcatctccccgagatgaaattaccctttgctttatctctctcctgatttagctcctgtggggactagttcaccaatcataatttctaggaccttcatgttaaatttatatttagagtctcttgacctttccttgtccctgtgcattggttaaggctgccatatc

SEQ ID NO: 885261 - DNA, 651 bp, Homo sapiens
tattaccattacttatcaaaaattaaaaacaagtttaaattgtgggtaaggactgcctaagagcaaaatttttaaaaaatggttaaaaatcacaaaggaaacatcaacaatttaaataaattttctatactttgaaagcaacatagaccgcattaaaaagcatactataaacatggatagataggtgcaacatatgtggcacatgcattgtaaatatattgactattgaagaactcatgtgaaccaatttttcaaaactaaaacctgtgggagaaacatgggcaaatactccattcacataagaggaaatacaagtggctagtaaatatttgaaagtgcgtgaccctaacaagaaataaattcatattaaaaaggtatctttctgcctattctataaacaaatacagattttaaaaaataccagtgctggggaacatttggtgaatctrctccaggagtgccaaatatggactatttttatttctcatcatctccccgagatgaaattaccctttgctttatctctctcctgatttagctcctgtggggactagttcaccaatcataatttctaggaccttcatgttaaatttatatttagagtctcttgacctttccttgtccctgtgcattggttaaggctgccatatc

SEQ ID NO: 885262 - DNA, 638 bp, Homo sapiens
tttttcttcctgtcattttaggggttgtagcaatagtgtttttgattgcagtgggttgttgactgccaagtgaatgattatacatggacatggaagttgagatatgaaaaaagccacgtgggtcagagtctcatggtcagctaccatggcaatcctgaaaagctcctctacctgaatggcctgtcctgcaataactcccctggagatactgttccctttctcaaccttggaactccacatattcaaccagttgagtcaacccccaatggagtgagatcaggcatcttcagtgaccttaaaaagccagcttgactctctagccaagactcagagggctggagccaaatcagaatkactaagatacagaaaagaatgcgtggacggaaagctgcagttgcagcctcggaagacactggtagaaatgctgttctggagaacgtgtgtggatctggtgggctaggcaccccaggcagccccctggcctgggtgaaacactcctgcttgctctcccgtttaccaaggaagctttgggtaagagcgtactttacctatccactaaaaaggcagaggaagggagggtctagtggtctgacacgcatctactaggtagaaatgggcaatgtctcccacatccaagc

SEQ ID NO: 885263 - DNA, 653 bp, Homo sapiens
aaccacatgattatctcaatagatgcagaaaaagccttcaacaaaattcaacagccttcatgctaaaaactctcaataaactagatattgatggaacgtatctcaaaataataagagctatttatgataaacccacagccaatatcatactgaatgggcaaaaactgcaagcattccctttgaaacttggcacaagacagggatgccctctctcaccactcctattcaacatagtgttggaagttctggtcagggcaatcaggcaagagaaagaaataaagcgtattcaattaggaaaagagaaagtcaaattgtctctatttgcagatgacatgattgtatatttagaaaaccccatcatctcagccaaaartctccttatgctgataaagcaacttcagcaaagtttcaggatacaaaatcaatgtgcaaaaatcacaagcattcttatacaccaataacagaccaacagagaaccaaatgatgagtgacctcccattcacgattgcgacaaagtgaataaaatatctaggaatccaacttacaagggatgtgaaggacctcttcaaggagaactacaaaccactgctgaacaaaataaaagaggacacaaacaaatgaaagaacattccatgctcatggataaaaggaat

SEQ ID NO: 885264 - DNA, 675 bp, Homo sapiens
gatttccaaagcacaggaagaccccagacggcagggggaatggaggacagaaaagcaaatactgttcgtgccggcatgaatggcaccatgacattttgctgctattgccgactctgcttctcattttcttggccatcttgcttcaggatttgagctcccctgggacagggttatgttagtcattgtccgcgaggtggacaaatgagtctctaccttctgaaaataagcttacaatttatggagctgccttggagctagagttcttgcttccagccactgtaagtatgcagagattggggtgtgcaaatcaatatgctatgtctggtacccaaacacggtttagcataaatctcatttaaaactcaacataagctgtgttttgaagatcacattcctaaaagctcgtaattcataacttcagattaaaggcttaaaatacaacttgcctgtcctccagctgctggaaaaaaaamaaaaaaaacagtgatgtccttctgtgcaggtacaacctcagtagaattttttttggctccaagttgtgtaagaatccaaactgtgaaaacaaactcaggcccccaggcctcagctagagaagagaggaatcccaggtatgcaaaagtctgtatgggatgcccctcttagtaggtcagggaaagctgttcgttcccagaaaga

SEQ ID NO: 885265 - DNA, 651 bp, Homo sapiens
gggcatatcctatgagctgggaaccgtgctagaacaaagaataaaatggagcctctgcctttatacagcatatcacatggtcaaggcagactgcaattatgacacaatgtgtcatgttaagggtgagtgtggggactgaggaaaattggaggtttttccaaacctcagtcctgaagaattaaaggaggcatcctagagagagtgatgtggaacttgagacctaagggacaagtgggagttagcaagggaataacagtgagagttattaatgtatagatgttttttaaagtgctgaggctgaatgacatcacctggagagtgagcatagttagaaaagagaagmtgattatggagggaaaagggaaaaccaacagaacaactgaaaaggggaaggaaaagactagaagccaagggtcagaagtgcagtggggaagaggagtcggggggacactgtgtgcaaaggcatcaggtgaaagaacagccaagtgcatgctggcaactgaaaggagtctgtggtgtggctgctgtggcatctcattaaagaacatccaggcaggaagctgggaaggtggtagggacaagtcttaggagccccagacaccagattagggaaactggactttatcctaagacaataatagaaagccacaa

SEQ ID NO: 885266 - DNA, 600 bp, Homo sapiens
ggatccccaaacagagcagacccaaacccacccacctgcagcctggagaggcgcacggctgaagtcagccaaactcagccaagaagagccacacttttgagctgggaatcagaaaaagaagtgtgtgctgctgtagtcactgagatgttgatgttcttggttacacagcaaaacatgattagcacagagtcttcctccccttggtctgtggctgcctgagaagaggccccacacctacccaacaggtgccaggactagaatggacactgaaatagtcatcaaaaacagcactgagagagaaaagtttagattggactcaatcttaaatgaattttccttaaatgaatcccatgagcctgtgacaggcagtcctgacagagctggtgaagggagagctggaagtctcatcaatccatrattgatggtgtgggatcagctgtagctatttctgtgatctcatattgcagatctcatgcagagatgcttgattcagccatacgggttcagaacacccatctgaccccaaatcagacctgtgatgcccatttctccttccagctctatctatgaagtgggctcaaagttgggtcataaactggg

SEQ ID NO: 885267 - DNA, 571 bp, Homo sapiens
attgaaaatgtaactgctgagagggtgttcaatctacttaagatactaacaaattgctcttaggtcctaatagacccatggtgcttctaatgagaagaatctttattactcaaatgtgtcgagctggatttcaaagttggaaacattttgtgtgttcttaagaaagaatgattttttttttttttaagaaacagtttgtcatttggaaggcattttcagcaattttgttcgaattagagcggcttcactgaaaggggcagtgcaaytccagaacagggtttccctgactatgttttgtttatgccttgtgaaataattttgcaaaacagatgcataacctcctccccttgacagtttcacagaacatgttgcacgttaaagctcttacaagtgctgcaggaaagaatctggcatacctttcctaagccagcctaagccaaacttacttgatcattgaggcccttcttacaatgcccttttcaccctccaatgcaactagcacttcatgggggcacatttggggaaagactttctagcatggtaggcattgtaacaaacaagccatatacac

SEQ ID NO: 885268 - DNA, 613 bp, Homo sapiens
agccactgcaccacatgcatctcttctcctgtagctgcccaatgcatttatgtgtaggtccttttcccccaggcttctgcttcctgataaaggagaggaagaggccagtcgagttgtattctggaaatactttgcctttgttcttctccttcctggtagcttcttgaatcaatcccttcgmtttcttccaccaagccagaaagcagcctcagactctgagcagccacttccagtcccttggggcagacacccacgcagaagcctgcttgcatttctgtcctgggagtggagagaagagagccctgtggctgtgtagcctggcaaggctttgtggaagagggggcccaacttcaccttaaagaatgggtgagtttgaggggctctcacagaaatgggaggggactggtatgggtgaccttgatttgggtccacacagacatctcttggagccaactatatgctttgagccaactataatgcttcttttttctcttcctcctttaagacacctgggtatacagtgattacaggtttagtggtaggagactaaattctttgcaacctggatttctatgttcaaccttgcagcagaatctttgcaggtcagaaagaa

SEQ ID NO: 885269 - DNA, 613 bp, Homo sapiens
agccactgcaccacatgcatctcttctcctgtagctgcccaatgcatttatgtgtaggtccttttcccccaggcttctgcttcctgataaaggagaggaagaggccagtcgagttgtattctggaaatactttgcctttgttcttctccttcctggtagcttcttgaatcaatcccttcgctttcttccaccaagccagaaagcagcctcagactctgagcagccacttccagtcccttggggcagacacccacgcagaagcctgcttgcatttctgtcctgggagtggagagaagagagccctgtggctgtgtagcctggcaaggctttgtggaagagggggcccaacttcaccttaaagaatgggtgagtttgaggggctctcacagaaatgggargggactggtatgggtgaccttgatttgggtccacacagacatctcttggagccaactatatgctttgagccaactataatgcttcttttttctcttcctcctttaagacacctgggtatacagtgattacaggtttagtggtaggagactaaattctttgcaacctggatttctatgttcaaccttgcagcagaatctttgcaggtcagaaagaa

SEQ ID NO: 885270 - DNA, 592 bp, Homo sapiens
tgtaatgacttactgagagtaactttcagtcctgcacaccctattcatggtaaaagccctatacaagtctgccgtttttaatattttatactgtatttttattgtacttttctatattgagataaacatatacttacaattgtgctacagttgcccacagtattcagtacagtaacatgctgtacaggtttgcagcctaggagcgacaggctataccatatggcctagttacctagtaggctataaaacctaggtttgtgtaagtccactctataatgtttgaataagaaggaaatcgcctaaggacgcacttctcagaamgtgtccctatcattaagtgatgcatgactgtttatacacacacacacacacacacacacacactcactcacagtcacctatatatagccttgcaatttatttgcctatttacattttgcttttctttaggacactgtaagttgcagtgaggtgtggttagggttgtcattttcttccagcttctttgctacatgaagcacaacatagtgcttgataaatattttgctactggaagcatgcagctttctatgtatacaaatgtgttgcttca

SEQ ID NO: 885271 - DNA, 701 bp, Homo sapiens
tttaactgtatgaattatttatgcctgtacctttctactggaacatcactgattttctcagtaaattgaatcagtttttaatattataattttttattgtacatgatttgcatggaatttccaattaattttcttcttgaatttgatgtttattggggctacaaatgcccatttttgtattctcaaatattttagtatttcacctttatgaagtaagaaacctgatacttaaaaaaagtatttcttatgtctcaataaatgtcaaattcattttgcatagatattgtactggatattacaaatcacacacggtagaaactgatgtctcaaatagtgctgctcctatctgaacattctatattgttaactcctgacttcctgactgtaattcagtctccacgctcatgaaaccgtggtccgtctgtctatgcatctcacttgcttaaaatccatccatggctccctgatcactctctgagtaaagttcagtctycttgtcaggtctataaaatcttaaaatcttttctgattccatacctcacatcactcatcacagtgaataccctgagttttagtcatgctaactttttgaaacttcccaattatgttttttctttatcttgttgttggtctttcacattctgtttctcctaagtattgattttctccgcatctacctaccaaaattatatgcaagtttg

SEQ ID NO: 885272 - DNA, 691 bp, Homo sapiens
tgttaagaacgaacatcaaatataatctatttactagctgtatgctgggccatcaccccagtggatatgtcctaatgaatttttaaatcttacctatcttgctaagaaactggaccattatggtaaacaatttataccttttctggtgcttctgttggtttaggtccttctgtgaccattcctttcatgtatataagtagttacttctaggtaatgaaccgaaatacctatttgttgactccagtcgctttccaatcctggtagagtttttattttggtgggcatcagcttgtcccagtttgatttgtctttttaattcccataaaggtagtatctcrggcaacaagtacttgaatcaactatttttgcattaattaatcactggtcatgaattggtatcaacccatgtgatctggccttttatgtcctcaatgtcttccataatagcgagaaaacacattaaagtttaccctattgaattcctttagtcttatatttacccatgaggatctgccacaactttccaggtagagtagtaaccattcatttatgaactgccatcagaaagacaggataatcatctagcctctggcagcaggtgttctaatggagaatccctttaaacttttccttcagtagcctaagacagagcttcagcagtctctagagtgagtcccagaaaaagaggagg

SEQ ID NO: 885273 - DNA, 691 bp, Homo sapiens
tgttaagaacgaacatcaaatataatctatttactagctgtatgctgggccatcaccccagtggatatgtcctaatgaatttttaaatcttacctatcttgctaagaaactggaccattatggtaaacaatttataccttttctggtgcttctgttggtttaggtccttctgtgaccattcctttcatgtatataagtagttacttctaggtaatgaaccgaaatacctatttgttgactccagtcgctttccaatcctggtagagtttttattttggtgggcatcagcttgtcccagtttgatttgtctttttaattcccataaaggtagtatctcgggcaacaagtacttgaatcaactatttttgcattaattaatcactggtcatgaattggtatcaacccatgtgatctggccttttatgtcctcaatgtcttccataatagcgagaaaacacattaaagtttaccctattgaattcctttagtcttatatttwcccatgaggatctgccacaactttccaggtagagtagtaaccattcatttatgaactgccatcagaaagacaggataatcatctagcctctggcagcaggtgttctaatggagaatccctttaaacttttccttcagtagcctaagacagagcttcagcagtctctagagtgagtcccagaaaaagaggagg

SEQ ID NO: 885274 - DNA, 636 bp, Homo sapiens
ttctcatgctgctaataaagacatacctgagactaggtaatttattaaaacaagaggtttaattgactcacagttccacatggctggggaggcctcacaatcatggtggaaggtaaatgaggagcaaagtcacatcttacatggtgacaagcaagagggcttgtgcaggggaactcccatttataaaaccatcagaccttgtgagacttactcactaccatgagaacaatatggggaaawagtccccatgattcaattatctccacatggccctgcccttaacatggggtaagatttgagcagagacacagagtcaaactatatcattccaccctggcccctcccaaatatcatgtccttgcatttcagaaccaattatgccttcccaaaagcctctcaaagtcttaactcatttcagcattaactcaaaagtccacagtctcaagtctcatctgagacaaggcaagtccctttgtaaaatcaaaagcaaattagttatttcctagatacaatggtacagacaatggtgcagacaatgtgtaagtaaacctgttccaaatgggagaaattggccaaaacaaaggggctacaggtctcatgcaagtacaaaatccagcagggcagtcaaatcttaaa

SEQ ID NO: 885275 - DNA, 531 bp, Homo sapiens
ctattagcatgtggctcctctttacttatgcaaatttctgcagctggcttaaatttctccccagaaaatgggtttttcttttctaccacatggccagggtataaattttccaaacttttatgctctgcttcccttttaartgtaatttccagtatcaaattatctccttgtgcatgcatattagtttatgctgttagatgcagccaggccacatcatgaatgctttgctgcttagaaatttcttttgccagataccctaaataatctctttcaagttcaaagttccacagatctctagcacagggccacaatgccactagtctctttactaaagtatagcaagagtgacctttacttcagttcccagtaagtccctcatctccatctgagaccagcttggctatctctgtccatattactgtcagcatttttgtcaaaatcattcaacaagtctctaggaagttccaaaccttccctcatcttcctatcttcttctgaaccctccaaactgctccaacctttgtacattac

SEQ ID NO: 885276 - DNA, 594 bp, Homo sapiens
ataatataaacattacatatgtaaatataaattgtaccaataaaatcaacaccaagcttgtttttaatcattcactcaaaatgtattgaacagctactgtgcagtgttgggactccttagaaacttaagacaaaaatattgggcgtgatagtgtgtgcctgtagtcccagctactcaagacgcctaggcaggaggatggcttgaattcaacagtccaagtgcagcctgggcaacatagtgagactcagtmtttttttttttttttttttttttttctgaaatggagtcttactctgtggcccaggctggagttcagtggcacaagcttgcctcactgcaacctccacctcccgggttcaagtgattctcctgcctcagcctcccaagtaactgggattacaggcatgcgccaccacactcagctaattttgcatttttagtagagatggtgtttcaccatgttggccaggctggtctcgaactcctaacctcaagtgatccacccaccttggcctcccaaagtgctgggattacaggcgtgagccaccgtgcccagccaagacccagtctttaaaataataacataaaataaac

SEQ ID NO: 885277 - DNA, 594 bp, Homo sapiens
ataatataaacattacatatgtaaatataaattgtaccaataaaatcaacaccaagcttgtttttaatcattcactcaaaatgtattgaacagctactgtgcagtgttgggactccttagaaacttaagacaaaaatattgggcgtgatagtgtgtgcctgtagtcccagctactcaagacgcctaggcaggaggatggcttgaattcaacagtccaagtgcagcctgggcaacatagtgagactcagtctttttttttttttttttttttttttctgaaatggagtcttactctgtggcccaggctggagttcagtggcacaagcttgcctcactgcaacctccacctcccgggttcaagtgattctcctgcctcagcctcccragtaactgggattacaggcatgcgccaccacactcagctaattttgcatttttagtagagatggtgtttcaccatgttggccaggctggtctcgaactcctaacctcaagtgatccacccaccttggcctcccaaagtgctgggattacaggcgtgagccaccgtgcccagccaagacccagtctttaaaataataacataaaataaac

SEQ ID NO: 885278 - DNA, 633 bp, Homo sapiens
aaaatataagccctgtattctgtcgctgaaatgttagagatacctatcagaagacattttattctttgggaaatacaaaatatcattggatatttcattggataaataagtatgattggacattaggactcttagaattcaggacccaggaaaactttaggaaaaatctcagtttagagaaaagtgaatgagggtccccaagatcctcccggttagtcatcaaagaggcaaaatgattttaaagattgtacatctcaagtcacactgtaagtgaatcaccttgccttcttgctgatcaagacatgagatttacagtgtgaagtccgtcaatgagatttacgtcctgactcagtccctgactacctcatgccactcagctataccactgatgtagagggcctgtggcccaccaaccctgcagcacattmacttattttggctgatatggaacaaactgaaaaattatcacttttggaagctttaagagagaaaagaatcctatgggagagtagtaagtaggtattttgtcaactttgtttctttgcttctcagtgcctaaaaaggaataccatacaataacaataatatttatattttatataaaactgttataatttctcagtaattagtact

SEQ ID NO: 885279 - DNA, 628 bp, Homo sapiens
agtcatttcagaatggtactacttttcttcttttcattctactttaatctatttaatctttatttgaaaaaaatgtacctgtatcagttcagttaacaaaggaaataacaggagaatttccttttttttccattttagcacagatcaagtttgattttgcacaacaaataaaactagcaaatcatgtgatagataatactgtaaaacctaaagctctttacctagaatcaaataaagtggcatagctttgagaagagaggctgagggaaaagatactctcataaattgataattggatttccagtattaccctccactacatttgttgaaatattatgaagttttggataattacaaaatttgtattcttcattaatggccacaaaccyttgattgtccatgacatttgacccatgtggttccactgctaatgttacgatatagttctttaatatgcaaggcctgcattcaaaaaggtagttaatatagaaaatatatgactgttgaggagaaaacaaatcagtgaacaataacataaagctataaaaaataattatgtatttatttattgaacatttgctagtgagctcagaaatgcaaaatttactgtcatttaaaagtaagttaa

SEQ ID NO: 885280 - DNA, 628 bp, Homo sapiens
agtcatttcagaatggtactacttttcttcttttcattctactttaatctatttaatctttatttgaaaaaaatgtacctgtatcagttcagttaacaaaggaaataacaggagaatttccttttttttccattttagcacagatcaagtttgattttgcacaacaaataaaactagcaaatcatgtgatagataatactgtaaaacctaaagctctttacctagaatcaaataaagtggcatagctttgagaagagaggctgagggaaaagatactctcataaattgataattggatttccagtattaccctccactacatttgttgaaatattatgaagttttggataattacaaaatttgtattcttcattaatggccacaaacctttgattgtccatgacatttgacccatgtggttccactgctaatgttacgatatagttctttaatatgcaaggcctgcattcaaaaagrtagttaatatagaaaatatatgactgttgaggagaaaacaaatcagtgaacaataacataaagctataaaaaataattatgtatttatttattgaacatttgctagtgagctcagaaatgcaaaatttactgtcatttaaaagtaagttaa

SEQ ID NO: 885281 - DNA, 642 bp, Homo sapiens
tcaaagatttacttatccattcagatagggttgagacagtctctgaagttgaagtggcctctctacatttcttgataggacaagaatctggcggggcgggttttatatggctgtggtgaatccagggtctaagtccttcaagctgaacagaggaatgggtcaccagtcatgctttgcatggcctctttcactgtgttttaagtggtccccaggatgtcgacttttcctggtcttgagcagaacccagtctctgggttggatgggatgaaagagaatgtcagttggataccacaatctgctggaaccacaaactcgtgaatagtagttaaagtacaacctaaagattgtgtatrtttgataatatctaatttatttatgtgtatgttattggcattccttagtctgagaaggtaacggaagaatgatctcccatgtaaaatttttaaagggcttaatttaagcccacttttagggaccacccttactctgagcagggcaatggacagaatgttattccaggttgttagtttcttggcaaatcttagctaaaatttgttttgttttatatagtatgatttatcttttgagttttttcagtagacttcagtctgcaggctgtatgaagattccagattatgctga

SEQ ID NO: 885282 - DNA, 649 bp, Homo sapiens
tttcagtaggatgtatttcatttaataagcagtgagaaaactctcaagtaacatgtgcaaatattcagttcatcaaatactttttttttttttcacaacaccactgtaagtctttgccattcccttgttcttaaaaacattgctgtttcttttaatgcatggaaattctaaatcatacagattgggaatttaaaatagtaaataggggaaataattttttttttttttttgaracagtcttgctctgtcacccaggctggagtgcagtggcgcaatctcggctcactgtaacctctgcctcctgggttcaagtgattctcctgcctcagcctcccgagtagctgggattacaggcgtgtgccaccaggcctggctaatttttgtatttttagcagagacagagtttcaccatgttggccaggctggtctcgaactcctgacctcaggtgatccgcccgcctcagcctcccaaagtgctgggattacaggcgtgagccactgcgcccagcctaataggggaaataaattttaattaaaaatttcagttcttatatagaacacatttagaggaaaatacacacgtaaaagtacacacttactactttcattcttatgcaaaaaaaactaactcactgtatttgtgatttag

SEQ ID NO: 885283 - DNA, 665 bp, Homo sapiens
tgctaattcctagtgatggtgatcaggacaaacgtagtccctgcatccaagaacctacagacaagcaggaggagtatacagatgaagaacgaccacatcgaagtaaagaaaataatacaaaggatattgtgaggccatggggcagggagaccaaactcaaccttaggggctgaaggacatcttccctgaggacaggatatttaaactgacatgtaggaatgagaaagaggtacctaggccaagctgggggtggttagagggtgcaagggaagctgagaagaggaacatttcaggctgggagagtagtttgtgcaaaggttcagaagtgtgagtaagatgattggccagttttgggggaaaaatactaagcatggccgatcctaagacaatgataggaaatgtgttaggccaagcacctggagaccatggaggggaggttggaggatgagcaacaacctggaagaagmtggtgggatatggaaggagagaaccaaccctggaggcaggaagacactgggagacaggaaggcaattgctgctgagctctaagcaagaagtgatggtggcttggaccaccacaatggcaatgggatggggaaaagtgaaggtaatcggggtatttgggaagaaattgatgactactggtgtccattactaagatgggc

SEQ ID NO: 885284 - DNA, 684 bp, Homo sapiens
agccatctcagtaagatcataatgatttattggatttataagctctatgatcatttaaatacatttacctacattttgtggtgctaaattcatctataacagaggagtaatttaattctgaagccacattaactgctctttgccttctcgcaaagtcacccactcttgattttttttgcataacttaattcartttttctgctcttgctacattttcttcagctcctacacattttttgggaggtggttataatgttattatcttattattagtcactaaccgggaataattcacttttccaattgatctatgctgcctacaaaatgccatatcaactggaagcacagtctggttagtgagttttgagagccagttcagacagaccactttgtgtgacaggcttggctcaggcaatgatgacctctatgagctgaatttacctgtggtcaaacggtcccagtgttggaagagcatccacaagccagattctcaagggtgcggcaggggtacctgattgtgtccaactcatgttgtgtgctgaatattttacacagttcctgctagtttgcatttgtcctaaataaatttctgacaatgtcaagttcaatggattctctagataaaacatccctgagcaccatgtttcccttgaaaggatgcccagctgcatatgcacatttgtg

SEQ ID NO: 885285 - DNA, 684 bp, Homo sapiens
agccatctcagtaagatcataatgatttattggatttataagctctatgatcatttaaatacatttacctacattttgtggtgctaaattcatctataacagaggagtaatttaattctgaagccacattaactgctctttgccttctcgcaaagtcacccactcttgattttttttgcataacttaattcagtttttctgctcttgctacattttcttcagctcctacacattttttgggaggtggttataatgttattatcttattattagtcactaaccrggaataattcacttttccaattgatctatgctgcctacaaaatgccatatcaactggaagcacagtctggttagtgagttttgagagccagttcagacagaccactttgtgtgacaggcttggctcaggcaatgatgacctctatgagctgaatttacctgtggtcaaacggtcccagtgttggaagagcatccacaagccagattctcaagggtgcggcaggggtacctgattgtgtccaactcatgttgtgtgctgaatattttacacagttcctgctagtttgcatttgtcctaaataaatttctgacaatgtcaagttcaatggattctctagataaaacatccctgagcaccatgtttcccttgaaaggatgcccagctgcatatgcacatttgtg

SEQ ID NO: 885286 - DNA, 611 bp, Homo sapiens
accactttgtgtgacaggcttggctcaggcaatgatgacctctatgagctgaatttacctgtggtcaaacggtcccagtgttggaagagcatccacaagccagattctcaagggtgcggcaggggtacctgattgtgtccaactcatgttgtgtgctgaatattttacacagttcctgctagtttgcatttgtcctaaatmaatttctgacaatgtcaagttcaatggattctctagataaaacatccctgagcaccatgtttcccttgaaaggatgcccagctgcatatgcacatttgtggtgtagccttcacacaaacacacttatttgggtaaagtagaagtgtgtatgtgggaactaatacatccttctgccatcgtgactcaagcctgaggagtgttaattgtggatgagtggggttttggggcataagcaattgcctggttcactttatggtagaatcaccccgaagctgtgtattgggaggagagaatgaggacggaacattaggtgaactaaaaggagaggctataaactgaagcttattctttgggtaagagcaagccaaatttattcatgaatgggtgttcctggcctttgctttcctgct

SEQ ID NO: 885287 - DNA, 605 bp, Homo sapiens
atagtatatcatatagtattactctatatagtatatataatacacagtgtgactacatatagtatatataatacacagtgtgactacatatagtatatataatacagtgtgactacatatagtatatataatacacagtgtgactacatatagtatatataatacacagtgtgactacatatagtatatataatagtgttactacrtatagtatatataatatatagtgttactacacatagtatatataatatatagtgttactacatatagcatactatatatagtatcactgtatcagcattactataatatatagtatatataaatatggtgtatatataactatagtgtatatataatatatactatatctagtaatactatatatagtcatttagtactacatatagtagtactagatatagtatatatactatatatactatatatactatatactgtacagtatgtatatactatatacacacactatatatagtgtgtgtacatactatatacacacactatatatagtgtgtgtacatactctatacacactatatagagtatgtatatactatatacttcacactatatagtat

SEQ ID NO: 885288 - DNA, 605 bp, Homo sapiens
atagtatatcatatagtattactctatatagtatatataatacacagtgtgactacatatagtatatataatacacagtgtgactacatatagtatatataatacagtgtgactacatatagtatatataatacacagtgtgactacatatagtatatataatacacagtgtgactacatatagtatatataatagtgttactacatatagtatatataatatatagtgttactacacatagtatatataatatatagtgttactacatatagcatactatatatagtatcactgtatcagcattactataatatatagtatatataaatatggtgtatatataactatagtgtatatataatatatactatatctagtaatactatatrtagtcatttagtactacatatagtagtactagatatagtatatatactatatatactatatatactatatactgtacagtatgtatatactatatacacacactatatatagtgtgtgtacatactatatacacacactatatatagtgtgtgtacatactctatacacactatatagagtatgtatatactatatacttcacactatatagtat

SEQ ID NO: 885289 - DNA, 674 bp, Homo sapiens
ctatgctatgaaggggtccaatttcaattttctgcatatgactaaccagttgtcccaacatcatttattaaatagggaatccattccccatagcttgttttggccaggtctgtcaaagatcagatggttttaggtgtgcagccttatttctgaattctctatagtgttccattggtttatatgtctgtttttgtaccagtatcatgctgttttggttactgcagccttgtagtactgtttgaagttgggcagcatgatgcctctagctttgttctttttgcttaggattttctttgctatgtgggctcttttttgattccacatgaattttaaaatactctttctaattctgtgaagaatgtcaatggcracttaatgagaatagcattgaatctataaattgctttggactgtatggccatgttcacaatatttattcttcctatccatgagcatgtaatgtttctcatttgtttctattttctctgatttctttaagcagtggtttgtagatctcattgaagaggtccttcacttttgttgttagctgtatttgtaggtatttattctttttgcaacaattgtgaatgggagttcattcatgatttgttttttgcacattgattttctaacctgagactttgctaaagctgcttatcagttgaagaagcttt

SEQ ID NO: 885290 - DNA, 636 bp, Homo sapiens
gaaacagaaagtcggtttcttggcagcctcagtttccccccaaataagaacaataaccaccctctacttgtctaataaagttgccactaggagaggtggcctggggtagtggcaatggcataggctctggaatcctggctgaacttgggcaagtcatctcagccctctgtgcctcagtttcctcatctgtaaaatgggcatgttcatagcaccagtttcatagtcattctggggattaaacgaggtaaggcggccgggcatggtggctcatacccrtaatcctggcactttgagaggccgaaatttgggagggagcactttggattgcctgagcccaggagtttaagaccagcctgggcaacatggcgaaaccctgtctctacaaaaaatacaaaaattagccaggtgtggtggcatgcatctgtggtcccagctatttgggaggctgaggtgggaggatcacctgagcctggggaggtcgaggctgcagtaagccgtgattatgtcattgcactacagcctgggcaacaaagtgaaggcctgtctcaaaataaatgcaaattaaaatactttttaaatgagataaagcatttcacacatacagaacactcaaatgttgctgctgttgttaatatt

SEQ ID NO: 885291 - DNA, 686 bp, Homo sapiens
ctgcctatataattcaatcataaagacacatttagactaaaagcaaagacatagaaacagatatttaatgtaaatggaaaacaaaagagagcaggagtggcaatatttataacagacaaaatagatcttaagtaaaaaaactgtaaaaatggataaaaattgtcattatatagtgataaaggggtcaagtaatcaaaaggatatgacaactttatttcagacatttagagagaaggatrtaacaactgtaaatatatacacccccaacactggagctcctaaatatatgaagcaaatattaacagatctgaagagaaagacagattgcaatatgataatagcaggagaatttcaaaccctattttcaataatgaacagatcatccagacaaaaaatcaataaggaaacattggacttgaactacacattagaccatgggtgtccaatcttttggcttccttgggcaacattggaagaagaagaattgtcttgagccacatataaaatacactaacaatagctgataagctaaaagaaaaaaaaatctcataatgttttgagaaagtttacgaatttgtgttgggtcacattcaaagccatcctgggccgcatgtagcccatgggccatgggttggacaagcttgttttagaccaaatggacctgaatgacatatataggacaatat

SEQ ID NO: 885292 - DNA, 523 bp, Homo sapiens
ataaggatgctcattttcaccacttctattcaacatagtactagaagtcctatccagaggaatcagacaagagaaagaaatgaagggcatccaaatcagtaaagaggaagtcaaactgtcactgtctgacaaataatcatatgtcaaatatgatcatactcctaaaaaccctaaagactcatccraaagtcacctagatcagataaatgaattcagtaaagttttaagatacaaaatcaatgtacacaaatcagcagcactgctatacaccaatagcaaccaagctgagaatcaaatcaaggactcaagcccttttacaatagctgcaaaaaataataataataaaatgcttagtaatatacctaaccaaggaggtgaaagacctttacaagaaaaactgcaaaacacggctgaaagaaatcatagatgacacaaacaaatggaaacacatcccatgctcatggatgggtagagtcaatattgtgaaaacgatcatattgctaaaagcaatctacaaattcaa

SEQ ID NO: 885293 - DNA, 647 bp, Homo sapiens
tggtaaaatggaaaaaaatttaccatcctcttacctagatgatctatgaaagccttttcattacagctctagagttatataatcaagttaaaagttgatgatttgtgtgagtggcattagtctggctctatcacatcactgcaacagtgtggcaggcctccataacaacttttttagtactgactgactggttaagctaaatattaaaagctagtgcccttayacaaatgctgcaatataacaaaagtccaccatgagttttgcttaggcctttcctgagccttaaagcatgacaaaataatgaaagaattcttaacagggcccatttaggattgcacaagttttattgagggtctgaagaaactctccaggcctccacaaacaagtttattggaaatctgaaggaactccccaaaactctgtgatttagcaggagacaagataagtgcaatcaacccagcacttggcacttggacccatttagattgagtaaacttactgaggctccagaagaaggtctccaggacccagaccttagttatagattaaaagaagttaatcacttatgtctttagatgaatgcacacttacacgaaaacatatagcttagaaggtatataagctctgaaaaacttcgtaattttgag

SEQ ID NO: 885294 - DNA, 631 bp, Homo sapiens
ataacaataagataccacttcacagaaatttaaaggcttagtaatgtcaagaattcataagaattgggaggatggggtaatcttggactgcaaactaaggaagccacactggaaagtgacttgccagtatttatgcaacttaatatgttccagaaatctcactccaaggaaacttgcacacaggtattcatgrgaacagatatgagaatgtgcatctcagcattgtttgtagtggcagaagcctggaaaaacatgggacatgataggcagggacagaactccatcatatgtgatatatgtattcaattgaaaactgggcagtggtcagaattaatggaccagacatacattcagctatctagctacctcttgaagacatagtgtcaagtgggaaaatatagaaaacaaaacaaaatctgtatcaaagtaccagtgtaaatttaaaacactctaagcaatacataatttccaagcatactggtgatgcctgtgagagagacagaaaaaatcagaatgggcattaggaataaagagaaaaaagaaggccttatatagacctgtgataccagagcataatcaatgctattctttcagttgcttatgggaactaaaattaaacagaacaaatttg

SEQ ID NO: 885295 - DNA, 644 bp, Homo sapiens
agatcctagaaggttgtagaaattcactaaagtaatgcttccttgtcctcttgtggatgatcagtaggctttcccctggcaatgaccctatatcaataaaaaaactttttcttttcttcttttctattttttcgagaaagagtctcgctgcagcctcaacctcctgtgctcaagtgatccttttgcctccagcctcccargtagctaggactataagcatgtgccactatgcctagctagctttttttctttttaatttttttgcagaggtagggtctcactatgttgcccagattggtcttgaactcctggtctcaagcaatccttttgccttgacctaccaaagtattagtattacaggcatgagccaccaagcaagtccagacttttctacttcaaattaatattagtggggagggaggtgttcataatttacctctctttattatttcatttattctaacattgctacagtgacaattccatggacatacaccagctactggcggggaagatcgttcagaccagaagtggtaagaaatccttgaattttaaatatgtcataggtagttcacaaagaggacaaaagataccatttactaaacattcgccatctgttctgacataatattatcatcattgta

SEQ ID NO: 885296 - DNA, 644 bp, Homo sapiens
agatcctagaaggttgtagaaattcactaaagtaatgcttccttgtcctcttgtggatgatcagtaggctttcccctggcaatgaccctatatcaataaaaaaactttttcttttcttcttttctattttttcgagaaagagtctcgctgcagcctcaacctcctgtgctcaagtgatccttttgcctccagcctcccaggtagctaggactataagcatgtgccactatgcctagctagctttttttctttttaatttttttgcagaggtagggtctcaytatgttgcccagattggtcttgaactcctggtctcaagcaatccttttgccttgacctaccaaagtattagtattacaggcatgagccaccaagcaagtccagacttttctacttcaaattaatattagtggggagggaggtgttcataatttacctctctttattatttcatttattctaacattgctacagtgacaattccatggacatacaccagctactggcggggaagatcgttcagaccagaagtggtaagaaatccttgaattttaaatatgtcataggtagttcacaaagaggacaaaagataccatttactaaacattcgccatctgttctgacataatattatcatcattgta

SEQ ID NO: 885297 - DNA, 621 bp, Homo sapiens
agtaataagtccttttcatacattttttttttaatctccacaacagacctttgagaaaagtgctattaagatcatccccattttacagatgaggaaatgaaatctgagagagtagtctgaccaaggtcacatagcagttattggtggtattgtgtaggttcaattccatactgtctgaacccaaaggggatgctctaaaccttcaacctgctttttaaattataaactacagtaactaaataagataaagcattattaactagtagtttttctttagcttgactagtatatgaatattgttgcatgctaaggttaaagttttgaaagttgtaaaaatggaatatatccactttggacttggggtagaggctaatttttttgygtccttttctatttgagtgcttagagataacttaaaactaactctaccatgtcgtagatataatttttaaatttaggcgtctgatctatattattggtagaatattccctcatctgtaaaatggtgatgataataggacttccctcagaggcttttataggagtaaaaaaagataatggataatgtatgtaaagggcttattactatgcttagtgcatagtaaaaggtcaactaatagt

SEQ ID NO: 885298 - DNA, 621 bp, Homo sapiens
agtaataagtccttttcatacattttttttttaatctccacaacagacctttgagaaaagtgctattaagatcatccccattttacagatgaggaaatgaaatctgagagagtagtctgaccaaggtcacatagcagttattggtggtattgtgtaggttcaattccatactgtctgaacccaaaggggatgctctaaaccttcaacctgctttttaaattataaactacagtaactaaataagataaagcattattaactagtagtttttctttagcttgactagtatatgaatattgttgcatgctaaggttaaagttttgaaagttgtaaaaatggaatatatccactttggacttggggtagaggctaatttttttgtgtccttttctatttgagtgcttagagataacttaaaactaactctaccatgtcgtagatataatttttaaatttaggcrtctgatctatattattggtagaatattccctcatctgtaaaatggtgatgataataggacttccctcagaggcttttataggagtaaaaaaagataatggataatgtatgtaaagggcttattactatgcttagtgcatagtaaaaggtcaactaatagt

SEQ ID NO: 885299 - DNA, 626 bp, Homo sapiens
atcaccttggggattaagatttcaacgtaggcattttgtggaatcacaaccactatgggactataggactataagacttccacactgtcaccttttctcttttgagaggcttatgagtgtcctgagctgtcaaaaaagaggactagccatttaggagcagtcctgatggggatcagaaaattctttggacatgtgtgggagactcttctgcaggacagtacaagggtgaggtggctggcaagggacagcccctacctgcctgagaagcgaatagccagggaaaggagacaagggctcacctggcacaaggcttcctgctgtgagcaagggatggtgmtttgaactctctcagggctaactgcctcttccaggtggccctgcctacaactgagttccagatactgttccaacctcctctgagctccattgagtcactgggcactcccagcccaggtgactttcatctcatctctccaggagcaggctagtcatcctctccctctatcccagtggttctcaaccttggctgcatattggaatcatttggcagaacataaaaagataatgatgcccaaaccctactcccggagatcctgatttaattggcctggggtgtgtcctaggcg

SEQ ID NO: 885300 - DNA, 570 bp, Homo sapiens
tgtcagggtcaggatttgaacccatctttatctgagtccaaagctcttgaactgtatgtatgtctagtgacattgagggtggacagtcacctttctctattttgccacattaccaactaaccctttagtagttttcatagtgctttccaccaacattagctcatttaatcttcacagcagwgaagctatgcaactcactcaagtcatcaacctgaagaacccccacttattctcaaggaccatgctgagctgtcacttattaaatcacctagactgagtcgggttcctgtgtcagatgcttttactgtcacaccttgtatttgctttgtgatgcacacttcattactgtgacttaagtgtcatcctacagaaaacttcatgagagcagaaactatgttgttcttgcttgccactctattaccacccctggcccaacagtaaatatctgttgaataagtgagtttctaaaagtcacggggtggaagctggatgattctgagtggtttgcaacataatagtatttatcgcactgtaagttgagctggtcatgtgaaccatccagcaggaagc

SEQ ID NO: 885301 - DNA, 580 bp, Homo sapiens
caatctcatttacaatagccacaaataaaataaaatacataggaagaaaacaaaaaaagtgaaagatctcaataataaaaagtataaaacattgatgaaagaaagaggataacaaaaaaatggaaatatacttcatgttttcatagattggcagaatcaatattgttaaaatgtccacactacccaaagcaatctacagattaaatgcaatctctatcaaaataccaatgactttcttcacagaaatagaaaaaaaaatcctaaaatttattgagaactacaaaagacccataatagtcaaatatatcctgagaaaaaaagaacaaaactgaagtaatcacattacctgacttccagttatcctatggagctatagtaacaaaagcagcatggtactgacataaagacacatagaccaatagaacagaataraaaacccagaaataaatccatgcgtcttcagtgaactcatttttgacagaggtgccaagaatatacactggggtgaggacagtctcttcaataagtggtgctgtgaaaactggatatccatatgcagcagaatgaaactataccccta

SEQ ID NO: 885302 - DNA, 597 bp, Homo sapiens
tgatgctaaaatgcttgcagaaaatcatgtggaggaggttatggagggctgggtgcaggaggagactaagcattcttactttatatcaggtggtccgcagagacctgggtgagagggagacatctgaatagagagctgaaggaaatgaaacaacaagccaaaaggatacgggaaagagcattccagcagcaagaacagcaggagcaaaggccccgcatcacaaacctgcctgaagtgttytaagaacagcgaaggtcagtgtgactccagtgatgatggcaagagagagagtaccaagtcatggggttagagagataacagggcggccgggcatggtggctcacacctgtaatcccaccactttgggaggctgaggtcaggagtttgagaccagcctggccaacatggtgaaacctggtctctactaaaaatacaaaaattagccgggtgtggtggcgggtgcctgtagtcccagctactcgggaggctgaggcacgagaattgcttgaacccaaaaggcggagattacattgggttgagatctcgccactacactccagcctgggtgacacagagagactctgtctcaaaaaaaaa

SEQ ID NO: 885303 - DNA, 667 bp, Homo sapiens
gaaattcaaattaattggaaataatgacaagctccaaatatcaggagacatcttcagacatcagttggaatcatagaaattacatttgaaacaattggatcaagtcagctcttttcatacaatggtacaatgaacccatgtctgggaatcagggagccagttgtattctgggcttgacttactgagtgaaattaggaaaggcattcctttcttcaggggtccgtgcaatcaagataaagcaaagagggaaaatacatcyctctacagtgattttatttcttccttatgcccttcaagaattgttttgttaatcaagtgtcaatatctctagggaggccatgcaggggcagcaaagtgaaacatgttggggcctcatacctctctttgaagtcctgggtctccaagcccttgtctggttccagcactccttggacaaggctgtcttccctagtaacagcacctctcattgcttgggaagttgggagaactggtaccccatacgtgcctttgaaacttgatttgtgtctggaggacacatccaatgcatggatcacattcagaattattgcagagggaagcaatgaaatggcagcaagaaaattaacatcttttcaactcgcccaagacatgactcacagtttcttttttctgagttgatctccatcaa

SEQ ID NO: 885304 - DNA, 655 bp, Homo sapiens
cttttgggatatacccagtagtggaattgctgggtcaaacggtggctctgttttaagttctctgagaaatctccaaactgctctccacagtggggctgaattaatttacataccaactaaccaaaggggaaagaagatataagcattctcttttctccacagcctacagcatctgttgttttttgactctgaaattacagccattctgcaacagtcccctctggaacatcaacccagtggcctgagaactgttcctgtaccccagcacccacaggggctgctgctttctctgaattggaagactcagagtgcaaacctgcctgacccagcccccacctggctttgttctgccacctgccctggtagcttaatacaaaaaacagaaactcttggaagctctatggccccaactattgcctgagaaaccagagggcaatctaaagcaagcaaaaatcccactgctactaccatagctggtgcttttttgcaagcaccacctccgggstggaggccaaccaacacagtccattatagcatctcccggtagaataacactgcacctaggaaggagaaaatggctgaggaatctcagctatcaccactgcctgtacccctctgactaaccaggaggtactgattctgtccaagtgaccag

SEQ ID NO: 885305 - DNA, 597 bp, Homo sapiens
gcttctgctaaatacctgaagttaaaactaatgagcgtggagtaattgcaatagacagtggcctgctgtgtttcttgcaggagtggagctcagaattcaggacccctcgctcatctgcaggtgtgtggggtaagccagggtccactcaggactgggctgttgtgagctggcctgggggccagaggtgctgggacggcctccaggatgtgagcrtccaccttgggacccgtggagggagctgcctggtgttttgagcaggagaggttgagctttctcccctttccttattcacttcactggaggaatgctgtgcccaccaagggtctctgctccagcctgtctgggtggagagggccagtgatggataacggtggaggggagtggccagagggggcccacagtgctaacatctgtgttgcgggggtgcagaggggcaagtcctggagtggtgggcttggagccaagaggacccgggcagaaaggaagcccccacagtgctgaccacccacgtgggaggaggaataagagctcttccagcttccgcaggtgttgggtcgggactcacgggggctccattaaaggaaaggcaggctgagg

SEQ ID NO: 885306 - DNA, 614 bp, Homo sapiens
cataatagtacttaaaaatagaatcactatccatattaaataaaataaaatgatagttccatctgaggttttataaaaaacatgtgggatggtggaaattgttttaaagattggcagactgtaaaaggaaagtggaagttttctcaagtgcattgctctaagggttaaccataattcagtatttacttgcgcacttgcagaaaattagctcactgtttgttttatgtgatgagttgttaatattacatattatatcaaactgacatcataactaaacagagacgmtgggcagttatcataaaaagaacaatgagaatctaagtatacaagttaggttttccctgacaagtgagttattctgcacaatgtgaaattagtcattactgctttctggttggagacactttggtgtcaatttaaaatgtcatcattatccaaatcttatttattataattgtgggtgagattcagtttgttgcaatgagagcctattacatcgttctgttatttttaaaaccttaggaatttcacacttccccaagtgaaggactgatgtgtggtgctagaaccattcctctgatggcaaagccattccagcaacattcttgacatgc

SEQ ID NO: 885307 - DNA, 611 bp, Homo sapiens
gtctagatctctagcaaggctggggaagttttccttgattattccctcaaatatgttttctaaacttttagatgtctaaactttagatgaggaagaagagtcttcctcagggacaccaattattcttacgtttggatgtttaacatcatcccaaacttcttggaggctttgttcatttgttcatttttttaaattcttgtttctttgtctttggtggattgggttaattcaaaagcctgtcttcaagctctgaggttctttcgtctgctgttaaattctattgctgagaatttccagtgcattttgcgtttctctaagtgtgtccctgatttccagaagttgtgattgttttttatttatgctatctatttcactgaagaattttcctttcatatcstctatcatgtttttgatttatctaacttgggcttcacctttctctggtgcctccttgagtagcttaataatcaatcttctaaattatttttctggcaattcagagattttgtcttggtttggatccattgctgatgagctgttatgatctttcaggggtgttaaagaatcttgttttgtcatattaccagcattgtttttctggttccttctca

SEQ ID NO: 885308 - DNA, 686 bp, Homo sapiens
gaggtagccttctttgggttaaatctgcttggtgttatattctgttctttttttttaattattttattttattttattttatttttgagatggagtctcgctctgtcacccaggctagagtgcagtggcacaatctcggctcactgcaaactccacctcctgggttcacaccattgtcctgcctcagcctcatgagtagctgggactacaggcacccgccaccacacccagccaattctttgtatctttggtagagacagggtttcactgcactagccaggatggtctcgatctcctgacctcgtgatctgccctccttggcctccccaaagtactgrgattacaggcatgagccactgcacccggtccttggtataatattcttgtacttattgatatttttctttgggtttgggaagttctttgtttttattatccctttgaatgaactttctattcctatctctctacctcctctttaaggccaataactcttagattggcccttttgaggcaattttctggaccttggaggcctacttcattgtttttattcctttttctgttgtctcctctgactgtatattttcaaatagtctgtcttcaagctcactaattcttctgcttgataaattctgctgttaaaagcctgatgcattcttcagtatgccaactgcattttttca

SEQ ID NO: 885309 - DNA, 639 bp, Homo sapiens
gaggccatggcaatcactattccactttctgtttctatgtatttgcctattctggacatttcatataaaaggaatcgtaaaatatgtgaccttttgtatctgtcttctttcacttaatatgatgttctcaaggttcatccatgttatgatatgtataagtacttcatttttaaatgccaaataatattacattatatgtatttactgcatttttttaatccactcacagttgatgggtgtttgacatgtttccactttttggctttatgaataatgccattatgaatatttgtgtgtaggtttttatgtggtcatatgttttcagttctcttgggtatatattcaaaaggaaatcgctggatcatacagtaattatatgtktaactttttgaggaaatgtcatactgttttttcatgtggctgcaccattttgcaatcccactaatggatgagggttccaatttctccacatccttgttaacacttgttatttcctttttagccatcctactagggggtgaagtaatatctaatcatggcttacatttgcatttatctgatgactgattgtgttgagccttttttcatatttttttgccatttgtatgtgtttgcagaaatgtctattcaaatactttg

SEQ ID NO: 885310 - DNA, 656 bp, Homo sapiens
aagatatacaaacatccgacatgtacatgaaaatatactcaaccttactggtcattagggaaatgcaaattaaaaccacaatgagataccagtatacacctactaggatggctacaatcaaaaaaattcacaataacaagtattaacaagtatgtggaaaaattgaaacccacattaattgctggtgagaatgtaaaactgtccagctattttggaaaacagtttggcacctccytgaaatgttaaacagagaattaacgtatgacctggcaattctactgctaggtttaaattcaagagatatgaaagtatatgtctactcaaactcacatccatagcagtattattgaataatagccaaaaagtagaaacaacccaaatgtctgtaactgatgaaaggataaacaaaatataatataaccttgcaaaggaataatactcagcaataaaaagaaatgaagccaggtgcggtggctcaggtctgtaatcccagtgctttgggaggttgagatgggaggattgctggagtccaggagttcaaggctgcagtgagctgtgattgcaccactacactccagccttgatgacagagtgagactctgtctctttaaaaaaagtaaataaaaaaaaataaaaaaaaaatgaaggactaatat

SEQ ID NO: 885311 - DNA, 588 bp, Homo sapiens
tccccgttttaacatatggagacttaaagcaatgttatctaaagaagctgtcaacgagccaggaagaggcccagcaatgaagcctgcgtttttccttctatactggtgctccccatttctaacctcactctgctcaaataagcagcttttccccaccccgagaaatatacttgtccctctgctcacctgaaatgtcaacatcagtgtcttgataggcttttgggggcacctttgtgtctgttattatctgtccacttcacatctacattttagcccttaaaagcctacaggcaagatttcttggacaaattccagcatcattctagactctakaaagattctgaatgaacgttctttctttctagaatccactctaaaacctgtaatgatccacacaacctgggaacacatgacttgggtttgaagtttcctcctaaatctccgcactgaataggactcaaggttaagtggcttctttactgtgcttcgcagcatacacatgtctccccagaaatgctttctatgtagagctccttctaaacaggaaccatatccaagttttgaaacaaattaaaaattatcatcatt

SEQ ID NO: 885312 - DNA, 705 bp, Homo sapiens
gctatctaggatccttttcatttccagactgaagcacctctcatcttctgtggagagaatcttgatcccttagctgcagctcactccaccctgctgtattagtcagtattcatacatctatttctgtttccaagaaatctgttgaaatctctataaagcagattcctatgttcttytttattgtaggcttatgacattttaattcctgagctagaagattcctgaacttaaattgctgtatggtactctataacatggttgtatgtttaattgtagcaaatgtataaacaatgttatgatgaagatcctggtagctaaatcattacacacatccatgattttttatttagaataaattgtgagaaaaattgctgcattaaaatggaagcagttgtgttttaaaataaattaaacatgcatttaccttagggtccagaaattccactcataagtatttacccaaaagacgtgaaacataattccacacaaagacttgtacacaagtgttcataacaagtttattctatccatgatggctaaagactggaaacaactcaaatattcatcaactgatgaatggataaacaaattgttacacagtggttcctccttatccactgtttcactttctgcagtttcagttacttgcagtcaacttcggtccaaaaatattaagtggaaaattccagaaataaacaatttcca

SEQ ID NO: 885313 - DNA, 652 bp, Homo sapiens
caccgaaatattttttagataattttttcagtccagattattctgtgtgggaagctaaattagagaaaagaatgttgcaatgtctccagtactttttctttgtatcattctttctaaggagttactgcagttttatgtatttcagaatgaaatcaaatgagagctgtataaaatcttcagataaattttgattaattgttttaatatctaaaatacacaaaaatttactttttcttgatttgttaaagaaataaagtgaagaaatttaatttgtaktatgtgtttgtgcaagtcacaaatagcccaaactgtataggttgaacatggcagagttctagtactcactgaggataagaaaaagaataaaaatggaaaggggaagttcacagaaaacatgtaattttctccactattctcagtggaaaggctgcatcctaaacgatcagaaatcctggtgggcctgtttgctcctccagcttctctctggtcaagattgaatttcccaatagttcaagacgctgactgggagcttatgtttctctctacagcttgccttgcactgattctggaagcaaattgaagatgtccattcccagatagaacatatcaggttatattgcaagctcagtgtatctttgaaaggcaatgcttt

SEQ ID NO: 885314 - DNA, 652 bp, Homo sapiens
caccgaaatattttttagataattttttcagtccagattattctgtgtgggaagctaaattagagaaaagaatgttgcaatgtctccagtactttttctttgtatcattctttctaaggagttactgcagttttatgtatttcagaatgaaatcaaatgagagctgtataaaatcttcagataaattttgattaattgttttaatatctaaaatacacaaaaatttactttttcttgatttgttaaagaaataaagtgaagaaatttaatttgtagtatgtgtttgtgcaagtcacaaatagcccaaactgtataggttgaacatggcagarttctagtactcactgaggataagaaaaagaataaaaatggaaaggggaagttcacagaaaacatgtaattttctccactattctcagtggaaaggctgcatcctaaacgatcagaaatcctggtgggcctgtttgctcctccagcttctctctggtcaagattgaatttcccaatagttcaagacgctgactgggagcttatgtttctctctacagcttgccttgcactgattctggaagcaaattgaagatgtccattcccagatagaacatatcaggttatattgcaagctcagtgtatctttgaaaggcaatgcttt

SEQ ID NO: 885315 - DNA, 680 bp, Homo sapiens
actggaagcagagatatcactgtgcttttgtgataaggccctggaactagggacatactgataagaaaagaatagatggatatgagaggcctaaaggttatcggtgtgatgcaatgatggatttgatagagtgatagcatggtttactgaaataggtaagctggcccrggaagaagggtgatgagttcttatctaggtaagtatagtgggaggagatgacagaatatctgagtgtaagggccccaaaggaagttgaaagtacatggaagcgcaggagagaggttggagtcaaaaggtagagtcaccagcaggagagaattagttgaaaactaacaccgtgagttcttcagtgaggggtgcagagctcattttagcttttgagaatgcctaagttactatgtgcccaggccatggcgctaatcaagaagagatcgctagaaaagcaggaaccaggaagttgttatgcctcagttcccatgatagggttgtgaaattgagagataggaaattacttgtatgaatacaggaattttcctaacagcctctgattcattgctagttatgtctcacaaattccacgtaaatcgttgtaaatcacaccactttctgatgaagaatatatgtaccatttggctttgacatataatgaattacaatgttatcaaaattgtgatttcatc

SEQ ID NO: 885316 - DNA, 690 bp, Homo sapiens
gctttggttttaggatcagccttgcttacagcatgatatgtagtatgtggttaaggttttcttttcggctcttagtatttattttttctcttttacatagagtttttagagcagttttaggctcaaagcaaaactgagcacaaagtacagagttcccatatgtcccctgtccaccttccaccacccctgcctctcccactataaacattccacaccagagtggtacatttsttacaagtgatgaacttaaattgacattattatcagtcaaagtccatagtttacagtaggactcactgttagtgtatattctatgggttttgacaaatatgtaatgacatatattcatcattatacatgtcacacacactagtttcactgctctaaaaatcctgtctcctgccccgtcccctcctcccccaacccctaacaagcactaatcattttactctctccatagttttgccttttccagaatgtcatgtagtcagaatcaaacaataatgtagccttttcagatctttcacttagtagtgtgcatttaaagttcctctatgttttttcttggcttcatagcttatttttttagcactgaataatattacattgtcaggttgtgccacagtttagttattcattcacctgctgaggaaggtgaacttggaaaacttgaagtttgcttccaagttt

SEQ ID NO: 885317 - DNA, 690 bp, Homo sapiens
gctttggttttaggatcagccttgcttacagcatgatatgtagtatgtggttaaggttttcttttcggctcttagtatttattttttctcttttacatagagtttttagagcagttttaggctcaaagcaaaactgagcacaaagtacagagttcccatatgtcccctgtccaccttccaccacccctgcctctcccactataaacattccacaccagagtggtacatttgttacaagtgatgaacttaaattgacattattatcagtcaaagtccatagtttacagtaggactcactgttrgtgtatattctatgggttttgacaaatatgtaatgacatatattcatcattatacatgtcacacacactagtttcactgctctaaaaatcctgtctcctgccccgtcccctcctcccccaacccctaacaagcactaatcattttactctctccatagttttgccttttccagaatgtcatgtagtcagaatcaaacaataatgtagccttttcagatctttcacttagtagtgtgcatttaaagttcctctatgttttttcttggcttcatagcttatttttttagcactgaataatattacattgtcaggttgtgccacagtttagttattcattcacctgctgaggaaggtgaacttggaaaacttgaagtttgcttccaagttt

SEQ ID NO: 885318 - DNA, 690 bp, Homo sapiens
gctttggttttaggatcagccttgcttacagcatgatatgtagtatgtggttaaggttttcttttcggctcttagtatttattttttctcttttacatagagtttttagagcagttttaggctcaaagcaaaactgagcacaaagtacagagttcccatatgtcccctgtccaccttccaccacccctgcctctcccactataaacattccacaccagagtggtacatttgttacaagtgatgaacttaaattgacattattatcagtcaaagtccatagtttacagtaggactcactgttagtgtatattctatgggttttgacaaatatgtaatgacatatattcatcattatacatgtcacacacactagtttcactgctctaaaaatcctgtctcctgccccgtcccctcctcccccaacccctaacaagcactaatcattttactctctccatagttttgccttttccagaatgtcatgtagtcagaatcaaacaataatgtagccttttcagatctttcacttagtagtgtgcatttaaagttcctytatgttttttcttggcttcatagcttatttttttagcactgaataatattacattgtcaggttgtgccacagtttagttattcattcacctgctgaggaaggtgaacttggaaaacttgaagtttgcttccaagttt

SEQ ID NO: 885319 - DNA, 611 bp, Homo sapiens
actctgtcacctaggctggagtgcagtggtgtgatcttggctcaccacaagctccgcctcccaggttcaagcgattcccctgcctcagcctcccgagtagctgggactacaggtgcccgccaccacacccagccaatttttagatttttagtacagayggggtttcactatgttggccaggctggtctcaaactcctgacctcttgatctgcccgccccagcctcccaaagcgctgggattacaggtgtgagccaccgcgcctggctgaaacttttaattttaaatcataggttttttttctgaaagatgaatatataattttttcagaaaatggtatatgtttattcattaagtagaaaatatatgtgtaaccacttctaatgtaacatttcccttggctaatattatcctggactgcttatccaacaaccagtgtagttgacctcagagaataatccaaaaaagtggtaagggctgaatcaagcttaataagtggcctacctcttgcatctgcaagatttgtcttgggaacactgtatgacacaactgtggctgcagttgcagctgaactgttatggttcagaatgttccaaagctcaggtcttcctct

SEQ ID NO: 885320 - DNA, 603 bp, Homo sapiens
gtggtggtgtttgtccaagatgacggtgctcctgctctgtcatttaggacaagtcagaaagtcaaggcatgtcatagcttgtctgtgaaagtcatgaaataatttatgaaaagggaatttatgcaagaaatgttgtacaacttaaaggtgattaggccttctaaatgctttatcaaatgccactgtgactcttacctgtacaaattgcctgctttacagctagataaggcctgggacacatggagttagatgctgggataagtcaaaccttatctgcgcttctgtctaggtcctaggctccacacctagtacataattaaaatcccaaacttaccaaggttttcaccaaaagtaaaggttgctaagagttaacaatgtaatgtgtrtttaagactactgaaggaatagtttatctgtaaggtgtgtaaggaaagtaaaatatacttttggtaaacagattataaggaggcatgagaatgtggatttgtgcctagattaaaagcctaaaggattgttttaaattggataaaataaagatgaaagtttaagcaagttgtggaagtttgatgtaaaggaaattctgtgtgtaaacatattggctga

SEQ ID NO: 885321 - DNA, 581 bp, Homo sapiens
ttggagaagtcctgaacacttgttaataatcttttattccactagaatgccagagatcgcaatcctagttgtctttgtgttcccacatattagataaaagccatttctccatttaaaaatattcaatatttcaaggccccatgtgcacttgaagagagataaatgaagatctcaggatgagatggaagaagtgaccaatggactgaggcaycagagaatgtgagagtgatgccagggaatgaatgatggagatataatggtcattggccctaagctcttattctctgtgtcttggtgtcctcatctctaaaatgagaatggtgccttctttttatgtttattatagagattagcaaaattatctagtttgaaattctcacaagtggaaactatcacatttatgatttcagctatcaaaaagttattctaaaagttatataacataggataatgcatattttttcttaaaggtagtttcctcttaacatttttgtgctactttcatgaagtagtatacataaatcacccagcactatatctagcatgtggtatagtatatacatatactttctttggaaatt

SEQ ID NO: 885322 - DNA, 643 bp, Homo sapiens
cataagcaaaactcatatgtgtccaaaaagagaaggttgccataagctagtgctctctgtgacctgttctcctaccatcactaaaatgctgccttcctctaaaacaaagccctttcagaactgagctgggctgtggtttccacggagttgttgttccattgttttggcttgtcttctgtactcagacccctataggggacagagctcccatgggggtaagttcccctaagtaaaaataaatgtaggaagataagccgaactgtttcatggagyaccagttctgaaggcaatccaagttccacaaattccccgccagctgttggccaggctgctggccccagtgcctgtacgggaagtgtgtgtcactttctcacacaccacctcagataactctgccctgtgaagattatttggaccctacagactcagagcctaagaacatatagtgaaagttagataaccaaacataaccctcctcctccggctttggtttgattgccttcacattttggtagagtcagcctgttcaggagtttggtatgtgaaagcattccttccagagccggatctttgtgggggtaccttttcacactgtggggagcagatagtagagtggccaagagcattggctatgctgctggat

SEQ ID NO: 885323 - DNA, 644 bp, Homo sapiens
tgaatgagacaaagcccctgtgttcatgaagcttatattttagtgagggagacaaaacaagaaacaaatgccaatcaggtagtgacaagggcattgtaggaaacaaagcaggctgagggagtggagacagcgagatgtgtggggagaggaggtggtcttggaaagcatccccgaggaagtgggccctgtgagtactcaatactcagaaccatgactcaggacgactgccctgaactacactgaggcttggtcttgcttagattagggaaatagtccgaccatggaaaacggagttcccacccaacctctccaccttcaaatgcacctcgatgctgccatagccctgttgcatagattctttctcctcttctccagtctgtggcttgtcattgaattcataaactcagctctaacacaaactgccactccaaaacttctccttgagattctttgaagcccggggtaaaaagtagataccaataaatggamcacttttcctctgaactcagactccgtggaaagctggcttgcccaacatcagccacatcaatttcagattcactaaacttttactacctgcccatgatgtgctaggcatttgttttagacttcaatttgctttagagttttcttatactttatcc

SEQ ID NO: 885324 - DNA, 611 bp, Homo sapiens
acagtggatgaaacagaggctcaaacatatgaaattacacaggtggagggtcagggagccaggactggagttgaagtatgtaaaccctaagctcaatgcaccttctgctgccctctactgggtgccttctggccaccctactctttgcctcatgatgatgtcagaattgaggcacaayagaattgatgtcacagtcttctttgtccatgaactttttgtttctgcccactgaatacagggtcttaaatcccacagtttttttggagtagattaggcatgttcaggtacatagtcccaaagaggatgatgctgtcataggacagcctggcctggcacttggggcccttgacttctcattctggttctgctactaatgttttatgtaaccttcagaaacccttcccctctctgagactcagtttccctatatggaaaattgccttaccaattccccttctaggtatctgttaattctgtagaaacactcaagctctgggggcacagatgcatgtgctaggagtgttcaatgcaacactgctcataatagtcaaatattggaaacaataattatccaccaaactattgtagcaaataaagacaatgaagggcaa

SEQ ID NO: 885325 - DNA, 615 bp, Homo sapiens
tttttatagttatctttgaaagaagcccatcctgtcgcatggacattgtatagcatgaagaaactcttctcctggtagggtcagatgacaggggcattgctgcaacacctttggtttgttttgattagcagttaagggtgataacgttcagtttaaagtgagcctttttttctcatctgctgtaaaacattctatcctcattctttggttgtgggatttgatgcacactttcatttccaccttctcttctgcctttatgaatttgtagactttgattagggtgcctctcaagctacatcttcacagatggaggcagtttgatttttaaaatctgtttttttcacacaggtcagtccatcagtcatctacttcctgccacsccatcccagctatcatttctcaacactttgaacagttgtcttatcctctctgaagacttctcttaggctcctttccttgcccaaataagttgatgattcattcttctctgcaacatatgtcccttctcatatttttatcattgtttatgatcttttttccttaagtgaaacaaaattcttcaaagaaaaacacagtatctcatgaaggtctttacctctggaatttaggagacca

SEQ ID NO: 885326 - DNA, 570 bp, Homo sapiens
tgcatgcactgtggacctcagaggagtttctcaggattcagttcttccatcctcacctgtgaaatgtgccggtggttgagatggctaaacgttctgattttgccattttgtgatgtgaagatagataactgaaggacactgaagacacatttggcaaactcttccctgctatctggagctgcttgttggaggaaggttgagatgagcgtttatggtttgcttcagytcctctgctgtgcaccaggcctgatgctaggtggggtgtaggaggcacagctgctgctttccaggaggggacagtggctgccagcaatagcaggtaacatttatggagcactcactttatgccagactatgcattagctagctgtatcatcaccacaccctacagggtagattctattcttactctcctttaagagttagtagcttctctcacatcacacaactaagcccacctttttacaccttacagaataatattccacttgacattcaaggagtgccttttgtgtgccaggcactgtgacaggtgagttataaatgtgctctgctttaatccgcccagca

SEQ ID NO: 885327 - DNA, 634 bp, Homo sapiens
aaacagtgtaaattgagagctcagtttcttagcagtaacatgtatttagtgtgtttggaaggaaaacagcctaaattatggaaaagtgtgatgatcaagatctgacataaatacatcaacaaagactaaatgtagacacagacatcagaaatgcctttctcacatgctgcaggggtgtctcctttgcctggcagagctttagaaacacatcatgtgccttcagggggtgttatcttggctgtggtgcaggcaaagcctaagctgctctgatctttgggcctggagtcacctggaggaaggattttcagtatcatattccagattctgtacaaaggttttctgtctgacactagagggtttttggctgatgtgatgctgcagatttggtcagccttttggtgttggttcttgtgtttctgcgtgtgctcacataggactcctagcttctagtactgaaccttagttctgttygcatctttttgtgacctctgttgatctgggagcagctttccttctttaaccaaggctctgctgtccatagattgctggtgctgaataagtccaatccactactgccctcgatgctcccgttttggggttctctctccggccctgtgactttctgagtataaac

SEQ ID NO: 885328 - DNA, 614 bp, Homo sapiens
gccctaagtatttggggagcttcctgatgctgtctctcctgcatttagtgtcaagcctcataggcctactcatctgctggtgatcactgtcacttgtactcctgccaagcactggtactgccccatggcttcatccagctattactgmcttttcctctgttcacccaggtccagcagttcttcagagatcatttgaaaggcccagagcctctaagttgtggagtgacccagagtggagcagggagaatggctcactgccctttggtttacatttttcacaaaggactcagccctcctgcaaagaaaattcactctgccaagcattagtgagcaatagagattttcctggagattaggcccaaacgatggttttattgcataccatgcagcaaaacacctaataaattaaacacttctttagcctgccaggatgcttttgccagtcacctgtccctcagacatttctaagccatggtgctctttcctctcctcttttaaaaataattcagaataatttctatctttgacctctgttggtctgggagcagctttccctctttaaccaaggctctgctgtccacagattgctggtgcatattcttttgcataatgtt

SEQ ID NO: 885329 - DNA, 683 bp, Homo sapiens
gctttgtaaaggaacaagtaaaaatgatttgtaatctcactcctccttcaggcaacaaagactcactgagaccagcatgccagagctcagcactgggacagaggagtaaataggcattgtcctggtcctcaaggaagtcacagtcaaatgagaaaccagacagataaggacaacatggggtggttgtttcccagaaggaggggtaagccaagggcttagcagcccagatgaagcagaggcctcctccagttggactctgtgggcagctcagctcccttgacaatgactgttgagaaaatgccagccacgcagtgccttgtgctggtgtttggagaagagttgtgtgctggtaattgatggtgtgtacttgttcagatgtcccaaatagctgatgatttgattatgaggactttacaaccactcaggcccaggctyattctggttttccaaagaagatgattccagacacacaccaatcgagaggactcatgctaggcattgggcatagagcctggcacaaggcctggtcacaggaattgcccagtaaagggcagttcttctctgtcctccatgtctgttggccagagttaagtcatgggagtggtcacaaagagggaggaggcaggaaaccttattaataaagaagttgatggcatttataagtaaaataatgttaagtgaat

SEQ ID NO: 885330 - DNA, 666 bp, Homo sapiens
ctgagctcagcttagatcagagagtcttagctggctgctatcaaatatttttctttcaagttactgagttttgggttgtttattatgcagccatagctagctgatacatttaggcagctcgttaccaaggcagaccctgaaattgtgattctctgggcttaggaatctgtatgtttaacaaagttcccagtgattctcatgccactgctctatgaaccacacttgagaaacaccactttacactcaacccttttactagctcaatgtgcagtcatggaaaatcccttgatgtttctgagcctcaactttttcgtctgcaaagagggaataatatgtatttcctgtgatgtaaggattaacttaaatataaagaaacctagctgataattttttctcctcctccttcaacttgtccccacctcatccctacccaacctcaggaagacaccagtacgaatatcttaggaaaacatgaatctcagggtcacagctttattgtatagattttttaacacagccatrttacaaacattgtcagggaacatttacaagaataaataagatggacttgcaggtgtaaaaagattacacttcactgtaatgtacagtcaaaaaatatatctgatattcattgacctgacattatttaccttctgcttttctgag

SEQ ID NO: 885331 - DNA, 637 bp, Homo sapiens
acaatcatatgaacaaaagttcaacaacataaccaatcgttagagaaatgctaatcaaaaccacaatgagatatcattcacaccagtcagaatggcttttattaaaaagtcaaaaaatagcagatgctggtgaggttgtggagaaaaaggaatgattacatattgttggtgagagtgtaaatcagttgaattattgtggaaattggtatggcgatttctcaaaaacctaaaagcagaaattccatttgacccagtaatacmattactgagtatacacccaaaggaatataaattattctattataaagacacatgcatgcatatgttcattgcagcactattaacaatagcaaaaacatgaaattaacccaaatttcaatcaatgatagactgaataaagaaaatgtggtatatatacaccatgaatactatggaaccataaaaaggaacaagatcatatcctttgcatgatctgatggagatcatcatggatggagctagaagccattatcttcagcatactaacacaggaacagaaaaccaaacaccacatgttctcacctataagtgggagctgatggatgagaacacatggacacatggggggaacaacatgcactgaggcctgttggcaggg

SEQ ID NO: 885332 - DNA, 630 bp, Homo sapiens
ccataacttcataaatttaagttcgtgccactacactcttagttgaatgactataataaagaatattgccaataccaaagactagcatggatacagtgcaagtgaatctcttatacatcgatatgggattatatcatacaatactgttgtagtagttattaagaaattattttaggcagatagagaggaaaagggatccttgggaagttttcgtttttaaagcagctcttagagccaggctggcaacctttcatatgcaaatacaggacattagaaactgggtccacccaaacatggcaattcccgcggccttcttgcccttgccccacatgatcctagcaacacgcccaaccccccmtatccccacgtgtgtggaacatcattacgccctgcatttgcatattaaaaggctagggtgagagtgccagctttttcaccggctacgtgaatgacatgcctggtcaaaccaatcccctgagccctatgcaaatcagacaccacctcctccagcctactcataaaactggctggtatccgtggcacttagggttccctctctcagctttggagcccccctccctctgtctctatacagaggagcttctttctttcttctcccttctttcttgc

SEQ ID NO: 885333 - DNA, 649 bp, Homo sapiens
ggtcacaaactcctgggtcactgctttttcaccattttaatccaatatacactcaaggtgcatttagaaagaaggaaagtaaaagccagtatgcatagcattctgtgaggcctctgtgttttaattctccctttaattataaccttaagttatagctctccagctcatttcatttagcagaagcttgatgaccaattcagatgaaatcctttcataagtaagatcatggatgttggcttacactgaaatatcttcccccaccccccrccaccctattaaattctttatttcactccaaggcatactgactttactttgccccctttttatggatgcaaaatactaagtagtcttgattgaatcttagaatagccaggcacagttttaagggccttacatgcatgacttcacttatttataccaataacacccctgaagttgttgtgaaaattaagtgcttagaaagagaaagtgttcagtaagaaggacatgctcaagaaacaatgaccattattaaatcttctcagatgccttgtgaattgcttattgttatcattcccgttttacagatgagaaaatagatgttaaacaactccccaaagtcacccatgtggcacagtcaaccttggaacccagacactctggcttt

SEQ ID NO: 885334 - DNA, 649 bp, Homo sapiens
ggtcacaaactcctgggtcactgctttttcaccattttaatccaatatacactcaaggtgcatttagaaagaaggaaagtaaaagccagtatgcatagcattctgtgaggcctctgtgttttaattctccctttaattataaccttaagttatagctctccagctcatttcatttagcagaagcttgatgaccaattcagatgaaatcctttcataagtaagatcatggatgttggcttacactgaaatatcttcccccaccccccgccrccctattaaattctttatttcactccaaggcatactgactttactttgccccctttttatggatgcaaaatactaagtagtcttgattgaatcttagaatagccaggcacagttttaagggccttacatgcatgacttcacttatttataccaataacacccctgaagttgttgtgaaaattaagtgcttagaaagagaaagtgttcagtaagaaggacatgctcaagaaacaatgaccattattaaatcttctcagatgccttgtgaattgcttattgttatcattcccgttttacagatgagaaaatagatgttaaacaactccccaaagtcacccatgtggcacagtcaaccttggaacccagacactctggcttt

SEQ ID NO: 885335 - DNA, 649 bp, Homo sapiens
ggtcacaaactcctgggtcactgctttttcaccattttaatccaatatacactcaaggtgcatttagaaagaaggaaagtaaaagccagtatgcatagcattctgtgaggcctctgtgttttaattctccctttaattataaccttaagttatagctctccagctcatttcatttagcagaagcttgatgaccaattcagatgaaatcctttcataagtaagatcatggatgttggcttacactgaaatatcttcccccaccccccgccaccctattaaattctttatttcactccaaggcatactgactttactttgscccctttttatggatgcaaaatactaagtagtcttgattgaatcttagaatagccaggcacagttttaagggccttacatgcatgacttcacttatttataccaataacacccctgaagttgttgtgaaaattaagtgcttagaaagagaaagtgttcagtaagaaggacatgctcaagaaacaatgaccattattaaatcttctcagatgccttgtgaattgcttattgttatcattcccgttttacagatgagaaaatagatgttaaacaactccccaaagtcacccatgtggcacagtcaaccttggaacccagacactctggcttt

SEQ ID NO: 885336 - DNA, 567 bp, Homo sapiens
cctaccacagttctaggcctcagacacacagtggtaatcaaaacttgataccgagaagggcttacaggttagtagaggagatacattaaacaaatgaacacacaaattttgtttagtaaatgaattttcatggaaatcgtgagtggtrgatttcattaatccctgataatgtattgcaaaatgaaaaaaattagatgcccgaaaataaaattggtcaaagacaacagttctaataagcatgccaatgggattaaaacacggatcaattgaaaatgagaccattaatggcacatggtagttttctttgatggcaagattttccaaggcaaaagaaaacagaaacaaatgcagtcagcaaaatccttagactgaaatggaagcaaaaaagaagacaaattcaatttagcacagaaaacaaattgtacagacatagcctgtgcccctcctgacctggagaaagatgaaatagcccaagaggtaaagatcaacaaagaagaagcacgtctctgaaaactgggtaacgtaagcaaaagtttcccaaagaaaacaataatcttggaggaaaaa

SEQ ID NO: 885337 - DNA, 643 bp, Homo sapiens
ggcgattgctatattgctctctattcttttctctagacatgagctgtacatttaaaataagggggaaaatatccatatagtccaaaaagtattagagaacttaatcagggaaagagtttcttgtattgatttttaattatccaagttctctacttgccccatgagcacttagaagtcagagatatttctttggttttcagaggaagaaacaaaaatagttaagaagaaccaagtgattccagagcaaggccaagtccaagctcaagtcagagttaaaattcctggggtatcaaaggaagggaggctttctccaaatacttattggcataaaggacattcaattagtacttgttygattaattggttactgatttaacaggagtaaaagctcaactccttgggacaggtggcatatgtcaccttctgctcatcattgaccatggtagtgtgggcccaaactcaggagaccattgtatgacctttttagtagtggtgacaacttaacacaaaacgactcctactcagaaggatccctgcttttgtaaggtggctgacccaggatgacgggtactgccaatagtcttggtattgtagagcaaagttaatgaatccaaagactaggaaaagctacaggacctaaggg

SEQ ID NO: 885338 - DNA, 569 bp, Homo sapiens
ttgcttccttgtttcttcttttgacccttttaactttcatactggatgaaagtcttattgtcatggccttcctttctatattttctgtccacaagggaagaatacaattttgttttatagcaggatacattagataggcctatrtgccttctacttaaacacctgccacacatgcctagttttaaaaggtttaaaactgacagtgaagcctgttacagtctgatattgcccacccaccccgtcttcctctttaaaaatactcagatgtgttctgttgccttctttccttgttcttttccatcgtgtattggtactttgcaatagtcaaagttaaaagctttacacacgacactgaataattatgtttaaaaaacagtaattatcaatacacgttttgttcctcgcagctttttaaaattcatgttaatgagctctgtcttctatgcatgagactgacaggcagtcttgaagttttgccatcatttcacaacttgttgcttagacactgcctgccttttccagagtattgctttcaggaactcttgctctgcaacattccagagatccag

SEQ ID NO: 885339 - DNA, 569 bp, Homo sapiens
ttgcttccttgtttcttcttttgacccttttaactttcatactggatgaaagtcttattgtcatggccttcctttctatattttctgtccacaagggaagaatacaattttgttttatagcaggatacattagataggcctatgtgccttctacttaaacacctgccacacatgcctagttttaaaaggtttaaaactgacagtgaagcctgttacagtctgatattgcccacccaccccgtcttcctctttaaaaatactcagatgtgttctgttgccttctttccttgttcttttccatcgtgtattggtactttgcaatagtcaaagttaaaagctttacacacgacactgaataattatgtttaaaaaacagtaattatcaatacacgttttgttcctcrcagctttttaaaattcatgttaatgagctctgtcttctatgcatgagactgacaggcagtcttgaagttttgccatcatttcacaacttgttgcttagacactgcctgccttttccagagtattgctttcaggaactcttgctctgcaacattccagagatccag

SEQ ID NO: 885340 - DNA, 657 bp, Homo sapiens
atttttaataatttctatatacttttaaattgctcgctactaaacagatttagatgatttctaacttattgctgttacaatgtccagttttcttatttcctgttttaaattatcttaatactatgtgatattataaaacaaaaatcaaaataatcactaacatatattaagtggattctttattaactcattcagttctctcagcctctttgagacagagatccattttataggtgaagaaactgaggcttagagatgttaaatcacttgcccaatgtcacaccactgggaagtactacagcaaagacttgaaccaaggctttacaacctgggctggttcccttctctagtcagtgctgtctttggtgtgtagtgtttatatactttaaagaagtgccaaaggccatttgcttagtataatattgattgttaatataactctttgcctaatacataattatctgataaatatttgataaagaatgggatacatttatgccacyagtatttattcaccccatctttttttttttttttttggagacacagcctcactctgtcgctctggctggagtgcagtggtacaatctcggctcactgcaacctccgcctcctgggttcagggaattctcctgccccagcctcctgaatagctgg

SEQ ID NO: 885341 - DNA, 599 bp, Homo sapiens
cacagtagctgtccttcctgtccatttgacaagcacttaaaagggcagtcttaagtactttacttcatagtttattaattttttcccttctttagtttgcaatctactctcagaaactgaaaaataatttcttttacctttttcccctttctcatttaagctgaaattgatttctttctgagcgtgtaaggaaaaaaataaaaagaagctgtggttaatacaattgcctttgctgaacaaaaataaaagactagtttaccttcaagctgtgctgtatcagagtaaggatctgttctgtcactcccaggagattttgataagagagagtacaaaatttcataatatctacatagcataattgtagcaaatataagaagtattataattgtttatttggsgatgagggtggggatgggtttttttgtgtgtgtttggaaaattgggaagctagaagatactcttaaatccatcagcttcttcagaactcttctcaaatgcttattgtcatgacaaccatctcttcataaaccaaggctctgagtgtaatacagatggggctggtaacaaggtaggattgccatctgctttgttttctctaa

SEQ ID NO: 885342 - DNA, 630 bp, Homo sapiens
tcagacagattccatgatcaccatccttatgtggcacaagtgcttatggggagcttctttggcttccaaaaggccactaaaactgtcagacctaaataatactggaactgtaaagtgggaattaaaaattataattccatttaacatgtaacgttctcatcagaaaggggcctttggttttccatattgatcggttacatggtcagctgcaattgtaactcatgagacacacccagatatcatcctgcgtgattctttttgaggtttatttagggtgttagataatccgaggtaggtttcatcatgggtggcaatattacrtatagcaaatgtcatgagaagagagacaaagcctcccttttgaatgttaacatttatgcaataagtttaatgtaccgtgtaagtttacattactattatgagacttaacctaaaaaattggggtgaaatcttaaagaattatgaaattaagaaatgaaaccagagggctttcgttttaagtactgatcacttaaaccaaaaccagtttggcttatcctatgagatcgtgggtattgagaaagaggaacatttgctgctgcatccggagatgtttccttgagagcaagactagttccttttgacccagta

SEQ ID NO: 885343 - DNA, 468 bp, Homo sapiens
attgagtaaaaaaagaaaaaaaaaaggaagccaacacttacttaactgctttaatgtataggactctgttctgggttgtcttctaaagtacatttcattcaatgtgtgagaatacagataggaaagagttttgctagtttctattttgactgtggatccattgattctttctggttctcagcccttaattgctcagctgcagataccacttgactgactcttaaaagtctttggtttattgcccaattctgggaatatgaaactgtaagctgtttaggagaaaaactgagaccaaaagaaaggagaagtgagccaaactgccattatgaytgccacttcttattgaagataaatcaaaatatccatttgactagaaatcaattgaattatgcactttaaatgggccaattcaatgatacctgaactatatctcaaaaaaggtgttaaacacaggcacacacgtacaca

SEQ ID NO: 885344 - DNA, 665 bp, Homo sapiens
caattatttaggtgttgtcaaattataaaattatctttcaaatgtaaatatagatctggtgctataattaatattggcaagtctcctttaagatgtcaagcttcagcatttaatttcataatggacctttcaaatgatgatatttaccttataaaacaaactaaaaggcatttaggataaagttcagaatgtgacttacaaggatgtcaatgagaaatgcctttacactgttccaaatatagaaaatcacatgcatgttttggtgagaaattttgaataacttggaggatatataagtcctgatactcagaaacagtagttttcattgtgatttaaatttttgagactttcccagctattccaagaattatttaaagcaaatatgatawttatgcacagcacaatattgttttggcctgattaagcagtgatagtttatactgcctagatgtcattaataagttattcctcttctaagtccccaaatccagctacccaaacatgttacttctacctccaaattgtcttcttttcttttagagttcccatgctaatgacatattatgttgatgccactgcaaaagccatttttggttgctaactctagttccattatcattcagaattatcttaaataaacacaatttgaattttaggattttttt

SEQ ID NO: 885345 - DNA, 665 bp, Homo sapiens
caattatttaggtgttgtcaaattataaaattatctttcaaatgtaaatatagatctggtgctataattaatattggcaagtctcctttaagatgtcaagcttcagcatttaatttcataatggacctttcaaatgatgatatttaccttataaaacaaactaaaaggcatttaggataaagttcagaatgtgacttacaaggatgtcaatgagaaatgcctttacactgttccaaatatagaaaatcacatgcatgttttggtgagaaattttgaataacttggaggatatataagtcctgatactcagaaacagtagttttcattgtgatttaaatttttgagactttcccagctattccaagaattatttaaagcaaatatgataaktatgcacagcacaatattgttttggcctgattaagcagtgatagtttatactgcctagatgtcattaataagttattcctcttctaagtccccaaatccagctacccaaacatgttacttctacctccaaattgtcttcttttcttttagagttcccatgctaatgacatattatgttgatgccactgcaaaagccatttttggttgctaactctagttccattatcattcagaattatcttaaataaacacaatttgaattttaggattttttt

SEQ ID NO: 885346 - DNA, 604 bp, Homo sapiens
ctctgaatccctctgaattctatgaagtaataagatatctatgatggaacgcaaagtaattcctgacagagaaaatcagtgatcctctgttgtgtatcctgagtttaaaatcaactgatttttctaagattcctggttaggaaagatgggttcattacgaaaattaaagttaaaaggtagcagatcctgttaggagagaaatgcctacaagaytcaccttgttttaatgaaaatattttctgtttgacagctcaggttgagaagaaaatgataattgtataaacaaagaagaaataagtgtgagtgtacattcacatccattttctaatgcttatagtacagtcttgtggctttaaaataatgagcttaatgggctttgtcatcaaagaaaacattttttactcagctttcccactgctataaaatataattattttgtgataaggtataaatataactttgacctatattagtgaaggctaaaaaaaaatctaagatcaccatagaagtatgtattcaatttccctactttccacatgaatctttctccttgaaatttttagtggacagagtagaatataaattctaaaatcataatgtttaa

SEQ ID NO: 885347 - DNA, 614 bp, Homo sapiens
attacatataattaattccctctgtataatacataaaattgataatagtaaccattttaatgtgttttacatgtttaaacttgtaagtggagattttgaagatccatgttcttgtgttagaaggtgaagaaagataaaatgtaactacagagtattttgaagggcatgttttaatgttacataagtaaaataaaaaccgtaatgcatagagtagtaaggagatcccaaaaaatgyactgaccaacacaataaacacaatacatagtccaaatttaaatgatattttagcagattttaggaaaatctcagcaagtactatggtttgaatatctgtgtacctccaaaattcatgttgaaagctaatctccaatggaacagtttttaagaggtggggcctttaggaggtgattagaccatgagagatctggacacggtgttcatccctttttcgctcttcagccatgtgaggacacctagatgatgtcatttatgaggaaagggccttcatcagactctggtcctgctggtgccttgatcttggacttcctactctccagaactgtgagaaataaatttttctttttaaattatctagtctcaagtattttgtgata

SEQ ID NO: 885348 - DNA, 630 bp, Homo sapiens
gtttgtgtcccctcaaaatttatatgttgaaatctaaactcccaaggtgatgctattaggtggtagggcctctagaagatgatcaggtaataaggacagagcccacgtgagtggaactagtgcccttatataaaaagccagagagagctgccttgccctttccaccctgtgagggaactgcaggaaggcaccatctataaggaagcaggccctcaccagacactgaatttgccagaaccttgatgctgggcttctcagcctcctcaactgtgagaaataaatttctgttgtttattagacatgtggtttaaggtatttttgttaaagcaagccaggtagactaagagtcttgctaaccactcctctccctctttttacttcattccaacactaggctggacttccaggaagctaagcaagcaggaaacatgggcccagaagacagcttactgaagagggaccatggaaaagtttagcaatgctaccaacttagamttattgatcaataattttgttagacaagacgaaaccatagaaataggtaatattgtgttattttgttaatttttgctttttcctagcttctataatcatggaagaacttgagcatgattgtcttttcacataaag

SEQ ID NO: 885349 - DNA, 605 bp, Homo sapiens
tgcatgatatcttgggcaagttattacttaatctatctgtgtccattaccttatttagtaaaacaagcatatttattgctacctaccaggtctgttgggagtactaaataaaataaagcgtgtgtgtataactccatagttaagtctatcggtgatagaagcagacagatctgcttctagttatagcagtcacctcttacttgctgcgagaccttaaccatgttactcaggcactttgtacctcagtttccccatctatgaggagagaataataaggggtacctctgcctcattgggttttagtgagaaatattgagctcttgacacatagtggcactcaagaaaagttcattgttcctaagaaagctgctttacacatgctaggttgctacatatctatgtatcgaaactcmccacaattatttattgaataagtatttctctaccttaaagataggggctgagtcttgttcctgttcacctctacagtgcctggaaagtagacagactaaataattgtttcgggattgaacccaaacacattcatcacattttctattctcctctttctatcatcctgaagaaaactcaatctcttggcctta

SEQ ID NO: 885350 - DNA, 600 bp, Homo sapiens
ataagattaaaaaatcctattgttgtctaagctagggtttggcaacttttcataaacattgtgccctttacaggccatattttctctgtagcaactcctcaactctgccatggcagcataaaagcagccatagacaagacataaaggagtggctgtgtaccaataaaacattgtcttagtccattcgggctgctataacaaaatagcatccatagactggatggcttataaacamcaaaaatttatttgtcacagttctggaggctgagaagttcaaaatcaaggtactagcagacttgtttcctggtgagggcccaattcctagctcataaacagctagctctctttttgctatagcctcacatggcagaaggggtgaggatctctctaaggtctcttctataagggcactaatcctgttcatgagggctccaccttcaagacctaatcagctcccaaagccccacctactaataccatcatcttggatttcaacatatgaattttgggaggcaataaacattcagtacattgaaaacaacatttacacaacaagcaacagcctggatttgacctgtgggttgtggtttgctgaacact

SEQ ID NO: 885351 - DNA, 598 bp, Homo sapiens
actaaaattctggtgcaatacttactgctgagcagagtattatactgtaaagtttccaattcccttgcctttcttttttctttgtccagcaacagaaattgagtcacaagggatcaaacagggcactcaaatcctatctgaggtagtttgaaaaaagaaaggtgagtccatgggtgggtctcagccaagaccttgagggaaaactgagaatcaagatgggaagagaaaatagcaaccccaagtccaaagggcagagaacagctaaggccaagggtcaggccaagacagcaaagcactgacaggggtacaggtcaagagcctggcccagatgattgctgtgaacagcaactcctctgcagggagctctgatatgacatgtcaggctagcagggttcacagagggccacgccaggcagcgaaagggtctttyttagctaccccaggaatatcatttgccatagacaagaagcagttaagtgtcactcatacaaaacaccaatatttgcatcacttccatgaatctccttcaattaaccttttaggactagtattttaagactcttcctcttacactgaatttcttcagaattcatattca

SEQ ID NO: 885352 - DNA, 416 bp, Homo sapiens
aacgcagtattcgggtgggagtgacctgattttccaggtgcctccgtcacccctttctttgacttggaaagggaactccctgaccccttgcatttcccaggtgaggcaatgcctcgccctgcttcggctcgcgcayggtgcacgcacccactggcctgcgcccactgtctgtcactccctagtgagatgaacgcggtacctcagatggaaatgcagaaatcacccgtcttctgcgtcgctcacgctgggagctgtagaccggagctgttcctatttggccatcttggctcctcccacgcctgtagtatatatcttgtacatattttgttaagtttatacctaagtgtttcatttttgtggtgctaatttaaacagcattgcttttttaatttaaaattccacttgtgcattgcttg

SEQ ID NO: 885353 - DNA, 416 bp, Homo sapiens
aacgcagtattcgggtgggagtgacctgattttccaggtgcctccgtcacccctttctttgacttggaaagggaactccctgaccccttgcatttcccaggtgaggcaatgcctcgccctgcttcggctcgcgcacggtgcrcgcacccactggcctgcgcccactgtctgtcactccctagtgagatgaacgcggtacctcagatggaaatgcagaaatcacccgtcttctgcgtcgctcacgctgggagctgtagaccggagctgttcctatttggccatcttggctcctcccacgcctgtagtatatatcttgtacatattttgttaagtttatacctaagtgtttcatttttgtggtgctaatttaaacagcattgcttttttaatttaaaattccacttgtgcattgcttg

SEQ ID NO: 885354 - DNA, 416 bp, Homo sapiens
aacgcagtattcgggtgggagtgacctgattttccaggtgcctccgtcacccctttctttgacttggaaagggaactccctgaccccttgcatttcccaggtgaggcaatgcctcgccctgcttcggctcgcgcacggtgcacrcacccactggcctgcgcccactgtctgtcactccctagtgagatgaacgcggtacctcagatggaaatgcagaaatcacccgtcttctgcgtcgctcacgctgggagctgtagaccggagctgttcctatttggccatcttggctcctcccacgcctgtagtatatatcttgtacatattttgttaagtttatacctaagtgtttcatttttgtggtgctaatttaaacagcattgcttttttaatttaaaattccacttgtgcattgcttg

SEQ ID NO: 885355 - DNA, 579 bp, Homo sapiens
ttagagtatttagaatattcattactttgaacatttatgattactttgtgttggaaacattttaaatcttcactttgagctattttgaaacatacaatgtattgtcattaattatagtcacgctactatgctagaacatgctagaacttataccttctagtcaactttatatttgtactcattaaccaatctctcttcatacccctccctaacctcttctgtctacctccataaaatcaacttttaaaactcccacatgtgggtgagaacatgtgaaatttgtccttctgtgactggcttatttcactttayataatgactctggttttatccatgttgctggaaaagaaaagattttattttctataatggctgaatagtattctattgcatatatatatcacattttcttcatccattcatatctgatggacacttaggtcgattccatatcgtggctgttgtgaatagtactgctataaatatgcaagtgtagatcttcctttgatatactgaattcctttcttttggataaatacccaagagtggaattgctgaattgtatggtagctctatttt

SEQ ID NO: 885356 - DNA, 741 bp, Homo sapiens
catgcaagatatacattggttcagtctggaaaggtaggacaacttgatgttggggggcaggggcagcggcagtgggcaggggatggcttccaggtcataggtggattcaaaaatgttctgattggcaagtggttgaaagcatttgtctaaacgactggaatcaatagaaggagttgtagagaccaagattttattatgcagttgaagcctccaggtagcagacttcagagagaatagattttcttaagatctctgttttaatgttaatgcttgtcagtgtgcctgaattccaaaaggagaagggtataatgagatatgtctgactacccattcccaccgtggcctgaagggctgtttcagcttaactttgaaatgtccttggccaagaggagtggtccatttggttggctggcagggcttagaattttatttttggtttacaagggctaacttcagaaaggggcaatarggcttctcagttgtgagtcatttctggtgagggctctactgtgagccatcaataggtaatacccccagaaacagggaatgggtgccacatttctaaagggagaacctagaggtgtactacagcagctgctacaaggggtaattatacagagcatcttcatcatctgaattttcaacactcctattttagtccttccagttacacaagttgtataaagaagtaaaagttaccttaagagagtttctttttcactagcgatctaattttactta

SEQ ID NO: 885357 - DNA, 606 bp, Homo sapiens
aaactcttgtagtcattgtatctacaggcttcagtatttgtttctccctaagaattaatttttttttaaagcttgaaaggcttttcccctttccaaagacactttgaaagagctcgcacagtgtatgtagcctaatagagaacagtgatcctggtataaatgtaaaaccaaaatcaaaatcaaaacatgcttttgaatgtaatatagttctaatgaaactgtaagccataaagttgaaaactcctctgtttatggaacatatcttttgcaatgaagagaaattctagatcttgggaagatctttgaaaggtatcaaatttaaagaccctacctaarcttacctcagaaacttcacaacataatctttttcaaggttttgatccaaaatcaggtaaacttttgtggtagaaattttgtggaaactgaaaaaggcaaggaaaatgaaaagcaggtaggtgctaatcaagcaccattgtaattgaaactcacctttactcctgaaattctcaggtatgcacacttgtgggcataaccacacagaatacttatgtgaacacatatggagtgagattgttttaaagaaggatacaagtaaaacccaaacat

SEQ ID NO: 885358 - DNA, 606 bp, Homo sapiens
aaactcttgtagtcattgtatctacaggcttcagtatttgtttctccctaagaattaatttttttttaaagcttgaaaggcttttcccctttccaaagacactttgaaagagctcgcacagtgtatgtagcctaatagagaacagtgatcctggtataaatgtaaaaccaaaatcaaaatcaaaacatgcttttgaatgtaatatagttctaatgaaactgtaagccataaagttgaaaactcctctgtttatggaacatatcttttgcaatgaagagaaattctagatcttgggaagatctttgaaaggtatcaaatttaaagaccctacctaagcttacctcagaaacttcacaacataatctttttcaaggttttgatccaaaatcaggtaaacttttgkggtagaaattttgtggaaactgaaaaaggcaaggaaaatgaaaagcaggtaggtgctaatcaagcaccattgtaattgaaactcacctttactcctgaaattctcaggtatgcacacttgtgggcataaccacacagaatacttatgtgaacacatatggagtgagattgttttaaagaaggatacaagtaaaacccaaacat

SEQ ID NO: 885359 - DNA, 643 bp, Homo sapiens
aaaaggcctatatgacattgtagaagtaaggacagttgatccacagtctgctgcctgtccttcgatgtggtattggctcatatcccctgagagatagtaacctgatcttgtacatggcacactgttgtcatctgctactgatacctgacracaatcaactcttgctttctttcttggcttgatcagggcctaatggacctaccacgctgatttagccttttctattctcttgtggccactacaagcccctcagagtcccttccatgtgatctgtgtggcataaggcctacctgtctaccttacggcctctgcaacaggatcacttcaccactttccccacacagccatcatattcagcccaatgacaatcccctagctcttaaagttcacaccacctagaaatcacatttgacgcagtgtgcaaactgaactatgtcttgatattacatctgtactcctccttcctgactatgctagtgtatgtgggactgctctacacagcagtcatgttcccaagttccgaacagtgggcagggcaaaagactctatttcctctttctgaagcaaacctggaaagagcagtttagaacatacttatgactattcccctttctctctctctctctctatatatatatccatt

SEQ ID NO: 885360 - DNA, 643 bp, Homo sapiens
aaaaggcctatatgacattgtagaagtaaggacagttgatccacagtctgctgcctgtccttcgatgtggtattggctcatatcccctgagagatagtaacctgatcttgtacatggcacactgttgtcatctgctactgatacctgacgacaatcaactcttgctttctttcttggcttgatcagggcctaatggacctaccacgctgatttagccttttctattctcttgtggccactacaagcccctcagagtcccttccatgtgatctgtgtggcataaggcctacctgtctaccttacggcctctgcaacaggatcacttcaccactttccccacacagccatcatattcagcccaatgacartcccctagctcttaaagttcacaccacctagaaatcacatttgacgcagtgtgcaaactgaactatgtcttgatattacatctgtactcctccttcctgactatgctagtgtatgtgggactgctctacacagcagtcatgttcccaagttccgaacagtgggcagggcaaaagactctatttcctctttctgaagcaaacctggaaagagcagtttagaacatacttatgactattcccctttctctctctctctctctatatatatatccatt

SEQ ID NO: 885361 - DNA, 643 bp, Homo sapiens
aaaaggcctatatgacattgtagaagtaaggacagttgatccacagtctgctgcctgtccttcgatgtggtattggctcatatcccctgagagatagtaacctgatcttgtacatggcacactgttgtcatctgctactgatacctgacgacaatcaactcttgctttctttcttggcttgatcagggcctaatggacctaccacgctgatttagccttttctattctcttgtggccactacaagcccctcagagtcccttccatgtgatctgtgtggcataaggcctacctgtctaccttacggcctctgcaacaggatcacttcaccactttccccacacagccatcatattcagcccaatgacaatcccctagctcttaaagttcacaccacctagaaatcacatttgacgcagtgtgcaaactgaactatgtcttgatattacatctgtactcctccttcctgactatgctagtgtatgtgggactgctctrcacagcagtcatgttcccaagttccgaacagtgggcagggcaaaagactctatttcctctttctgaagcaaacctggaaagagcagtttagaacatacttatgactattcccctttctctctctctctctctatatatatatccatt

SEQ ID NO: 885362 - DNA, 623 bp, Homo sapiens
aaattaagttctgaattaactaatgaaaagttaaaaataatagttacaaataataaaagttaataaaaaataaaaagtgaaaaaaagttaaaagcttggcagtgaatggtgttcagatagatgcagatgttgtatatctcagcctagattttcttgccttccagagttcttgctggggacacccgatggcaatgaaactgtctatgcagtgtacacttcatcaagcctcatttgggaagctggcctctttctaactactgtctctttatacgtagtcccatatcatttcagaagcacttcaactaacaaygcctcagtctatatttaaaagaatatttataaacagtgagctttcctggttattgaaccagactgaacatcatcaaaggctaggtgtttctgaacaatacctgaccagagtgtatggcattctggaactccttttctcagactatcaaatacttcttctgtagccaagttccaatttttgaaaaaggtaaagacaaagggtgatacgcagtagaggcactcccaatagttgacactcaatcatctttttccaaagcccctcattctctattcctttcagggcttataatctgtcactttttgggattcatttc

SEQ ID NO: 885363 - DNA, 548 bp, Homo sapiens
ggtctgaattgttgttacacatacagcttataaaaaaaaaaccctcaaattttaataaaaattggtccctggctggtaacgctactgaggtcctgctagaaacaaacataaaaccattcttgagggatactcctacaacacagactacatgtgtttccartgaaaatatgaacctgtataaaataatgtcacaaaccataaaatatctaaaaaattatcagttttatgtttatgactagattagggaatgattatagccttatgcagaaaataaaattagtatatttataatgattaagatgttaagaaataaaatcaaatgaaatgatctaggactgaagaaatagaaaacagatttagaaaatattagtaatttaaattataaataaaattaatacatttaacaactatttagtcacaactaaataatgagcaaggaacttggcaattgattaaattacctagaatgaaacaacaaaagaataggagaatgaaaaaaaggttaagggaatatgtaggacacaatgaggatcaacatatattagagg

SEQ ID NO: 885364 - DNA, 554 bp, Homo sapiens
gctgctgccacgggatgaaggagggttgctgtaggaaattcgactcttttgtactctcttcagtgcctctttgcttatatgatgtccaaaaccaggtactgtgattgctcacttgatttttggttcttatgtaggtaatgtcttgtgtggataakttttcaatttggtgttcctgtgatggattgcagggggaatgattgcttgaggcttctatttagccatcttgttacacctccaatataattaatttaccaatcgaaattgatcattgtgtttatgtgtaaaacaagtcgactatttgtagcagatcctcattcagccttatggctttattactatttcttgcattccatcagtgcttatggccctgatgaaataggccaaagggtcaagttacattctagaggccaacaatttaacttaaaaatatacacttaatctaatcctgtttggtttggtatgaggaagaggtagaagatgaaactactcaggaatgctcactgaagataccatggctttctgaatttaaatgtatctccttgtcacctcgactt

SEQ ID NO: 885365 - DNA, 554 bp, Homo sapiens
gctgctgccacgggatgaaggagggttgctgtaggaaattcgactcttttgtactctcttcagtgcctctttgcttatatgatgtccaaaaccaggtactgtgattgctcacttgatttttggttcttatgtaggtaatgtcttgtgtggataatttttcaatttggtgttcctgtgatggattgcagggggaatgattgcttgaggcttctatttagccatcttgttacacctccaatmtaattaatttaccaatcgaaattgatcattgtgtttatgtgtaaaacaagtcgactatttgtagcagatcctcattcagccttatggctttattactatttcttgcattccatcagtgcttatggccctgatgaaataggccaaagggtcaagttacattctagaggccaacaatttaacttaaaaatatacacttaatctaatcctgtttggtttggtatgaggaagaggtagaagatgaaactactcaggaatgctcactgaagataccatggctttctgaatttaaatgtatctccttgtcacctcgactt

SEQ ID NO: 885366 - DNA, 633 bp, Homo sapiens
aataaataaactcaacttgttcctgaatgacttttgggtaaagaacaaagttacagcagaaatcaaaaaatgatttgaaatgactaaaaacggagacacaacctaccaaaatctctgtgatgcagcaaaagcaaagttaagaaaaaagtttgtagcactaaacacgcacttcaaaaaagaaagatctcaaaataacaatctaaaaacatgcctagaggaactagaacaacaagaacaaactaattccaacgctaacggaagaaaagaaataactaaaatcagagcagaactgaatgaatttgagacccatacaaagaattaatgaaaccaaaacttggtttcttgaaagcataaatgagattgataaactgctagctagataacaaagaaaaaaaaaagagatstaaataagcacaattaggaatgacaaaagtgtcattacaactgattccacggaaacaaaaaagaacctcagaaactatgacgaacacctctatgcacacaaactaaacacgaataaattcctggaaacacacgatcttccaagattgaatgagaagaaatggaaaccctatactgaatgcaggttttcagtatagaccaatactgagtttcaaaattgaatcagtaata

SEQ ID NO: 885367 - DNA, 642 bp, Homo sapiens
tgaaaaatacataatcaaaatgaaaaattcacttgaagtgctcaatgatagtttgtggtgacaaaagagacaatcagcaaatttgatatagattaatagagattatacagtcttaagagcagagagaggatgggtacagtggctcttgcctgtaatcccagcactttggggggctcaggtgggtgcattgatgaagtttaggagttcgagaccagtctggacaacatggcaaaacatacaaaaaatacaaaatttacctgggcatcatggcccacacctgtagtcccagccactcatgaggttgaggtgggaggatctctagagcctggcaggaggcagagattgtagtgagccgagattgtgtcactgtactccagcctggttgaacagaatgagaccctgtctgaaaaaacaacaacaacaaaatgaaatttccttaaaaaaaaaaaccagaaaaaagaataaagaaaaaataaaacctcgcaaaaatgtgrggcattataaattgcaccaatatttgagtaacagaaggagaagagagatgaaggggcaagaaaaaatatttgtaaaaactaatgttttaaaatttcactagggggctcagcagtaggtttgatcaggcagaaaaatcagcaaactggt

SEQ ID NO: 885368 - DNA, 642 bp, Homo sapiens
tgaaaaatacataatcaaaatgaaaaattcacttgaagtgctcaatgatagtttgtggtgacaaaagagacaatcagcaaatttgatatagattaatagagattatacagtcttaagagcagagagaggatgggtacagtggctcttgcctgtaatcccagcactttggggggctcaggtgggtgcattgatgaagtttaggagttcgagaccagtctggacaacatggcaaaacatacaaaaaatacaaaatttacctgggcatcatggcccacacctgtagtcccagccactcatgaggttgaggtgggaggatctctagagcctggcaggaggcagagattgtagtgagccgagattgtgtcactgtactccagcctggttgaacagaatgagaccctgtctgaaaaaacaacaacaacaaaatgaaatttccttaaaaaaaaaaaccagaaaaaagaataaagaaaaaataaaacctcgcaaaaatgtggggcattataaaktgcaccaatatttgagtaacagaaggagaagagagatgaaggggcaagaaaaaatatttgtaaaaactaatgttttaaaatttcactagggggctcagcagtaggtttgatcaggcagaaaaatcagcaaactggt

SEQ ID NO: 885369 - DNA, 590 bp, Homo sapiens
tctgcccaccttagcctctcaaagtgctgggattacaggcatgagctatcacccacagcctagaatggattttttgaaacccgtgagccaactgtatgctgtgtagagaaatctacttcaaatataatgatataggtaggtaaaaattaaggtggggggaagatatatgatgcaaacattaaacaaacaaaaaaaagaaacagtggcagccatattaaaatgagacaaaaaaattgcagaaatgaaaaaattaaagactcagtttatcaaaaagaaatgacaggctgggcatggtggctcatgcctgtartaccagcactttgggaggctgaggcaggtggatcacaaggtcaggagtttgagaccagcctggccaatatagtgaaaccctgtctctactaaaaatacaaaaattagctgggcatggtggtgcgtgcctgtagtcccagctacctaggaggctgaggcataagaattgcttgaaccccagaggcagaggttgcagtgagccgagatcgcgccactgcactccagcctgggtgacagagtgagattccatctcaaaaaaaaaaaaaaaaagaaaagaaatg

SEQ ID NO: 885370 - DNA, 596 bp, Homo sapiens
aagcagtctgcccaccttagcctctcaaagtgctgggattacaggcatgagctatcacccacagcctagaatggattttttgaaacccgtgagccaactgtatgctgtgtagagaaatctacttcaaatataatgatataggtaggtaaaaattaaggtggggggaagatatatgatgcaaacattaaacaaacaaaaaaaagaaacagtggcagccatattaaaatgagacaaaaaaattgcagaaatgaaaaaattaaagactcagtttatcaaaaagaaatgacaggctgggcatggtggctcatgcctgtagtaccagcactttgggaggctgaggcaggtggatcacaaggtcaggagtttgagaccagcctggccaatatagtgaaaccctgtctctactaaaaatacaaaaattagctgggcatggtggtgcrtgcctgtagtcccagctacctaggaggctgaggcataagaattgcttgaaccccagaggcagaggttgcagtgagccgagatcgcgccactgcactccagcctgggtgacagagtgagattccatctcaaaaaaaaaaaaaaaaagaaaagaaatg

SEQ ID NO: 885371 - DNA, 629 bp, Homo sapiens
tcattaatctgtgggagttaaaaaagttgacctcactgaggcagtgagcagagtgatattatcagaggctgggaaggatggtgtgggggataaagaaaagttggctaaaaggtacaaacatacagttatatagaatgaataagttctaatatttgatagtacagtagggtgactatagttaacatcaatgtattgtatatttcaaaataactataatataggatttgaaatgttcccaacatgaagaaatgataaatgctcaagaggtgatggatatcccaaataccctgacttgatcattacaaattctatgcatgtatcaagatatcacctgtactccataaatatgtacaaatattatatatcaataaaaattctgaattccattaaaatatactaaaaaaatctagaaaagttaatcccaggaaaatgtaccacttgtccgataaaacacaggctgaacaaagtacatyaagaaaacaattaaggctgggcaccgtggctcatgcctgtaatcttagcactttgggaggctgaggcagctgatcacgaggtcaggagttcaagttccagcctgggcaacatagtgaaaccctgtctctactaaaaatacaaaaattagctgggca

SEQ ID NO: 885372 - DNA, 666 bp, Homo sapiens
ttgtaggtgagatgtttttaaacagttgtgcaaataatttcttagtaaactatttctagaaatgctcttaggaaagctaagtatttgaaagaaggcataagaaatgacttgaataggccaggcacggtggctcatgcctgtaatcccagcactttgggaggccgaggtgggcggatcatgaggtcaggagatccagaccatcctggctaacatggtgaaacctcgtctctactaaaaaaaatacaaaaaaattagccaggcgtggtggtgggcgcctgtagtcccagttactcgggaggctgaggtaggagaatggtgtgaacctgggaggcagagcttgcagtgagccgagatcatgccactgcactccaacctgggtgacagagtgagactccmcctcaaaaaaaaaaaaaaaaaaaaaatgaatgacttgaatagtgaaaaagtatcctcaccgtcaggatattaatgtctcccattcattcagagggtgggaccacacctgtttctctcaatttgattagtgaattatgtaatcatagagatatgcctgttccccacctattttttaattacacaagtgatacagggccagaatagggtgaggcaagtgaggcactagagtcaaggctctaaaaaaaactccccaaataaataatatttaaa

SEQ ID NO: 885373 - DNA, 587 bp, Homo sapiens
tacgttcctctaagtaaaatgaaacatggtcagggggcggttccaagatggctgaacaggaacagctccagtctacagctcccagcgtgagcgacgcagaagacgggtgatttctgcatttccaactgaggtactgggttcatctccatggggagtgtcggaaagtggctgcaggacagtgggtgcagcacactgagcatgagccaaagcagggcgaggcatcgcctcacccrggaagcgtaaggggtcagagaattccctttcctagccaagggaaggggtgacaaatggcacctggaaaatcgagtcactcccaccccaatactgcacttttccaacggtcttagcaaacggcacaccaggagattttcaacccagaatttcatatccagccaaactaagcttcctaagtgaaggagaaataaaatactttacagacaagcaaatgctgagagattttctcaacaccaggcctgccctacaagagctcctgaagggaacactaaacatggaaaggaacaaccggtaccagccactgcaaaaatatgccaaattgtaaagaccatcgatgctaggaagaaactgca

SEQ ID NO: 885374 - DNA, 626 bp, Homo sapiens
aaagtttcaatcccaaccaacttgtttttcaggtgccctgttattctccactatttaaagagttatgtggagttttcagtctaacaggacccttctctccatggcaacaaaacaaactaacccctcaaaatacgttctgagtatatttcagtttaagtatatcacaattcaaaccccatcccaaaccaaactaattgctgggattatttttacttttcatagaaattcaaaagtattttggttkaattttaaattcagataactgaacactacatcttatacctacaacctgaagtacagttagatcacgtccctgcattaatttgccaaagttacattagccaattcgtagaagatagcaaatggagacagaccacatgaagttctttatacaattatactcctattaaacaagctcaaataaatataaattataaaaaccctatgtttagcattagtgtacaggtttacataagtattattcaaggtactatacaatgatattatagcaagcactatatgaaattgagtaaaaagagccttgagacaattcatgacttttggaactgatcatgtcatgttccaagaaaatagctcaaaagaaagaatgaagacagttgtacaaa

SEQ ID NO: 885375 - DNA, 626 bp, Homo sapiens
aaagtttcaatcccaaccaacttgtttttcaggtgccctgttattctccactatttaaagagttatgtggagttttcagtctaacaggacccttctctccatggcaacaaaacaaactaacccctcaaaatacgttctgagtatatttcagtttaagtatatcacaattcaaaccccatcccaaaccaaactaattgctgggattatttttacttttcatagaaattcaaaagtattttggtttaattttaaattcagataactgaacactacatcttatacctacaacctgaagtacagttagatcacgtccctgcattaatttgccaaagttacattagccaattcgtagaagatagcaaatggagacagaccacatgaagttctttatacaattatactcctattaaacaagctcaaataaatataaattataaaarccctatgtttagcattagtgtacaggtttacataagtattattcaaggtactatacaatgatattatagcaagcactatatgaaattgagtaaaaagagccttgagacaattcatgacttttggaactgatcatgtcatgttccaagaaaatagctcaaaagaaagaatgaagacagttgtacaaa

SEQ ID NO: 885376 - DNA, 584 bp, Homo sapiens
aacacccaagaatgatcaataaatactaattaaaaaaaaaacatacaaaataacaatacatgctgctcaagaatagaaacttatatagttaatgtataggaatggaatgcttaatattccatttagaatagtaggtatcttcagagggaggagaaagaggcaacagagaagagacagctggggagcttcaactgtctaggtaatgtttaagctcttacattattatattcttctttttttttttgagacaaggtctcgctgtcacccaggctagagtgcagtggcacratcatgactaactgcagcctccatctcctgggctcgagtgatactcccacctcagcctcccctattatattattctttatgctgcttgtatgttaaatatttgatactatattaaaaattactgccgggtgtagtggctcatgcctgtaatcccagcactttgggaggctgaggtgatactaaaaatacaaaaaaaaaattagctgggcgttgtggtgcatgcctgtaatcccagctactcaggaggctgaggtacaagaatcactagcatctgggaggcggaggttgcagcgagc

SEQ ID NO: 885377 - DNA, 630 bp, Homo sapiens
ggcatgtatgcttaaaagttgtgagttaacaggcaagtgggtgtgtgttattataggatgccaggtgtaagtggtgacacagcctccaatgctgttattaaattttttgagacggagtctcgctctgtcgcccaggctggagtgcagtggcacaatctcggctcactgcaagctctgcctcctgggttcacrccattctcctgcctcagcctcctgagtagctgggactacaggtgcctgccaccacgcccggctaattttttgtatttttagtagagacggggtttcgctgtgttagccaggatggtctcgatctcctgatcttgtgatctgcccgccttggcctcccaaagtgctgggattacaggtgtgatgttattaaaatttataaaagtaacatagtgacataaagagaaaatgtggaaaatgaaaagttgtccaggctggactcaaactactgggctccagcaatcctcccacctcagcctcctgagcagctgggactacaggcacatgccactgcacccagctcctaggagccatattttaaatagatttataatattttggaacacattcatcactatatcaaactattcccctgcaaacacttagattgctttcaattat

SEQ ID NO: 885378 - DNA, 401 bp, Homo sapiens
tctcattgtggttttaatttgcatttctataatgaccagtgatgatgagctttttttcatgtttgttggctgcataaatgtcttcatttgagaaatatctgttcctatcttttgcccacttttcaatggggttgtttgtttttttcttgtaaatttaagttctttgtagattctggatattagccctttgtcagatggattgattgcaaaaattttctcccattgtrtgggttgcctgttgactctgatgatagtttcttttgctctgcagaagctctttaatttaattagatcccatttgtcaattttggcttttgttgacattgcttttgatgttttagtcaagaagtctttgcccatgcctatatcctgaatggtattgcttaggttttcttctagag

SEQ ID NO: 885379 - DNA, 679 bp, Homo sapiens
tcatcaagggtattggcctgaagtttttgttgttggttgtgtatctctgacaggttttggtggtgggctcctgtaatcccagctactcaggaggctgaggcatgagagtcacatgaacctgggaggcagaggttgcagtgagctgagattgacccactgcactccagcctgggtgacagagctagactccatctcaaaaaagaaaaaaaaataagttagggaagattccccctccttttcaattttttggaatagtttcagtagaaatagtaccagctcttctttgtacctttagtwgaattcatctgtgaatctctctggtcctgggctttttttttttttttttcccggctggtaggctatttatttctgcctcaatttcagaacttgttattggtctattcaggcattctgtttcttccctgttcagtcttgggaggatgtatgtgtccaggaatttatccatttcttctagaatttctagtgtatgtgcatagggttgtttatagtattctctgatggttgtttgtatctctgtggggtcagtggtgatatcccccttatcatttccgattgtgtttatataaatcttctctcttttcttctttactagtctagctagcagtctatctgtcttattaatcttaaaaaagcagttattggattcattgattttttg

SEQ ID NO: 885380 - DNA, 637 bp, Homo sapiens
caggcagttctctagaccactcctgaggcacttactcagggactgacaccccagacttggggcctcctgtcttgagaccacagagctggagtttatcaccagtgtctcaggtcatcgaataatttggcaaaatctcatatttcccttcatcctcatcctttctatgcctgatatgtacactaaactctggtggggactcagcaaacatttgagtcaatgttagacaggtgacccgccgccatatctgttaggcatgcatgcaaggcagtgctcatcatcatgccaccatgtggcctctggcagtgtcctttgtcccattctgaggaactgcagrcactgtgcttttgagtcacagtgtatcaactttttgtagttttagtatcatctccgttgctttttactgctataagtgcacagtccacttaaccttctggcaagttagctgcttttaacctgccatggaatggatactcaggtattacaatgcttttttacattatacttaaaaagacagatgacaaaactcccaggaaatgacttctctatgaattagtgcatttttttaagttttgaatctaccaaattaattgttgcctgttctaggggcatttttgcttcctccgtggttctcacttat

SEQ ID NO: 885381 - DNA, 638 bp, Homo sapiens
atgaatcttgatatacctgttactttatatatggcaataatatgagaaacaggaggaataatactggataaacatctaatatttaatgttatgctttgctatcatatgcgttataggatataaatctcacagacagggtttgctgttggagcaatgctcatgctatgaatgtatgcaagaaacacataaagcctgcctaggaacctctattctcccctcactttttttgcttctttcttttcctttttccttcctttctttctttcatcacaggtgatcatataaatagtttggtaccttaagtactttaaaatccattggattttggagcaatttttcaaaatttttcaaatttttcaaaattttggagcaagatttcaaaaaaaaaatctatgattcaatacattgccattcatcattaccttccctttacaacccttcatgctattttagtgcagatgagaactctcctattgtagctartttgaattcatttttcaaatgagaattcatgagctactatgctaaaagtaaggtctgttacatcttctgcacttccattgtctgctaatgttgtaatatgatttttaagtaattgactttcttttgacacgctttcttatttagaaactcaggct

SEQ ID NO: 885382 - DNA, 580 bp, Homo sapiens
tattctagtacttttgttattttattttgttacattactctctgatcctttcagaatttgttctggtgtaatgtaagatagggattcaacttttttctgtatggccacccagttgtcttagcaccatttattgtatagctcatcttttctatacacatatgaaatgccacttttatcatataccaaaatttcatttattttttgtgtctgtaactttatattttgcttcttaaatttacatctctattcatgcagtagcttcatatcattttaattactgaggctttatggtgttttatgtggtagagttactcattcttcattacacttttttcagaattttcctggctgctcttgtttgtttctttttccrtataaactttagaatgagtttattttgttctgagaaaaaaaaaaagtattgacattcagggtgccattacatttacaaattagctgtgaaaggatgaatgtttttatggtacattttcttatccaagaacatagtacgcatttctatttatgtattttatgtcccttagaagcatcttaaaagctttcttcatatggttcttgcata

SEQ ID NO: 885383 - DNA, 580 bp, Homo sapiens
tattctagtacttttgttattttattttgttacattactctctgatcctttcagaatttgttctggtgtaatgtaagatagggattcaacttttttctgtatggccacccagttgtcttagcaccatttattgtatagctcatcttttctatacacatatgaaatgccacttttatcatataccaaaatttcatttattttttgtgtctgtaactttatattttgcttcttaaatttacatctctattcatgcagtagcttcatatcattttaattactgaggctttatggtgttttatgtggtagagttactcattcttcattacacttttttcagaattttcctggctgctcttgtttgtttctttttccatataaactttagaatgartttattttgttctgagaaaaaaaaaaagtattgacattcagggtgccattacatttacaaattagctgtgaaaggatgaatgtttttatggtacattttcttatccaagaacatagtacgcatttctatttatgtattttatgtcccttagaagcatcttaaaagctttcttcatatggttcttgcata

SEQ ID NO: 885384 - DNA, 600 bp, Homo sapiens
aaatggttctgtacaaataattttagcagtgttatgtatgatattaaaaagtggcagcaatctcaatgtccgataataaggggcataattgagtaaattatggttcaatagtagtagtgtggattacattgacaaaaaaagatgaatataaattgctaagaaaaaatatgataatctgcttatgaagtaatataaaatgagaaagtgtagaattaacataatataaattatgcttacatgtaaaaaaagatttctttttttttttttttgagacggagtctcgctctgtcgcccaggctggagtgcagtggcgggatctcsgctcactgcaagctccgcctcccgggttcacgccattctcctgcctcagcctcccaagtagctgggactacaggcgcccgccaccacgcccggctaattttttgtatttttagtagagacggggtttcaccgttttagccgggatggtctcgatctcctgacctcgtgatccgcccgcctcggcctcccaaagtgctgggattacaggcgtgagccaccgcgcccggccgtaaaaaaagatttcaaaggaaaaaatttacgtaggcaatatgtaaaggt

SEQ ID NO: 885385 - DNA, 600 bp, Homo sapiens
aaatggttctgtacaaataattttagcagtgttatgtatgatattaaaaagtggcagcaatctcaatgtccgataataaggggcataattgagtaaattatggttcaatagtagtagtgtggattacattgacaaaaaaagatgaatataaattgctaagaaaaaatatgataatctgcttatgaagtaatataaaatgagaaagtgtagaattaacataatataaattatgcttacatgtaaaaaaagatttctttttttttttttttgagacggagtctcgctctgtcgcccaggctggagtgcagtggcgggatctcggctcactgcaagctccgcctcccgggttcacgccattctcctgcctcagcctcccaagtagctgggactacaggcgcccgccaccacgcccggctaattttttgtatttttwgtagagacggggtttcaccgttttagccgggatggtctcgatctcctgacctcgtgatccgcccgcctcggcctcccaaagtgctgggattacaggcgtgagccaccgcgcccggccgtaaaaaaagatttcaaaggaaaaaatttacgtaggcaatatgtaaaggt

SEQ ID NO: 885386 - DNA, 588 bp, Homo sapiens
ctgtgcattcatgtaacaaacaccatgatgaagctatagaatgcttccataacccccaaaatttctccatttctcttcccttggtactagtttctgacagtcactgatctgatttctggctctatagtttggccttttccagaatgtcacataacaggaatcatacagtatgtagctttttatgattggctttttttcacttggcataatgcttttaagatgaatccattttgttatgtgtatcattcccttatttcttatatttttgagttggatcccattttacaggtataccataaaaggataatttgtttattctttcattaattgttggatatttggtttggtgattatgaatgaaatttctataaacagtctcagataggtctttgtgtagggactttacttgrataaatatataggagaaggagtccttgattgtatagtaagtgtatattcaactttataagaaaatgccaaatgttttccaaagttgctgtaccattttacattctcttcagtaatgcgtgagtttcagttcaacatctaaaccaacacttgctggtgattgtttataaattttagcca

SEQ ID NO: 885387 - DNA, 585 bp, Homo sapiens
ctgtgattatcatgcagtacaatagatcagtacaacttatgactccagtctaactgaaaccttctatcttttaatcaacatctgccattttcccatccctttgcttcccactaacctctgggacacctttctcttatctgtttttatgagataaacatttttacattcacatataagtgacattatggagcatttgtctttctgcacctggcttacttcacttascatgtcttccagttccaaccatgttattatgaatgacgtattttctccttttgtaaggctagattgtattccattgagaatgcacatatcactttttaaaaaacattcacatattgatgggcactttggatgattccatatcttggctattgtgaatagtgctgcaataattatgagagtgcagatatctctttggcataccaatttcaattcctttggatatataccctgaagtgggactactatttcatattgtaattctatttttagtttatttgacaaaatatcatactttttccaagtggctggactaatttactttcccaccaacactgtacaaagattcccttttctccacat

SEQ ID NO: 885388 - DNA, 657 bp, Homo sapiens
tcatgccttcttatatggtttggttgtgtccccgcccaaatctcatcttgaattgtagttgccataatccgcacacgtgatgggagggacctggtgggaggtaattaaatcatggggttgatggttttataaggttttataagagccccctttgctcagccctcattctctctcttgctgccctatgaagaggtaccttctgccatgattgtacatttcctgaggccttcccagccgtgtggagctgtgagtcaattaagcctcttttcttttttctttttcttttttttaataaataaacatttttaattttgagagagttgtagattagcctcttttctttatcaactacccagtcttggatatttcttcatagcagtgtgaaaatggactaatatagtaaactggtagcagatagtggagtactgctgtaaaaattcctgaaaatgtggaagtgattgtggaactgggtaacaggcagaggttggaacggtttggagggctcagaagcagacakgaagatttgggaacttttggaagttccttgtctttgggaacatttggaacttcctagagacttgttgaatggctttgacaaaaatgctgaaagtaatatggacaataaaatctaggttgaggtggtctcagatggagatg

SEQ ID NO: 885389 - DNA, 670 bp, Homo sapiens
gcccatttctttctctcttattctgtgatatcactactcagatgttagaccatttgatactgttccacaattataggatattttattattttattctttttttctctttgaataataatttgggtaatttttgttgacaccttctaattcattcattcattcctcagctagatgaagtctacctaaaaaactgtttaaggcatacatcatctctattaccatgttttttttaggtctagtatttcaatttgattgttttatatagtttcaatctttttgttgamattctacctctattcatttatgttgccctccttttccacttgagcctttaatatatttaacaatagttaattttaaatctctattttatattaccaatatgtagctcatctctgaagctggttttgttgattgtttttagaaaatgttagttttttctggtgtcatcatttttaattgattatttaatatcgtgtgtacaatacagatggtagagtatatattttaaatgaattttcctctatttctattaggcttgtattgtgtagcatctagtcaatcttctcaagagttgcactgggcttggcatttgttgttgcttgatactgggtatggaagaagggtttaactacaaagatcatgagagaaatttttgaactgatagaaa

SEQ ID NO: 885390 - DNA, 665 bp, Homo sapiens
accattgtggaagacagtgtggcaattcctcaacgacctagagtcagaaataccatttgacccagcaatcccattactgggtatgtacccaaaggagtataaattattctgttttaaagacatatgcacgtgtatgttcattgcagcactattcacaatagcaaagatatggaatcaacctgcatgtccatcagtgatagaccagataatgaaaatgtggtacatatacaccacagaatattatgtagccataaaaaagaatgagatcatatcttttgcagggacatggatagagctggaggccattatcctttgcaaactaacacaggaacagaaaacaaaataccacgtgttctaacttataagtgggagctaaatgatgaaaacacatggacacagaggggaacaacacacactagggctttttggaggatggaaggtgggaggagggagaggatcaggaaaaataactaatagattccaggaataatacctgggkaatgtaataatctgtacaacaaactctcatgacacactttacttatgtaacaaacctacacattttgccacgtacctctgaactcaaaagtttaaaaaaatctatatttattcacatgcttttatccacatgtgcaaacatatttggcacataagcattccaacat

SEQ ID NO: 885391 - DNA, 628 bp, Homo sapiens
atttgattaaatcagataggattttgtaaatgacaagacccatcttcaagttttgaaaatgataatttcctagaaataatagcaacaataataactacttattttctccttaggattaactttagaaaactaatataaatatcagagaaagcatgattcatttgatttactctcaggtatattagtgggrcaatttagagacatgcctttggggatattgttgcaacttagtattccaaaggacctttgaatcaccaaagctaacttttcaggaccagttggtagggaattgctggcttgcataatatctctttcaaacctgatttccgctcactggaagaacagatgaagtagctcttagtaaggagtggtaattattaattcagttatttggatatgccttgacatacatgaagaaacatgagaaaattaaataaatacactatttagcatctctgtggcaaggtttttaccagctttttggttcagtgactgtgaaaatattgtcttacccttaatcaaaaaggaaattaatttcaaacaaagtttccattttgggtcagaatgaaaaggaaaaaacatgtaggtagctgcttgtgtggaacacagtgtgctaagtgtcatcttc

SEQ ID NO: 885392 - DNA, 613 bp, Homo sapiens
caagcaatgctgcaatgtataatttgtacatatgtattttcatattgtcagaagtgcatcttcagggtaaaatctagaattgtaattactgagtcaaaggtaaatgtatatgtagtcttattaatgttgctaaattgacctccagaagggttgtgccaatttgcatccctattattaatacattgagattggctgtttctcacaggctcaccaatagactgcggtgtcatgctgtttaatttttactaatcttttaggtgaaaaataatatcttagtgctgttttattttgcatttccttagtgagtttgaatatctttttatacattttagagcaagttttatatatttttggtaaattgtcagttgatattctttctcaacgtgacaacttcataatttatgacratttttgcttggctttttttcaatgttatgtagtcaaatttatcaatcccttcattcacttcccctgaattttaagacatacttgcaataactttccctgtgccaaggttaaagaagaatttattgacttttttagtatttgtagggtctcattttctatatttagacctctgatcgatttaaaatttattgatatggtgagaagt

SEQ ID NO: 885393 - DNA, 512 bp, Homo sapiens
taattccctccttgtagaatgtatctccaaatacagtcacattgggggttaaggctttaatacatacattttgaaggaacacaatgcagtccacagcagaatggaagctgtaagcaatggaacaacctcccagggaaacagtggggatcattcctggggaaataaaaggtcactggacttgtccagttcctcaatatattgtaggcctcctcctgagcttttggagatgcgtggaagtgaagggcacaataaaagtcttaaattagaagaaaatgtgcataakagcatatgcacataaatatatgcatatattcttcagaaacatgtattgtataaatcataataacataaaacattttggagtattattttataggcattcagttatattagataacattaataaatccacattttgttgtaaattatcttttttatttaaaatgatatgttctatttgtatttacatatttaattcacacaaacaaaacacagaacattacttaccatag

SEQ ID NO: 885394 - DNA, 579 bp, Homo sapiens
tgtctttccactcatcttttccatcataatcaataatgaagtcttaaaatacagtgtacatcactagccatgtttcggtgaaaaagttctttgtaaatatatgatattacctaaatttatgtaaacatatcacaattgggccttccaatataccttccaaaccccttttctactatatttcccatgtacctcacattccaaatttttcatcttttagacaactgctaaattcctaaattttgaagaaatarcattgtgaggttattctgctgttattttgttttgttttatcatggtaaaaacacttactgtgagtactacactatcaacaaatttttatgtatacaatagagtattgttaactatttgtgcaatgtcataaagtaggtctctaaaacttaatcatcttgcataactgaaacttcatacctattgaactatgttttattgactgacacacccagtgcacctattaggatgcaatgtgcagtagtataggcaataaataatggttcattcaataataataaatactttctacatttccattcagtctcactgagtatcttattgtagtcc

SEQ ID NO: 885395 - DNA, 588 bp, Homo sapiens
ttgtggatgttcactgatatctaggattcaagagttgggtacttattctaatctcaatctggatttgtttctatccatccttcttgagaaggctttccagatattcaaaggaaattaagtgttgtaaactaagtctctgattaatgcagttttatctgcactagagaatgtctccaactcaagaattttaaaaactttgcagattcctgctgccttgatgggcttgggtacaattcaggagaatttcctggattcacaggaagactttcattctttttcttcacttttcctcaagcagaaggcaccactccttgctggaatacctggagttggkgggagcgtgatgcaagcactctcatgtccatcacagctagaacaacactgagtgacacttgaatcctgcatagtactgggttgtcccaaggcccatggtgactacttcctggctatcactgatgtttattcaaggcaaaagagatctttagacagcacgtagtgaatattaccaggactgagttcttccctgtgtgacagcaagttcctttgtgggtccacagcagatccaaaaatgcagtccagctgggcgtg

SEQ ID NO: 885396 - DNA, 551 bp, Homo sapiens
aggaaatacattacttcgtagtatcatcacttaaactttggtttaataaaagtatgtggtccttcaaaaacagattatcctttcagaaattaacactttttaaaaagtcattgctttcttctgaacgtttacttttctttagcttatcytttatataaggtaaataaattgagatagtaggtataatcaatgtattgatgtcttatcctactttttgtgattgttttttaattaaagattttcacttcctatgtactcttaagagacactaacaactttaagataaaatagaatcaacaaagaatcaatattaactcgatcagtttaattgttcttagtttattacctgatacaatatagtcatcattgtagaagaaatgataccctggtttaaaatgtgataacctaaattgtatcattagccccatgtatatttctctgaaatgtagcacaggtacgtattagtccttaaatatatgatgaacacgttttcaaaattaggagacagaggagatgagaagatattataaatgagacaaatgtgttttata

SEQ ID NO: 885397 - DNA, 602 bp, Homo sapiens
gaatgttccccatgctgctctcaggatagtgagttgtcacaagatttgatggtttgaaagtgtgtagcacttcctcctttgctctctctctctctctctctctcctgccaccatatgaagacagtgcttgcttcccctttgccttctaccatgattataagttttttgasgtctccccagtcatacttcttttacagcctctagaaccgtgagccaattaaatcttttttccttcacaaattacccggtctcagatagttctttctagcgctgtgagaataaactaatacagaaaattgataccagagaagctaggcattgctataaagatacctgaaaatgtggaagcaaatctggaacaaaataacagatgttgtaacagtttggagggctcaaaagaagacaggaggattagggaaggcttgaaacttcctagagacttattgaatggttttcaccaaaatactgatatctgtatgaacaatgaaattaggctgaggtggtcttagatggagatgaggaacttattaggaattggagtaaaggttactcttggccaagctttagcaaagagactggcagcattaagcccctgctccaga

SEQ ID NO: 885398 - DNA, 358 bp, Homo sapiens
agccatttcttcagatggtgcaagtcccaagttttggtagctttcatgtggtttgggtctgcaggggtgccgaaagcaagacttgaggtttgggagtctatgcctagatttcagagagtgtatgggagtgcctggatatacaggcagaagtctgctgcccaggtgcagacctcatggagaactctactagggccatgtggagggaaaatgtggggtcraagcccacacacagagtccccactgcggaactacctagtggagctgtgagaagagggccattgttctccagactcaagaattgtagatccactgacaacttgtaccacatacctataaaagttgcaggcactcaatgcca

SEQ ID NO: 885399 - DNA, 668 bp, Homo sapiens
tgtctggaacttcaacttcccttcgttcttaccagacttttaataagaccaaagttttttctagttttggctaagaagcctaaaaatgaagttcatttaattcattacaaaattacgatgctagaataattatccctacacgaagaaccttttattcaaatcctccctaaattaatacttgattttgyttatttattcatctattttgtgttaaatataatacaacatgaagaaacattatgaaagtctctttatttaagatgggactatcaaatagcacaacaaagcattgtatttccttcttgacctcttattcaagagtaagattttattacagtatcattccttgtgcatatatatacatatgtgtgtgtatatatatgtctgtatatatatgtgtctgtatatatacatatatatgtgtctgtgtgtatgtgtgtatatatatatgtatgtatttacttttggaaaataaacagatgtgacagcaagttctctcctctgaactcatcttgatacctctaattattacttgcttgccaatcactggctcaagggaaacataatatgccattcgatgtttgatatgcattctgtcatacagtaagtataccccatgttcaggaaaagtctcctcttgactaaagtgttgaaaaaataaaaatttg

SEQ ID NO: 885400 - DNA, 668 bp, Homo sapiens
tgtctggaacttcaacttcccttcgttcttaccagacttttaataagaccaaagttttttctagttttggctaagaagcctaaaaatgaagttcatttaattcattacaaaattacgatgctagaataattatccctacacgaagaaccttttattcaaatcctccctaaattaatacttgattttgcttatttattcatctattttgtgttaaatataatacaacatgaagaaacattatgaaagtctctttatttaagatgggactatcaaatagcacaacaaagcattgtatttccttcttgacctcttattcaagagtaagattttattacagtatcattccttgtgcatatatatacatatgtgtgtgtatatatatgtctgtatatatatgtgtctgtatatatacatatatatgtgtctgtgtgtatgtgtrtatatatatatgtatgtatttacttttggaaaataaacagatgtgacagcaagttctctcctctgaactcatcttgatacctctaattattacttgcttgccaatcactggctcaagggaaacataatatgccattcgatgtttgatatgcattctgtcatacagtaagtataccccatgttcaggaaaagtctcctcttgactaaagtgttgaaaaaataaaaatttg

SEQ ID NO: 885401 - DNA, 645 bp, Homo sapiens
tcaagggaaacataatatgccattcgatgtttgatatgcattctgtcatacagtaagtataccccatgttcaggaaaagtctcctcttgactaaagtgttgaaaaaataaaaatttggaagctggtcagtttctgcatttggaaaactacagggattttggcaacaattgatatgagctagttcctctgatatgttatattagacaatctttgagatgtctttgttcttgctttgtgttcagcaaattctccagccctacttatttttatttacatttgacatgggatacaggaaatattttatttattttgttgtacttgatacgtaatacttgcagatatttatgggattcagtgtaatgttttgatacaaatatacattgtttaataatcatatcattgtattaagcatatccatcacctcaaaatttatttattctttgtggatagaaccttcaaaatcccctcttctagttattttgaratacccatgataatattgtttactatagtcatcttattgtgatatagaacacagaatttttttcctcctataactataattttcatcaatctcttactatcattccttctttacagcccacttcaacttcagttagccattattctattctatgcttctat

SEQ ID NO: 885402 - DNA, 635 bp, Homo sapiens
tgatgcagcaaaaaaataaatatttaaggttattatttaaaattactaagataaccaatgtaagaactaaaaagtatataaatgtagatatttagaagataggtggtctaaatgagtcaggtgctcatctttcatacatgagagctaacagatattgttaaaagcttataaatcatgaaacagaagcagaaatacatgatctagtcttttgaaagtctgtaccagaaaaagatacacagttaaaagcaattaacttgagataaggatttagggaaaggagagcattgatgggagactggcatacttgtatgatttattgccacatgcatatatttgatgcaaatgataaaaaatgttgaaatgaaggcaagtgttaagttccagagaagaagtaaatgcctttgggggcagcagtcttactctcttgcaggtaggccatctctgtttcctccttttcctcagccactgtgcmcatgttctgcattctcttgccatctagcacctcagctcttcaatgtctgctctcaattctctttctgctttgactcagcgtcacttctaactgggaaacttacaatatccctgtgactcccctgcctttttctaacgtcctacacctcttctcttcatattca

SEQ ID NO: 885403 - DNA, 647 bp, Homo sapiens
tctatcagggctattcaacactgccattgttacttgaaaacggccatacgcaattaggaaattaatgggtatggctgtgttccaataaaactttataagaccagcatattcctcagggttatctagagaaaggaatcaatgggatagataaatattaggttgrtgcaaaagtaactgcagcttttgccattacttttaatggcaaaaaaaaccacaattacttttgcaccaacttttaatagcgagagagagagagagagaagaaatgtattatatgaattggctcatgtggttatgaaggctgagaagtcccacaatatgccatctgcaagatgaaggcccaggaaagccggtggtacaatttgagtccaaaggcctaagaaccaggaaagctggtgttgtaactctcagtctaagaccaaagacctgagaaccagaggggccactggttggagtccccagagtccaaaacttgagaactagatttccacaatctgccatctacaaagtggagaagcaagatagttggtatgtaattcagtctaagtctgaaggcctgagaggatgctgatggtataagtcctggtctgagtctgatagcctgagaaccaggagcaccagtgtttcagggcagaagatagatgtcc

SEQ ID NO: 885404 - DNA, 647 bp, Homo sapiens
tctatcagggctattcaacactgccattgttacttgaaaacggccatacgcaattaggaaattaatgggtatggctgtgttccaataaaactttataagaccagcatattcctcagggttatctagagaaaggaatcaatgggatagataaatattaggttggtgcaaaagtaactgcagcttttgccattacttttaatggcaaaaaaamccacaattacttttgcaccaacttttaatagcgagagagagagagagagaagaaatgtattatatgaattggctcatgtggttatgaaggctgagaagtcccacaatatgccatctgcaagatgaaggcccaggaaagccggtggtacaatttgagtccaaaggcctaagaaccaggaaagctggtgttgtaactctcagtctaagaccaaagacctgagaaccagaggggccactggttggagtccccagagtccaaaacttgagaactagatttccacaatctgccatctacaaagtggagaagcaagatagttggtatgtaattcagtctaagtctgaaggcctgagaggatgctgatggtataagtcctggtctgagtctgatagcctgagaaccaggagcaccagtgtttcagggcagaagatagatgtcc

SEQ ID NO: 885405 - DNA, 612 bp, Homo sapiens
tgctgcaatgcaacattgactcaaataggtattgaacataaaacctaccctgcaataatgcaatccgtaaacccacagaggcaaagacaagcataatctaggctgattctcacctcatcctctgctgattctgtctctctttcacgatgtctgyagtcgtctgttaaagggcccataggcaatgtagggtgggagggagggtgctgcgtaaactgaggaactgagaaatcaatccagataggaaggcaacataaacttttgaccaggtggtcacaggaaggtagaagtaatggaaagtatgcaggtctaggaaacaaacaaaaacaaatatgtttgtatatacactatatgtcgaagttttggtcagtggcattaattcagctgcataattacaagaaaatcacttatctgtgtctcgaattttgacaaccaaaaaatggagataatctgcaaagctgacagaactaaatttgggagccacatagaacaaagtttaaaccttggatcctctgcttgctgactgtagaagcctggacaaatcgcactacattagaactgatatttcctcctgaaattcagggaaataattttcatctcaacagggctgtagca

SEQ ID NO: 885406 - DNA, 702 bp, Homo sapiens
ggatctaccactttgggcaagtcatttgcattttttagtcctcagtttcctcaatggtaaaatggcaatgatcgtagtacctatctcatagtattttgtgagaaacaaataatattataagtgtggtgactagactgtcttaacagtgtttgcatttaataactgttagcaattgttaactattgcctttaaatggatatctttaaatgtgctgacctggtggcctacccacaatgttccccctgaccaggacaaggttaatacctgatcacatagactccacctctctcaagttgtcatacatggacttggtcctgagatattcaagaaaacagcttgtatttataagtggaatccacatttataaataatctaatttatattccattgaactatataaaattactgggttttttagcaaaaaatgaatgtcaaatgttagtaatttcatatggtttgacctaatgttttcaktttgattagagcacaatttttcaatgtgtcaagcgttagttgagtctagttctagttgtgaagttgcaatttgaggtagaaataatattgaagttacagagctacatcctaagacctcagaaaacatgaaatattcttctcttttatttttcactcctttctggggcttgaatcctgccctgctctcaagaagtttgtctgtctctttttttatcttttctagctccc

SEQ ID NO: 885407 - DNA, 630 bp, Homo sapiens
aagaaatccattaagctaaaatgtgtacattcaagataatgtgtgcgggaaattaccatactcatagcaaataaaaagtcaatccaaaccatccaccttgtctcatgtttccttgaaacaagattaataataacaaattaaagacattccactagcctttcattactctctgtaaaacagcatcaataaccagctacccggttatggtgccggacatytgactatcacatgcactaatgtgcgcacacacgcacacacgcacatacaaagtgatggttttctctagataataaggactttaatttcacaaggtttacagaatcaactctattgttgagcttattaccctacagcaaatatttctgcaacagaattagttgtatgaaacttttgcagtttgagtttttgtactttaggtttacagaaaatatcagtcattgccaaatctgattctccacgttgaaaatatttactgccacttgcacacataaaaaagtagatttctgcttccaggagacacaaaaaatatctaaacttatggttatatcaccacaagtctcaggagttcagcttgcccaaaatcccctcattcatgttattgctgcactcggtatttagaggaaaaaaaaa

SEQ ID NO: 885408 - DNA, 630 bp, Homo sapiens
aagaaatccattaagctaaaatgtgtacattcaagataatgtgtgcgggaaattaccatactcatagcaaataaaaagtcaatccaaaccatccaccttgtctcatgtttccttgaaacaagattaataataacaaattaaagacattccactagcctttcattactctctgtaaaacagcatcaataaccagctacccggttatggtgccggacatctgactatcacatgcactaatgtgcgcacacacgcacacacgcacatacaaagtgatggttttctctagataataaggactttaatttcacaaggtttacagaatcaactctattgttgagcttattaccctacagcaaatatttctgcaacagaattagttgtatgaaacttttgcagtttgagtttttgtactttaggtttacagaaaatatcagtcattgccaaatctgattctccacgttgaaaatatttactgccacttgcacacataaaaaagtagatttctgcttccaggagacwcaaaaaatatctaaacttatggttatatcaccacaagtctcaggagttcagcttgcccaaaatcccctcattcatgttattgctgcactcggtatttagaggaaaaaaaaa

SEQ ID NO: 885409 - DNA, 641 bp, Homo sapiens
ccggttatggtgccggacatctgactatcacatgcactaatgtgcgcacacacgcacacacgcacatacaaagtgatggttttctctagataataaggactttaatttcacaaggtttacagaatcaactctattgttgagcttattaccctacagcaaatatttctgcaacagaattagttgtatgaaacttttgcagtttgagtttttgtactttaggtttacagaaaatatcagtcattgccaaatctgattctccacgttgaaaatatttactgccacttgcacacataaaaaagtagatttctgcttccaggagacacaaaaaatatctaaacttatggttatatcaccacaagtctcaggagttcagcttgcccaaaatcccctcattcatgttattgctgcactcggtatttagaggaaaaaaaaaagcccacagacaatcagaattctgatyggagagaacacaggataaaaggtttgtcctggtgaccagtgaagatgcagcaacttaatgattgtacagagtgagcaaggccattgcctaatatatcaaatccatcaagaaaaataattacatccatatcaattattggtctattagaaataaagacctggtggaaggacactatccaaag

SEQ ID NO: 885410 - DNA, 641 bp, Homo sapiens
ccggttatggtgccggacatctgactatcacatgcactaatgtgcgcacacacgcacacacgcacatacaaagtgatggttttctctagataataaggactttaatttcacaaggtttacagaatcaactctattgttgagcttattaccctacagcaaatatttctgcaacagaattagttgtatgaaacttttgcagtttgagtttttgtactttaggtttacagaaaatatcagtcattgccaaatctgattctccacgttgaaaatatttactgccacttgcacacataaaaaagtagatttctgcttccaggagacacaaaaaatatctaaacttatggttatatcaccacaagtctcaggagttcagcttgcccaaaatcccctcattcatgttattgctgcactcggtatttagaggaaaaaaaaaagcccacagacaatcagaattctgattrgagagaacacaggataaaaggtttgtcctggtgaccagtgaagatgcagcaacttaatgattgtacagagtgagcaaggccattgcctaatatatcaaatccatcaagaaaaataattacatccatatcaattattggtctattagaaataaagacctggtggaaggacactatccaaag

SEQ ID NO: 885411 - DNA, 675 bp, Homo sapiens; identical to SEQ ID NO: 866442

SEQ ID NO: 885412 - DNA, 558 bp, Homo sapiens
catagtatgaccccatctctacaaattttttttttttaattagcggggcctggtggcatgcgcctgtagtcccagctactcaggaggctgagacaggaggatcgcttgagcctaggaggtcaaggctgcagtgagccataattgcaccactgcactgcaagctggataacagagcaagaccctgtttcaaaaaaaaaaaaaaattggcaggcttcagttggaaagtcttggcctcagtgcccttgaagggcaggagtagtgcttctgccttgtgaatgccttctgaccccaccaatggggagagrtggacacgagagctgggcagatggaaatcagttgtatctttatcaatggtgacagctggatgtgaccacctgcaggctccctgacacctgctcctccttcctttacctctgttgcagcccaccctccaacccctaccacatacactgccatgctggatagtgcctgccgggtgagcttactcaggaaggagtggggactcagccaaggatcccatgaacaagcaaagcacagacaccctgaggggtgtgcagc

SEQ ID NO: 885413 - DNA, 597 bp, Homo sapiens
ttatagaaacctttatgtagtttaaggaataatattgttgattaaatcttagtcattttcattatggcttctgaagttgtaataccagaaattacttaaaaatgtcaatgacaagatttcctttggatattataatatgtcttaaaccatccccctcctttgatagctaagtccagagatggtgtctgtctctctgtggttacactatcccaagcttaactgaattactatttaatctcttwgatttgtgcttttgtgatttatagtcttcagtaatttcacaagaaagttgaattgaatttatttatctaacactctaaacaccaaaatttagttctttaatgagaaattggggggagggggtgtaaagtttattatattactatgaagttaatatatatccattaaagaaattaccaagaaactggagcccttccaccaaaacgcaaccactgttagcatttggatggatttccttgtcttctcatgagaaaggtgtgttctaaaaattgatctgcctttcctgcttttaggactgccttaaggaagtactggagattgtggaactgggtatctcaggaagtaagtccaagaaca

SEQ ID NO: 885414 - DNA, 598 bp, Homo sapiens
ttgttaccagttgcggaggcagcgcatagcacaacgtagtacctggaacctgacggcacctagcatgtttcaacagttagcgcccgcatcaccccaagggattaaatttggcattctttctcttgagactcaagtcctggcagagctgttgatcctctcacaagattctgtcatgtatgtaaagtacactttggaatcttaaattttagagccgagaggtgccttatagaaaatctgtttcatccctctcgttttacagagaagacaccaggcctgaagagcgtgatgtagctggagctagctacacctcttgatagctaagactccaaggctccagacaccttggtgattgcactctccaccatgccaggaccgcagtgccagtttaccccactcacctgtagagaatgtatccggcggaggtcattatatatacttggcttgattcagkttatggagaagtcaggcatggccactgtgtgggtttgatggtatttctaggtgaggtaggccgcctatggtgtatttttggaactaaaagcctacaccccccagccacccctgaaagtttcattgctgttctctattatttgcagca

SEQ ID NO: 885415 - DNA, 584 bp, Homo sapiens
tctttgtaagtctctaaggacctgcttcatgaatctgggtgctcctgtattggatgcatatatatttaagatagttagctcttcttgttgaattgatgcctttaccattatgtaatggccttctttgtctcttttgatttttgttggtttaaagtctgttttatcagagactaggattgcaacccttgcttttttttttctttccatttgcttggtagatcttcctccatccctttattttgagcctatgtgcatctttgcacatgagatgggtctctgaatacaacacaccaataggtcttaattctttatccagtttgccagtctgtgtcttttaattggggcatttagcccatttgtatttaaggttaatattgttatgtttgaatttgatcstgtcattatgatgttagctggttattttgcccgttaattgatgcagtttcttcatagcgttgatggtctttacaattcagcatgtttttgcggtggctggtaccagttgttccttttcatgtttagtgcttccttcaggagctcttgtaagacaggcctgatggtgacaaaatctctcagcatttgct

SEQ ID NO: 885416 - DNA, 584 bp, Homo sapiens
tctttgtaagtctctaaggacctgcttcatgaatctgggtgctcctgtattggatgcatatatatttaagatagttagctcttcttgttgaattgatgcctttaccattatgtaatggccttctttgtctcttttgatttttgttggtttaaagtctgttttatcagagactaggattgcaacccttgcttttttttttctttccatttgcttggtagatcttcctccatccctttattttgagcctatgtgcatctttgcacatgagatgggtctctgaatacaacacaccaataggtcttaattctttatccagtttgccagtctgtgtcttttaattggggcatttagcccatttgtatttaaggttaatattgttatgtttgaatttgatcgtgtcattatgatgttagctggttattttgcccrttaattgatgcagtttcttcatagcgttgatggtctttacaattcagcatgtttttgcggtggctggtaccagttgttccttttcatgtttagtgcttccttcaggagctcttgtaagacaggcctgatggtgacaaaatctctcagcatttgct

SEQ ID NO: 885417 - DNA, 629 bp, Homo sapiens
tcacaccaataatgcccttggctggtggttttgaatgtctttaccataaattttataagggattgtgactgtttatcaggcatttagtttgtcatggtgtaagattgaccagacaattgctcatgtaagaatttgtaggttatgatttgatgaattggatgactgctgctactagggagcaattttcgtttgccttttctttgataattcactggaaaactgtgaataataatattgcatataaaagagacaaagatggataaaggtagacgggaataaattttctctgtaagtaggaaacagctatgaatctcttattaaattttrtaggcagggagcctgcaactctgagcatgagttcttattagttcttattataagaaaaatttagatcagttatggacttaccattctaaagcaatcagagttgaaatttttcatattttgaccacattttgcagagggagaagggtaaaagaaaaagctgttattgaaatttgtaagcatatagttcatagttgaaagcagcggagaccagatttggctgatttgagtagaaaattatttattcaaaggacattgggctttgccagtcttgggactatgcagatgggaacaacagtccaatc

SEQ ID NO: 885418 - DNA, 640 bp, Homo sapiens
ttcaggtagggatgacaaggttttggaccacaaatggagtagagagaggtgtgatgatatgttttgtggtgaccagggaggaaagagttctggcagaattaaaaatcaaatttatgaaaagctgaccagacaccagataaaatgagcatttcctattcatttggttactgcttgagctatggcatgatgaaaaccttcattcaccatgtgtttatggctgattttccaggggactagtaatactaagtatgttttaaattttatgtatttgaaacattgctttttaatttagcctttaaaaaattagrtagttggcttattaatgtaattgccaaatgtagctttaatatgaagtgacgtaagtaaaatgtaaagaaaaataattgatgacagttattttaggccaggcatggtgggtcttgcctgtaatcccagcactttgggaggctgaggtgggtggatcacctgaggtcaggagttcgagaccagcctgggcaacatggtgaaaccccgtctctactaaaaatacaaaattagccaggcatggtgctgtgcggctgtagtcccagctacgcagcaggccgaagcaagaaaatcacttgaacccagaaggtggaggttgccgtgagcggagattgca

SEQ ID NO: 885419 - DNA, 552 bp, Homo sapiens
gcttgatgtccaagtcgaatgagatggcctggcttcatgtgagtgtaatagattagactgaagttcaagaaggaggtctgagaattgtcatcacagagataatatttaaaactgtgagactggttaagtcatctagagaaaaagtgtagaaagaaaagagattacactttttgaaatactttacaccttyatcttttggcttagtacataccctcaaaggctgcaggttttccatgacgtttcatagtggaatttcatgtaaatctcttacttcagtcaagctggaacacttacgttgcctaagctctccttttgcattgctgctttcctatgctcatttattcttcgtacaaagagtgctttcttacctgctttctacctaacttaaatgcagttttctccaagcagcattatcttattaccacagagtgttctgtttcattttgcaaaattctgcatctttatttcacccctcctaatcttgtctataaagttcatcatatttttgtatatgtctttttttcctgatgagctaatgggatctatggctgg

SEQ ID NO: 885420 - DNA, 620 bp, Homo sapiens
catggattcaaaggtgagtgaaagcatgttttctttctctcagcatctttgttacttcacttctcgaataagtttctctttgttagaattaggttcagaatagcaatttccttattggttactctgttttctgagaagtagaattatcaacaaagaaacaggaatatttcagatcatctactatgtaagaatcaaatgagattgtgtatttcagagtgttttaaaaagagcaaagtattccaaatatctttattcctattaatcacrttaaaaatggaatgagaactgaactacccataaagtttctacaaatgatgccattattttatagatgagtaaaattttaattgaaaaaacccaacattgtataaattattaagttcttaagttcttaagcccttttatacttggtcctgtgatcctggggtggtgactctgtggaccccattttgactttataagctgctttctgttggggtataccagtagggggtttaaaagggagactggtaggccgggtgagaaaggacttgattctttccatgggcttgcagctttctttctgccttctgtctgttcctgtgagcatcagtcctgcaacacttcctcaccaggcaggt

SEQ ID NO: 885421 - DNA, 629 bp, Homo sapiens
cgtcatagccaaactttcctagacaatagttttctaattcattacaatgtcttctgatcctgattctacatattaaacatatgaattttaacaaaaatctcttccttagaaaatacaatatactctttttcttttcatgttctataatgatgttttagcattttctctttagttggtgttactggactgaatatttgtgttccccaaaatttagatgttgaaatcctaattgctaagctgatggtattaggtcgtgggacctttgagaggtgattaggtcatgaggatagaacccacatgaatgagattagttctcttataaaacagaccctcccctgcccccagagccctctttctttttcccatcaccatgtgaagatagaagaagttggcagtctgcaacacggatgagagccatcactcaaacttgaccatgctggcattgtaatcttggatttctagcactctsaccttggatgtccagcgataaataagtgtttgcatttaagtcactgaatctatggtaattttttacagcaaccaaactgaataacacagtggtcattttcttcttaaaattctgtcttccttttgctttctttacttccctattttccttctggtcattt

SEQ ID NO: 885422 - DNA, 480 bp, Homo sapiens
gtggctcacacctgtaatcccatagcattttgggaggccaaggtggggggatcacaaggtcaggagagcgagacaatcctggctaacacggtgaaaccctgtctcccctaaaaatccaaaaattagccaggtgtgggggcacacgcctgtagtcccagctactcaggaggctgaggcaggagaattgcttgaaccctggagacggaggttgcagtgagctgagatctggccactgcactccagcctgggcgacagagcaagactccatctcaaaataaacaaataagtaaataaataaaataaaaagaaayggagaacctaaatggaatccagtggcctccctaagttgagaagacagagctaggagtccaaaaagggaaatacagctacaaatttcagggaagaatacaagagaaaagaaagctgcacaaaaaataagacaactgcagcgatttgttgaaggtccttctcagctttagt

SEQ ID NO: 885423 - DNA, 671 bp, Homo sapiens
tattatgttaattataaaacaaaacctctaggaattacaactccagcatggcactaagggacaaagagccacagcagcaaaaactcattgctctgaatcattatgtaacatctcatgtgatcctcttcattacttcatacctttatttcatgcaacaatctcctccaataaattaaacatggtggtagtgtggcaaccacaaataatttgtaacaatacaattggtcctcatccatgttttgtgcaacaggtacttaagggaagagaccttggctcttgaataacttttctactcactgcctgagcagtggctcaggagcaccaagacaaggcatcctagaagagtcttggaccatttcagtttgtagagctccagaaagtgaggttaatgcagtagccaattcaacgctacacatctattctaggatctagctacaaaattaaggawtaagtatgttattattcttttagcaccaactgttatgtatatttatcagaactagtttaacaaacaagaaataaatatattcacatcacatccccgcccattctaactgaagatgaaacaaccgcatcattgaacgtataggaagaaacaagagatggaataattagctccaaataatcaaacttaaatatatgctcagcatcatgtagacctttctgaagat

SEQ ID NO: 885424 - DNA, 684 bp, Homo sapiens
catgtcagtatgtcaagttgcctagtcccacacttttaaaagttgattgataaccagtatttcaaaatcagatttcacttaaattcctagaattccagtttcttttgaataatcagaagatactgaaccatatatatatatatatatatatccatctatctatctatagaaaaccaaacatgatttcacattatctttgagtaaacaaatgagcccaatactacaatgttattcacacacacacacacacacacacacacacacaaacatactcattgcttgatatacactaaatatccctggagagattcctaataaatagataacattagttgcctccagcgaggcaaaatgggtggctagagaacaggaataggagggagacttttttcaccatgcaccctttagtaaatactgaattttgagccaggcggaatgcattaccaattgaaaatgcatgttttagttgaaagtttttaaattttagggaaaacaaaacacgtgtgagctttagttggtctgtaggctaattgtttgcacrtctcgcctaaattaaggtggtggcagttagaataataataaagaaacagataccagatacaaaggggaaaaaatacaacagccattggcatctaattaaatgagaaaatgaggaagaggggaaagggacatgagtaccacaac

SEQ ID NO: 885425 - DNA, 655 bp, Homo sapiens
aagctatagtacaaggcgacagtaactgaaacagcatggtactggtaccaaaacagacatatataccaatggaacagaacagagccctcagacttaatgccacacatctacaaccatctgatctttgacaaacctgacaaaaacaagaaacggrgaaaggattccctatttaacaaagggtgctgggaaaactggctagccatatgtagaaagctgaaaatggatcccttccttacaccttatacaaaaattaattcaagatggattaaagacttaaaagttagaactaaaactataaaaaccctagaagaaaactgagccaattccattcagggcataggcatgggcaaggacttcctgactaaaacaccaaaagcaatggcaacaaaagacaaaattgacaaatgggatctaattaaactaaagagtttctgcacagcaaaacaaactaccatcagagtgaacaggcaacctacaggatgggagaaagtttttgcaatctacccatgtgacaaaaggctaatatccagaatctacaaagaactaaacaaacttacaagaaaaaatcaaacaaccccatcaaaaagtgggtgaaggatatcaacagacacttctaaaaagaagacatttatgcagccaacagacacagaagaaa

SEQ ID NO: 885426 - DNA, 593 bp, Homo sapiens
agcaatttgactccaagttatctttctaaaaccaaaattaaagtgaacacacacacacacaacaactacatttgaccttgttttcattggctgatggagtaaaaattcacgatgatacggctttgatgactggcggaacgccagggtccttggttttgcaccgactaagataaaacgagaccatcctggctaacacgatgaaaccccgtctctactraaaatacaaaaaattagccgggcgtggtggcgggtgtctgtagtcccagctactcaggaggctgaggcaggagaatggcgtgaacctgggaggcggagcttgcagtgagcggagattgtgctaccgcactccagcctgggtgacagagcgagactctgcctcaaacaaacaaacaaacaaaaaagataaaacgacacagacacacgtggagtggttttaacaagcggagagtttaataggcaagaaagaaggaaaaagctcccccattaagagacagagggagggggacttcaatgagtaaaacaaatcactgtttaaaacaaatttctaatcagatcttgctttgtgtttctggagatggaataaatatattcct

SEQ ID NO: 885427 - DNA, 600 bp, Homo sapiens
cagcatgtcactttacatggtgattaacagtaaataagagggtgcattttccaaactcttaccaataatagatattgctagtaaaaacaaaagttacaatatcagatgaaaaattgaatcttgttcctttaattttgttgcttgatttacattgaatttaagcatattttacagtgtccttttacatttcttcatttttgaggaatatattcttttttttcttatttttctgttgaaccttyctgtaaattgtgttgatttttaaaagctcaggtactaagttatactgtaagtctggaaaatgtgaatcactcttgggaaacagatgtggggcaatggcagtttcatattggcttttaaattgtactgaataggttgttacttattcctctgcactaattgtaaaatagactgatataatgaaccagtttgaatcactaaacttgagctttaacctgggattatggtgagtaggtcattctgcctacaaaaattaaaagaagggtacttttaaagtgtatgctatattgatatttctggattcaggtgtcattaattatttgaacatattttctagctctgtttagataatagtgtgtg

SEQ ID NO: 885428 - DNA, 625 bp, Homo sapiens
actgtaagtctggaaaatgtgaatcactcttgggaaacagatgtggggcaatggcagtttcatattggcttttaaattgtactgaataggttgttacttattcctctgcactaattgtaaaatagactgatataatgaaccagtttgaatcactaaacttgagctttaacctgggattatggtgagtaggtcattctgcctacaaaaattaaaagaagggtacttttaaagtgtatgctatattgatatttctggattcaggtgtcattaattatttgaacatattttctagctctgtttagataatagtgtgtgaatgagatatgctcatgcccattactctaattttcccaattggttattaccaaggtagggtatcaattgagtttgcaggtttatcagtcacytgcagcactgtttatattatgttggcttccttaaaactcatgtcatggaaccaatttaattttctactcaagagcgctgtttaatttacattcagtgtgttctgttgtttgagatttaggctttttcagaacatagttttagcagaacacttcctgaggcaggtaataaattctaagttgcagaatgtcactgaagaaatttatacaagtgcctgttc

SEQ ID NO: 885429 - DNA, 625 bp, Homo sapiens
actgtaagtctggaaaatgtgaatcactcttgggaaacagatgtggggcaatggcagtttcatattggcttttaaattgtactgaataggttgttacttattcctctgcactaattgtaaaatagactgatataatgaaccagtttgaatcactaaacttgagctttaacctgggattatggtgagtaggtcattctgcctacaaaaattaaaagaagggtacttttaaagtgtatgctatattgatatttctggattcaggtgtcattaattatttgaacatattttctagctctgtttagataatagtgtgtgaatgagatatgctcatgcccattactctaattttcccaattggttattaccaaggtagggtatcaattgagtttgcaggtttatcagtcacttgcagcactgtttatattatgttggcttcyttaaaactcatgtcatggaaccaatttaattttctactcaagagcgctgtttaatttacattcagtgtgttctgttgtttgagatttaggctttttcagaacatagttttagcagaacacttcctgaggcaggtaataaattctaagttgcagaatgtcactgaagaaatttatacaagtgcctgttc

SEQ ID NO: 885430 - DNA, 613 bp, Homo sapiens
ctgtttaatttacattcagtgtgttctgttgtttgagatttaggctttttcagaacatagttttagcagaacacttcctgaggcaggtaataaattctaagttgcagaatgtcactgaagaaatttatacaagtgcctgttcattaactaagctcattatgtaaattagcttttgagtggaggttacagaaaggcaagttttggttcaaaacaaagaatatttaataatttttactgcttaaaattggagaacattatttcaagatagtgagttcttagtcattatcagtgttaaatgtccagagactcaattgttttagagggagaccctgctaggagtgaggattgactgactcwctggtgtctgtataaggatggtctaggttcagccacattaacaaataaccctaaaggaggtttagaacaaccacattttctcatatgctaaaatccaaagaagttgagaggtggagcacagctggctctgctcattccccttgcttcaggactcagtttgacagaggcttcatcttgaaatgagcttctgttcttactagtgtatagaaaaagaaaggtggtgaacaaaataatggctcttaaaggtttctcccgt

SEQ ID NO: 885431 - DNA, 591 bp, Homo sapiens
tgtagattcttttgggctgtataaacattttaacaacattgattcttctaacccatgaacatggaatatctttccattttgttgttatgtctttaatttctttcatcaacgttttatagttttcattgtagagatatttcacttcttcggttaattcctaagtatttaatttcatttgcagctattgtgaatgggattactttcttggtttctttttcagatggtttgtttatggcatacagaaatgctactgttttttttgtgtggattttttatcctgaaactctactgaatttgtttatcagttctaacagttgtgtggtggaatctttaggtttttctaaatatgaaatcagatcatctgccaacaaggctaatttgacttcatttctaatttggatgtcctttatttctttctcttttctaatttctctagctaggacttctagtactatgttgaataaaagtgatgaaagtgggcatcctggtcttgttccagatcttagagaaaatgctttyagtttttttttcctatgcagtgtgatactttctgtggatttttcttatatggtttttatgatgttcaggtat

SEQ ID NO: 885432 - DNA, 625 bp, Homo sapiens
tttcatattcaaatgccagagaactcactttccacccaaagcacacacttggttttttaaaaagaaaaaaatgaatacaaaatagtgacttttcctgtggaccatttcaatatgatttgaaccgtcaataccaaccccctaaccccagtaaaaaaaaaaamagcccatgatccaggcttaaacattcatggaaaagggaatgaaaataagaataagaatcacattttatgatcaatttgaattttcgtcaagaaggattttcatcgctgttacttattcttagtacagtcacagtcctgctaaaatgtattatcattgcagcatgtagagataactattggaaatcaagttcgacagactgtagatcaaattcaaaatccataaaacccaaaggaactggataactttgtaatgatatttaacattccacgaaatgagaaaaaaaattattgctttttgaaaggtcaagggaagcagtagcattgaaacaatatgaatgttcccctatatcagctgtgtttacaagttactgggcgtaggatttgtctagtctagctggcggacgccgccttgtaacagtggaatcatcttacatttgccctgctcttttaatgtttcaaaggcg

SEQ ID NO: 885433 - DNA, 625 bp, Homo sapiens
tttcatattcaaatgccagagaactcactttccacccaaagcacacacttggttttttaaaaagaaaaaaatgaatacaaaatagtgacttttcctgtggaccatttcaatatgatttgaaccgtcaataccaaccccctaaccccagtaaaaaaaaaaaaagcccatgatccaggcttaaacattcatggaaaagggaatgaaaataagaataagaatcacattttatgatcaatttgaattttcrtcaagaaggattttcatcgctgttacttattcttagtacagtcacagtcctgctaaaatgtattatcattgcagcatgtagagataactattggaaatcaagttcgacagactgtagatcaaattcaaaatccataaaacccaaaggaactggataactttgtaatgatatttaacattccacgaaatgagaaaaaaaattattgctttttgaaaggtcaagggaagcagtagcattgaaacaatatgaatgttcccctatatcagctgtgtttacaagttactgggcgtaggatttgtctagtctagctggcggacgccgccttgtaacagtggaatcatcttacatttgccctgctcttttaatgtttcaaaggcg

SEQ ID NO: 885434 - DNA, 605 bp, Homo sapiens
tccttcctctggctacaccaaccgctttttaacacatgttgcttaacacatatttaatgagggtctacctgtaccaggtgtgaataaaagagcatccagagagataaaggtactgactgttgttattgagagatactcatgcagacatatgtatttgttagaataggtattctaacaaagttcttctgggtccaagggccttttcacttcttgttttttttttgtttgtttgttttgttttgtttgtttgtttgtttgtttgtttttgagatggagtttcrctcttgttgcccaggctggagtgcaatggtgcgatctcggctcacagcaacctctgcctcccgggttcaagccattctcctgactcagcctcccaagtagctgggattacagtcatgcccggctaattttgtatttttagtagagacagggtttctccgtgttggtcaggctggtctcgaacttccaacctcaggtgatccacccacttccacctccctacacttttcattcctgccatctggaacccttctccttcttggtctacacatggggggatgtgctttctcaccatctcagtgacttcatccactttggaacctacc

SEQ ID NO: 885435 - DNA, 605 bp, Homo sapiens
tccttcctctggctacaccaaccgctttttaacacatgttgcttaacacatatttaatgagggtctacctgtaccaggtgtgaataaaagagcatccagagagataaaggtactgactgttgttattgagagatactcatgcagacatatgtatttgttagaataggtattctaacaaagttcttctgggtccaagggccttttcacttcttgttttttttttgtttgtttgttttgttttgtttgtttgtttgtttgtttgtttttgagatggagtttcactcttgttgcccaggctggagtgcaatggtgcgatctcggctcacagcaacctctgcctcccgggttcaagccattctcctgactcagcctcccaagtagctgggattacagtcatgcccggctaattttgtatttttagtagagacagggtttctccgtgttggtcaggytggtctcgaacttccaacctcaggtgatccacccacttccacctccctacacttttcattcctgccatctggaacccttctccttcttggtctacacatggggggatgtgctttctcaccatctcagtgacttcatccactttggaacctacc

SEQ ID NO: 885436 - DNA, 643 bp, Homo sapiens
agcccacaagagcctcatcagaagcagcgggtggcctagtggaagttcatttatgcatgaaatattcagccagcaacagtgccagccttaaacatcagtaattggggggtttctattgctcctaactagagcctctaaattattgcaaaagactggccaatttacaaattacatatatttgtcatgctcttgtacctttcctgaactaactgaaatggcccctgtgctgtggttgtttgcatactcgccatggtgagctgtgcccagcagagccgggctcctctgcagagcagaacagggtggaagctgcacccagcccaggaagcccygtgttgcccatccatctcactgccgtgattgccggcagtgccccctttctggccttcttagtggggcctccttggttcagaggccaagtgtctgaagcccaggggccaaatattccccagggctatcctgagaagggttggctctgatgtctgcccttgtggggacttgcctagttctgtgaggtcaatttctcattcaacaaatgtttatggaacatcttctctgttccaggctctgtgtgagaagttggggtacaacaatgaactaaaagaggggttgatccagccttggatcagcaagtttagtagcttac

SEQ ID NO: 885437 - DNA, 601 bp, Homo sapiens
cccaagtcctccatcacccttagagaccccgggttcccttttaaggggtttagccataatgaagcagatggtgcttgctgatgatctttggaaattgggttgtatttgcaattcagaaaaggggcactgggatctttgcatatgtgtaaagaaggtgttttctgaaaatcataagggtgtaaataaggtttaggtgcatgtttaaatctacttgggggacaaacttttagggaacattctcaaggtctttaggagtgtctttcagcataataaacaactcatggattacgaattgttcttctagttcattaaagcatgctccataatcacygattgaaggcaactcctagcctagttcaagtaactgtaaacaaaactgtaagatttggtgctaaagctagtgtgatcttcccccattctgaattcactttggtatataaaccttctggccagatcatcttcactgttaaacttttcagatttagttttccacacctggccccaggttttaacggagttagaagctatagttaatgcttggtagacattttctcggaggcatttgaaccagagcaactccatcttgaatagcggctgagta

SEQ ID NO: 885438 - DNA, 552 bp, Homo sapiens
caaaagttgttttacttctccataggtaaaataacttattaaaaacataaccagaatgttattaacatacctacacaaatgaacaataattcctgaatattatctaatgtcaggccatgttcaattttctccaattawctcaaaaaatgtctctttagagccagcttgtttggatcagcatccaaatgaaagtccacgtttttcatttggttgatgcaacttgcaagtctctcttaatctataccatttctccctccttttgaaaccatgctctttgtatattaaagagtctagtagaaagaattttacagtccttgatacatgttagaaagctgatttccaggagggttgtaacaatttgcgcctcttccagcaatgtgagggagtgcacatcttgtcatccccagcactgaatatcattgcaattaagaaaaaatcaatttgataggtgaatgatggcatcttattgctgttttgacttgcatttctgtgattatatgcatgattgaacatttttttcacatgtatattggctgtttgtatttcttcttt

SEQ ID NO: 885439 - DNA, 628 bp, Homo sapiens
ctaggatagttttatccaggacaaatggtaaattgcatggaatgcacagtcaacaggataaaccaggactgttctaggcaagctgggatgtatggtcactctatctgaaggccagatgggctggagggaccagtttcaagacggtgcactcatgtgggtgtcaagatggtactgctattggcaagaggcctcagtttctctccatgcaggctccttcataggactgcttgagtgtcctcagagcagggcagctagctggcttcccccaaaatgagtggcctaagagagggcaacgaggaagccgcagtgtctcttatgctctgcatggtacatcctggtgcttctcatatctcacctggctcaagggctggcccttgttctgccccttcctcttggaagccacttatcacatattatttaatatcatttcttctgtattctgtttgttagaagcaagtcamtaagttcagctgattcttaaggggagggttcatttttttagagggagtgtcatagcatttgtagacacaatttaaaaccaccacaccttatttaataagagagtttcttagaggatagtccccaggacacctgtgtctgaatcacctgggacatgtgaaaaaaaaat

SEQ ID NO: 885440 - DNA, 596 bp, Homo sapiens
attttgaaaaattgggaaatatatgcccccaagtctctgtttcatctaaggacgttgatgtagcatagtggttaagagtgaaggcctgggcaatttcttgttgcaaagaagtatgctttctcttgaaatcagcacatttaggcctatggggaagcttcctttttctacccattaagaaagggaaacataatttgttgaaagataaagaacctaggacattagaattttatsattaagatggatgaggagggaatgatcacttactgagatgaaatattcatgtactcattcaaaaaatattgattgatcatgagagatgaaatatacaaacggacaatggccagacaatatatgacaacagaattctgagcaccacctctgcagcaaccagctggaagccaaaccacaacctctacagcaactggccccaacagtcacgatacagtcaatgactgccagcttccctattcttggctccctcctttcaactcagaatcaaccggaggaagcaagatctgcttcccaaaccaaccacatcagatgttcacatctagttagctcaactccagcttcctcatgccacagcgtacctggaa

SEQ ID NO: 885441 - DNA, 639 bp, Homo sapiens
tgcaaagctcctgaacccctccccagctccctgttctcttaacctgatgcatctgctgtacgtttacaagccttttttatttcagttcaaacattgcttcctctgaaaacctttctttctttttaataccaatttgcaaaggaaggagttttataatacctacctcaaatggtaacagtaggttttctggatttctctccttcatgagtatccttatggattttgatagattcagtgtacatcagtcaagtacaatctttttgtccaaattctctgatctgtgagcaatgggggcctgtcaagctgactcctgtgttctttcaagagtaccctgttaatcatcgaaagcttccttgcttcttgttgcaggaaagtatcccaaattcatctgtgccttccccgcccaagctctgcactcaatccatttgtccaaggaatgctggttccttttggtgaggaaaaacctcttgcaattgtgatagyatttggttggtgcaaaagtaatggcggtttttgccattactttcaatggcaaaacctttataattttctgggtcatcacaactcagaaattaaaatcccaagagggcacattgctactggtactgcagcattgtcaatgttaacattaagattaat

SEQ ID NO: 885442 - DNA, 594 bp, Homo sapiens
aaccacaatgtctggccttagaatgtggacccagcaatctcacggtgctcatctgtttcttgacttcctttttctgtgagaagatagcaaggactttgctgaccatgagagagataagcggaggtcattgtttggaatccttttgctatgattttctaacatattgggcttataaaaccctaagtgtgtttttgccccaagtacttttcttattttttaaacccatatgtattttgaagtcaatttaatccatatgtttctgattaatttatgcttagctcatcaaaatgttgttttaagaagaaggcttatwaaaaaaacagagtcatgcttcaccagccactgatgaaatcaactccagaagactgtgccttagtcacaaaatcagatgggctaagggtacaaggggacaatgggttccaaagttgggaaactcactgttgtgatcttaggaagactatgttcaaatacttgggcaggtggggagggggagcttagattttggagtctggagtgtatttagttttcatttctggatgtatttatttgttccttgtattaactatgatccctatacttagttgttcagaaagc

SEQ ID NO: 885443 - DNA, 661 bp, Homo sapiens
ttgggccaggcttccagaaacttcatccacatccatgttctctcttggaaacccattgctgttttgagaactagctcaagctagactcctggaatatgagagaccaacatggaggagagctaagtcccagctgaggggacttagtcagtcagttttgggtactttgatcacaagcaacagaaagagaaactccaactgtcttaaatcccagctgaaggacttagctctagatttgcattacttggcattctagatttgcaacccaaatcaatccaacagctaacatgggcacatgagggagcctacctgaaatccwaagaaccaaccagttgggtgtagcccaaattgctgaccaacagaaccatgagctaaatagatattgttttaagtcactaaattctgcatagctcataaggtagaaagcctaactgacacagatgacataaaattaatctacgtgttcttaacctgaactggtgagagttaacataagacttagtggtttactaaaaactggatgtaggaagaagagagtgtaagtgtacagtgcctgaaatcagacagcattaactcctttgacaacttaacacatcaaaatcaaaggctttttaaaaatacatgtaatcaactaaaatttttcatgaaaattatttttgtcagc

SEQ ID NO: 885444 - DNA, 584 bp, Homo sapiens
gcatgtaaatgatttaaaaattaagaataatctctcagatatcaattctgtatcaggctgaatttttaacagcttgcatagttttatctatatctttctagagatcaaatatcagcgagtgggaaataagggtcagatgacacaagccaaattgaaatgtgcaaatcaagcaacacttcacacactactcactttttattcctgatgagaatgcagtctgggagtcttataaaatttttgccaaggcagtcctctggaaaagcaaggtgtagctgcctttacatttcagtttgcaaataacccactggtgcttttttcttctatggtcactgctggtcttctaaacatgtggtagctgtgacacagtagtggctaagtgaycacacatcattacatcgtgcatacgtgattatttatgccttctcaaccacagtgtaagttacaagcaattatttttctgtctcctcagtgtaattacactgtaatctacagggacgtgtaattgcatagatgggttctgtactgaattacgcagctctcaggggctatgtgagatcctgggaggcttttaccagctagcagct

SEQ ID NO: 885445 - DNA, 735 bp, Homo sapiens
ctagaagaaaacctaggaaaaactcttctgctcatttaccttttaaaaggattgctctggctgccatgttgagaatacactagagggaggcaaggggaaaagaagttaggccagttccaaagctactgcaataattctggtagagccgatggtggattcgacgtgtgggaagtatcagtcaggcccccaacaacaaacaggtggtatgcttgaattttgacaattcaaaataggaattttgtctgttttacgaagaagttaactacagagtgtgggtggggaatagaggaatcataagggatagtgtggggataacacaagctgcttatctcttactatgcttgggccaaaagggataagggaggaaaatagttccagaacctgacagcaggagaaagtgtgtagagaagatccccttgagaggcgcagggacacagccatcctgggctgatctcacagagtgagccagtatggtagacaccatgacatcaccttcytccttccacctcatcttctgtcaaggtcaaggctttccactggctaaacccaactaggagtcagagggaagggaaccactgatattcttacaaggtctgtgtgctggaacggaaagcaggatgcagcatagtgaaaagcacatctggtctactcctctttttctcaggtttttctcttccctttcatctgggtgaaaaggttgtgccttctacccagggactacatgaaaccccatca

SEQ ID NO: 885446 - DNA, 651 bp, Homo sapiens
caagcatggtaaatcttggaatatattccatgtgcagataaaaaaatgtatgttctatggttgatgggtggagtgttctgtagatgtatgttagagccaattggtcaaatgttgagtttaagtccagaatttctttgttagttttctgcctcgatgatctacgtaacactkacagtggggtgttgaagtcccccactattaatgtgtggccgtcaaagcctttcataagtctagaagtacttattttatgaatctgggtactccaatgttggttgtgtatatacttaaaataatgaagtcttcttattgaattcaactgtttatcattatgtaattcccttctttatcctgttttttactgttgctggtttaatatctgttttatgtagtataaaaatagcgacccctgctcttttttgttttccatttgtatgctagatctttctccaaccctttactttgagcctatggatattgttacatgtgagctgggtctcttgaagacagcagaaggatgggtatttttttttttaaaatcccatttgccattctgtgccttttaactgcagtgtttggacaatttacattcaatgtcaatattgatgtgaagttttgatcctatcgtgagattgttagctggttgctttgtag

SEQ ID NO: 885447 - DNA, 651 bp, Homo sapiens
caagcatggtaaatcttggaatatattccatgtgcagataaaaaaatgtatgttctatggttgatgggtggagtgttctgtagatgtatgttagagccaattggtcaaatgttgagtttaagtccagaatttctttgttagttttctgcctcgatgatctacgtaacactgacagtggggtgttgaagtcccccactattaatgtgtggccrtcaaagcctttcataagtctagaagtacttattttatgaatctgggtactccaatgttggttgtgtatatacttaaaataatgaagtcttcttattgaattcaactgtttatcattatgtaattcccttctttatcctgttttttactgttgctggtttaatatctgttttatgtagtataaaaatagcgacccctgctcttttttgttttccatttgtatgctagatctttctccaaccctttactttgagcctatggatattgttacatgtgagctgggtctcttgaagacagcagaaggatgggtatttttttttttaaaatcccatttgccattctgtgccttttaactgcagtgtttggacaatttacattcaatgtcaatattgatgtgaagttttgatcctatcgtgagattgttagctggttgctttgtag

SEQ ID NO: 885448 - DNA, 652 bp, Homo sapiens
ttttttttttttttttttgagacggcgtctcgctctgtcacccaggctggagtgcagtggtgcgatctcagctcactgcaagctctgcctcccgggttcatgccattctcctgcctcagcctcctttagaagttttattctgctcacttaaatatttgattgtatgggatccttgcagggaatcgccaccaagattttgattagaattttgtcagatgctctgataagaaaagaaactgacctgaaaaagataagttacacctacagtttattctaaagtcctctaraagtgggaatgtgtgctgtgtgcagcctgtcaaaacttttattttggcaacttctagaagtaacaaaacaggactgaaaatattgctatgatttattggaaacattggtgtgagctgttatgcatgcaatctcatgaaagaagcctaaactattttaaaaattagtctttcattataatatcgtttatttccaaatgtctttttttgacatttagaagtaattgggaaattttaaaattctagctgaagttccttgcaacagcacggtccttgtaaaagatatttttcaaactgcatgttaaggatgtatatatggaatatcagcataaaacagaatggcagttcctcaaaaaatgaaacatagt

SEQ ID NO: 885449 - DNA, 585 bp, Homo sapiens
ggtgtcactacattcagatttttcatggtgccaaaattcttgtgctggttccttctcatctggatatgctggcactgctaatttttgtaattattttcatgtgggtaggatttttttcctttgtacttctttacctgtaatattgtttttttttttttttccctttccctcctgtacctcccacaggggatgcagctatagagaatgggtagggtcttttggctttgcttctatagccctatgcacttcttttggcaggttttattttgggctgtgcaatttgactacaggtgcaatttaatccagatgcatacaaagtcagccattccttggtgatctggcagtgtggctgtgcaaggattttagtcttgggccagagattggagcacttgctctagaacagggtagaggcytgaacagccggaactgtggaacatgttccagtaggcaatggaattgtgttctcccccatcacaagcttggggtgggaggagaactgctacagctgtagtttctcctgggtggtgagacttgcagccaggacccccttggtgacctggaactagtctgcgtgtgccatttctg

SEQ ID NO: 885450 - DNA, 711 bp, Homo sapiens
tgacctaaatttgtggtttctagagtacacaaggaaaagtaaaatagcaaggttagctagaaaaaaatctataagagtaatgagaaaggactaacatcaacagttattcaaacataatataaagtcataattatttaatcactgtgatatgagatcatgaatagagaatagaaaacccagaagtagccttaaatacataaaaatacttagtatattataaaattatcattttaattattgataaagggatggaatatgaaaggtgtggaaatttgtgttattaatattgttactttcagcactgctttggatttgtttacacctagtgttgtggagaactcactatacgccaggtagcatgctagacatttccataggtgttgacttgtttaatcttcataaaaatttgtgaggcaagagttcatatttccagtttaaagctgaagaaacaaaggcccagagggattaggtatctttcttacrgttgcacagcagtgaatggctcagctggaattcagacccagcctttaactccctacttagagcgatttctatacatggagcttctagcctcactaagtagtttgctggccatttcttttaccatatgtgtactttctgctcatcattatttcatttgagtctttcttttctggtgcagtcaacatgaatttctagttagcaacttagatcatagaattgattttaaga

SEQ ID NO: 885451 - DNA, 652 bp, Homo sapiens
ccaaggccacacagcaggtcagtggccattctggtccagtgcctgcccctcttagccacttctcaggcacagactcatcagaatggaagaggccttggagggaggcctagagaaacttacagttgacactctcttgctgaacaattgtccttcctttttcttttcttttttttttcttttttttgagatgggttttcactctgtcacccaggctggagtgcartggcgccatctcggctcactgcaacctctgcctcctgggttcaagtgattctcctgcctcagcctcccaagtagctgggattacaggcacctgccaccacacccagctaatttttgtagtttttagtagagacggggtttcaccatgttggccaggctggtcttgaactcctgacctcaagtgatccacctgcctcagcctcccaaagtgctgggactacagacgtgagccaccccacccagcctgtcctcttttttcctacatgtggagcttgctccaaaagaaatggaaggtaaatgctggtatctcctccagctccttctcccagtgcaatgagggacacttgaaggcatggcaggggcaggggaaacacacagagagtgtggcagctgaaggtacagccctggcctggccattctttctgtgggg

SEQ ID NO: 885452 - DNA, 645 bp, Homo sapiens
ccactgactgtcaccgtgttttgggagacaaagcctaggactttggtgtgtccaccgtgggtcaataaatgcccccaaacaagcatatcttgcaaaagtggggacttattaattcattgattcgtttcttgattgatcaattgatttatatgtccctgttggacaaagggtttgaggmagcctgggaaggaagtgaagtgtggaaactggtcatcttctgtgcttcttacattccactcattgggaacatcaaaaaatgaaaaaaaaatccagctgctacatagctggggaacaaattcttggtatggaagtaattctgctaaggctagcctcctcagagtaattccaaatgcttttcctattttcaaatttaattaggagacatttctgtagtgtgagtcatcatttaataatggggggtgtttattagggaatgagtggaaagagaacaggacagctggataattcaaatcccagttcttcaagtctctggctgtgtgatcttgggtgagccacttcacctctctgaacatcagttttcttgtctttaaattgatatttacctggcaaggtttggggaaggtctcaactagattatgtacataacaagcttgccagtgttagtacataataggtgtttaataa

SEQ ID NO: 885453 - DNA, 645 bp, Homo sapiens
ccactgactgtcaccgtgttttgggagacaaagcctaggactttggtgtgtccaccgtgggtcaataaatgcccccaaacaagcatatcttgcaaaagtggggacttattaattcattgattcgtttcttgattgatcaattgatttatatgtccctgttggacaaagggtttgaggcagcctgggaaggaagtgaagtgtggaaactggtcatcttctgtgcttcttacattccactcattgggaacatcaaaaaatgaaaaaaaaatccagctgctacatagctggggaacaaattcttggtatggaagtaattctgctaaggctagcctcctcagagtaattccaaatgcttttcctattttcaaatttaattaggagacatttctgyagtgtgagtcatcatttaataatggggggtgtttattagggaatgagtggaaagagaacaggacagctggataattcaaatcccagttcttcaagtctctggctgtgtgatcttgggtgagccacttcacctctctgaacatcagttttcttgtctttaaattgatatttacctggcaaggtttggggaaggtctcaactagattatgtacataacaagcttgccagtgttagtacataataggtgtttaataa

SEQ ID NO: 885454 - DNA, 612 bp, Homo sapiens
gggtttgggagcttcgtgctgcttcattttcaccccaaagttcttcctaccacccaaaatattatgcatttgttctcaggtgtcgcttctgtctctccactgaaatgtcatgtccttgagtgcagaggctttgtctgttttgttctstaatgtgtctccagcacctaggaaagtgcctggccatagcagatgctctagtagatattttcagagtgaataaatgaacagattggattgaatatagggtgagggagagagaagagtcaacagcgatgtctgcatctcgcgcatgccacccagggatcagggagctggttattgaaacccagaggaaacccagagggagcgttaggtgggggatggtggcagtgggagtggaaagaaggcacccagagggcagtggaggtgaggatcagctgctcagggaggctggagacacggagtcaggggccatcagcagctggaatgaccatgaatgtgagcccggagggaatgcgtgggcagagaggcacagtgtagatgagaatgccaaggagcagcctagtgcaggaacgggagggctcacaggcaggagtgtgacaaggagctgttaggaaataatcagagcagtaa

SEQ ID NO: 885455 - DNA, 612 bp, Homo sapiens
gggtttgggagcttcgtgctgcttcattttcaccccaaagttcttcctaccacccaaaatattatgcatttgttctcaggtgtcgcttctgtctctccactgaaatgtcatgtccttgagtgcagaggctttgtctgttttgttctgtaatgtgtctccagcacctaggaaagtgcctggccatagcagatgctctagtagatattttcagagtgaataaatgaacagattggattgaatatagggtgagggagagagaagagtcaacagcgatgtctgcatctcgcgcatgccacccagggatcagggagctggttattgaaacccagaggaaacccagagggagcgttaggtgggggatggtggcagtgggagtggaaagaaggcacccagagggcagtggaggtgaggatcwgctgctcagggaggctggagacacggagtcaggggccatcagcagctggaatgaccatgaatgtgagcccggagggaatgcgtgggcagagaggcacagtgtagatgagaatgccaaggagcagcctagtgcaggaacgggagggctcacaggcaggagtgtgacaaggagctgttaggaaataatcagagcagtaa

SEQ ID NO: 885456 - DNA, 598 bp, Homo sapiens
tgcaggtaaagtaagaaaacttctgctgtagagaaaggaaggtattcaccagtctagttttccccaagcttcagtgcacgtaaaaactacttagtgggtatgctattgtgatgtatagtaagacatgtaaatactggttttcctccctggttcctggcactaagctatggaaacacttttactttcctgtgtgatatgtgtgctaggtgcttattttgtcctgacgtttggtatttgaacccggttcctgagacagagctcctagtctcttggaatttcctgggtgattagagcatgttttgttctaaggagacgactcctggtgagctcctggatggagcctggtagccagaagcaacaaggcataattagaagcctggaagttccagccccatttccaaccctccagcctttgggaagaaaggaggagctagagattgagtcaataattgatcatscctgtgtgacaaggcctgcataaatacccctgaactacagagtttagagaacttccaggttggtgaacacattccagggcaaggagagtggtgcagccgaatgtgatggggacaaaagcttctgcactcaggacccttcc

SEQ ID NO: 885457 - DNA, 635 bp, Homo sapiens
ttcattgcttcattattgccttctttagagctaagcagacatttcccagcatagtatttaaattgtcttactatttcttcaaaaatatttttcagttttttattagtagtttccctgtggattatagttagcatcttaacttaaaacaatctagtttggattaataccaagttaatttccattgtacaaagaaactttgcttcgataaagctttgttctctttctattccttgtgccactattgtcatacaaattacatcttyacacattataaaaccatcaacatggttttataattattacttttattagttgtattttaaatcaggtgggagaagaaaggagttacaaaaaaagcacttatactgtctttcatatttacctatatagctacctttatcagcctctttattttttcaggtgaattcaagttactgactagtgtcctttcctttcagcctgaaggactatcattgaatccttttttataagtcttatgttgttttcagctaacacaataattgcatgtatttacagggcacagggtgatgttttgatgcatgtatacatctgtaatgattaaattagggtaattaacatatccatcacttcaaacatttatcactttttgtggc

SEQ ID NO: 885458 - DNA, 635 bp, Homo sapiens
ttcattgcttcattattgccttctttagagctaagcagacatttcccagcatagtatttaaattgtcttactatttcttcaaaaatatttttcagttttttattagtagtttccctgtggattatagttagcatcttaacttaaaacaatctagtttggattaataccaagttaatttccattgtacaaagaaactttgcttcgataaagctttgttctctttctattccttgtgccactattgtcatacaaattacatctttacacattataaaaccatcaacatggttttataattattacttttattagttgtattttaaatcaggtgggagaagaaaggagttacaaaaaaagcacttatactgtctttcatatttacctatatagctacctttatcagcctctttattttttcaggtgaattcaagttactgactagtgtcctttcctttcrgcctgaaggactatcattgaatccttttttataagtcttatgttgttttcagctaacacaataattgcatgtatttacagggcacagggtgatgttttgatgcatgtatacatctgtaatgattaaattagggtaattaacatatccatcacttcaaacatttatcactttttgtggc

SEQ ID NO: 885459 - DNA, 730 bp, Homo sapiens
atccatcacttcaaacatttatcactttttgtggcaacaatgttcaatcctttcctcttgctatttttgaatatacattatttttcactgcagtgaccctactgggcaatagaacaccagaactcgtttcacctgcccaactgtaactttatacctgttgatcaacctctccccatcgcccctcctccctgccctccccaggccctggaaactacgattctactctttacttctatgatgtcagctttttagatttccaatatgagtgagatcacacaatacttgtccttctgtgattggctcatgtcacttaacataatgttttctaggttcatccatgttgctgcaaaggacaagagttcattattttttatggctgaatagtactccatcgtgtgtatacacaacatgttctttacccattcttctgttgatgaacacctacatcgatttcatatcttggttactgcgaattgtsctgcaataaacatgggagtgtagtgatttctttgacatactcatttcatttcctttggatatatacccagtagtggggctgttgaatcacatggtagttctgtttttaattttctgagggatctctgtgctgtactaaggtactaatttacattcctaccaacagtgttgaacagttcctttcttgacatcctcaccaggatttgttattttgcctttctgataatatccattctaactgggatgagatgat

SEQ ID NO: 885460 - DNA, 730 bp, Homo sapiens
atccatcacttcaaacatttatcactttttgtggcaacaatgttcaatcctttcctcttgctatttttgaatatacattatttttcactgcagtgaccctactgggcaatagaacaccagaactcgtttcacctgcccaactgtaactttatacctgttgatcaacctctccccatcgcccctcctccctgccctccccaggccctggaaactacgattctactctttacttctatgatgtcagctttttagatttccaatatgagtgagatcacacaatacttgtccttctgtgattggctcatgtcacttaacataatgttttctaggttcatccatgttgctgcaaaggacaagagttcattattttttatggctgaatagtactccatcgtgtgtatacacaacatgttctttacccattcttctgttgatgaacacctacatcgatttcatatcttggttactgcgaattgtgctgcaataaacatgggagtgtagtgatttctttgacatactcatttcatttcctttggatatatacccagtagtgggrctgttgaatcacatggtagttctgtttttaattttctgagggatctctgtgctgtactaaggtactaatttacattcctaccaacagtgttgaacagttcctttcttgacatcctcaccaggatttgttattttgcctttctgataatatccattctaactgggatgagatgat

SEQ ID NO: 885461 - DNA, 591 bp, Homo sapiens
gaactcaggccagcttgaccagccatttcccatggaggggctgcactgaattcagtatagcaggttagaaagcaatgggggttttgtttttgttttttcaaggcagatacattctgtgggcattgcccatgaaatgaaatcaaaacaatatttctcttctgttcagtgcccaagaataaggcctgtgtcgtggtctccacaagatgagctggaggctctgggggctggtgccctccgcagtcctcacacacaccgttaactgggtgaggtccaggtgccaagctctgtgctagatccttcacaggcattaattatcgttctttcaacaatccagcagcatagatggtgatgagcttgaaagtggaggaatgaagtgttttttaactttgtgtctttattatcattttccttttrtatcaagaccattcagcatgtaaatggcagagctgggaggtgagcctacctcccttgctccaaaggctccccttctacaatgaagcagtgtctcgagcaggattacccacctgcacctagtccctcccactgtagatgcaggcacacccaaggagcatcctgcaagtgtgagccctg

SEQ ID NO: 885462 - DNA, 586 bp, Homo sapiens
tggcattgagcaatatctatctcaactatgtctaacagagaacaattatataatagactttatttttagaacagttttagatttacagaaaaaattagaagctagtacagagggtccgtgtacaccccacatccaattttttgtccaattaacatcttacattaccatgatacatttgtcacaattaatgaaccaatattaatacatcattaactacaatttyggaggatacccctctattggaattcgtttgatgtcttctcatggttagactggagttatgggtttgggggaagaaagccacagaggtaaagtgcttttcctattcttgattacaggaacatctttggctttgtaagaaactggtaaagtagctttaccaatgtgcattcacaacagcagtgaataagagttcctatcacatcatatcaaaggtacatagtatatgcatgacattactgcctgcctgcatcagccttgatcacctggctgaggtagcgatggtcaggtttgtctgttgtaaagttactctatctccccctttccattctataatccaccctatggatggatggcttccatcctg

SEQ ID NO: 885463 - DNA, 586 bp, Homo sapiens
tggcattgagcaatatctatctcaactatgtctaacagagaacaattatataatagactttatttttagaacagttttagatttacagaaaaaattagaagctagtacagagggtccgtgtacaccccacatccaattttttgtccaattaacatcttacattaccatgatacatttgtcacaattaatgaaccaatattaatacatcattaactacaattttggaggatacccctctattggaattcgtttgatgtcttctcatggttagactggagttatgggtttgggggaagaaagccacagaggtaaagtgcttttcctattcttgattacaggaacatctttggctttgtaagaaactggyaaagtagctttaccaatgtgcattcacaacagcagtgaataagagttcctatcacatcatatcaaaggtacatagtatatgcatgacattactgcctgcctgcatcagccttgatcacctggctgaggtagcgatggtcaggtttgtctgttgtaaagttactctatctccccctttccattctataatccaccctatggatggatggcttccatcctg

SEQ ID NO: 885464 - DNA, 616 bp, Homo sapiens
ctcccaatgtgcccatcacagccattcttgggacactgcacctatcagttcacttgtaagccaccagcctgggaggcatctgggtctccagtctttccatgcccagaccctaggccagtaggtgcttgctgagtgaggttggaaggtttgagggaccaagtrctgcccctgggctgggctctggccgtgccccagtccacctctcccctcgggctgtaggcatggagaaggacctcttgctgaagccctcctgctcctcaccccatcctggacctccctgggcagctactctgagtgtgtgtggtgggatggtagggggaacggaggatctgggacaagcatcatttcactcccagttacattgtattatccaaattatccgtggtcattgacaacaacattgaaggtacagatcacaaatcaaaatcacccgaactccttgcacagcagccatgctcacgttcttggcttttgctacacaaatgggcacaacattccagcccccattcgctgagggctgtggctgtgtctccaccacagccctgaaagagggattcgggcaccaggaagagctaagcactcacccagctcacaaagttgggggccaggttggaaa

SEQ ID NO: 885465 - DNA, 538 bp, Homo sapiens
acctttctctctgaacacaatcagggaaagagcaaattaaacaaaaagcctgctttgccagttttgttttctgttaataagctaaaactgcttcagagtgaaagggaagaaaagggatgggagggagagggggagggagaggggaggrggagggagagaaagagacagaggcataacaagtctcacattccagaaatatctcttcctcaatgccccaactctggcaacttttgtcatgttcagagtgggtgcaggcggggaaaagaggaaatgcctaaagaagttgctcacattaaggatggtttgttggctaggagtcagaaagactaagctggaagggactgcgttccagccttgctttgggctctgtcacatattactgcccatcctggtggtagggggtgttgctgtgagctccctgggagctacgtctacagatagttcctgatgaggcagacaatggtggcctaagcaaagttcaaccagaaggtgagagtgagtaggggtgggctatagcacaggcttcatactcaccagc

SEQ ID NO: 885466 - DNA, 622 bp, Homo sapiens
aaaagttaccccagtgaaggtgtgttaatgaagtccactccactccctgcctggttactaaaacctttactcaatgctcagaacaaagtctgattaattcttcactgactttcagaatacaaacagtatccgtattttctcttccattaaaacaagcagtgattagcagaccctggcaatacatactcagtcattcaaatctctttagaaggtactgaaagatactttgtaggcaagagtcatgaaaccaagatttcagggtcaagtacaaaacaggcacaactcttaagtatattccttttctaataaaaagtattttcagatctcttatattaaaatagaaaatagttttggttgttctgacagcagtttatcatactggctccstcctgagctttctagtgctagggtctggccatgtctgtgctttccgcaaggagtcacagtaacttaatattcttctacaatgtttgaaggggaccgttagctatatatggcctgggcccagatctgtgtcttcctttcctaggcttattttcaaatagaaaataaaaataagtcccacttatgtcaaagagtttcaaagagctttgtatttaaaaaaaaaaacacaactaatttt

SEQ ID NO: 885467 - DNA, 640 bp, Homo sapiens
acgtattttaaaagaagataaaaagcacgtttaagagattaatgaaaaagggagaggagataacaggattttgttttaataagaaaatcaagaagcagaaggatgagtagtaaatgacacagtagaaaccccagactattttaagaaaaccttaaaattgagccaaataacactaggattctggggatccttgaaacataaatcattaagtacttatggaagtagagtatacagctaaaagtccataggtattagctaaaattctgtttaagaaacaaatagagacctacaccctaggtgctcagagatagccccttccccatccttgacagactaaaattttactttctaacaatacagaataacaaaaaccctggatgcaagaaaaccrggcccagataagagctgtgattcatttcttaaaaaaagaaggttacgtgaaagtctatagtctgaatattattccagtccgcttatttggcgaagttctagaaagaatgctatcagggttatgcctgcaagaagaagatgggagaattactaggggagaaaagctctataaattctaccatttggggacctcccccagtgaagattcccaaccctgtaattctactgggaagtctagcatttaacaagt

SEQ ID NO: 885468 - DNA, 640 bp, Homo sapiens
acgtattttaaaagaagataaaaagcacgtttaagagattaatgaaaaagggagaggagataacaggattttgttttaataagaaaatcaagaagcagaaggatgagtagtaaatgacacagtagaaaccccagactattttaagaaaaccttaaaattgagccaaataacactaggattctggggatccttgaaacataaatcattaagtacttatggaagtagagtatacagctaaaagtccataggtattagctaaaattctgtttaagaaacaaatagagacctacaccctaggtgctcagagatagccccttccccatccttgacagactaaaattttactttctaacaatacagaataacaaaaaccctggatgcaagaaaaccgggcccagataagagctgtgattcatttcttaaaaaaagaaggttacgtgaaagtctrtagtctgaatattattccagtccgcttatttggcgaagttctagaaagaatgctatcagggttatgcctgcaagaagaagatgggagaattactaggggagaaaagctctataaattctaccatttggggacctcccccagtgaagattcccaaccctgtaattctactgggaagtctagcatttaacaagt

SEQ ID NO: 885469 - DNA, 631 bp, Homo sapiens
tatgtagacattccatttttgtcaatggaaaaaaaaccccaagtgtttcttgctaggggatcactaaaatttgtaacagtaacggtgtcataattttgatatataaataagttttattgaatccactggacaaatgactatagacaactaaatcaacagttttctatacatatgtgtaaaattatgttatatatgtatatgtgaatccaggtgtatttcaatgccaaatgtcagtgcagatttcctcggtggccaaatgactctggggaataaaatcaaggaaagaaattaaaaaggactttcttttttttttttctgtgtttttgtttccatttttacaataaacatgycttacttgtgtattttaaaaaattcaagttcatttatagataacacagaattcacctgcatgctatgctcccaccatgtcaatgaacgtccgccaaatgtggctcttagaattgagtcactgaatgggaggctgaggcgggcggatcacaaggtcaggagatcaagaccatcctggctaacatggtgaaaccccgtctctactaaaaaatagaaaaaattagccggacatggcggcaggtgcctgtagtcccagctgctcaggaggctgaggcaggagaat

SEQ ID NO: 885470 - DNA, 589 bp, Homo sapiens
ccttcaggcgcaggttgactcttcagttgcggttgtcctccaaaaccatgaggccttgacttactcactgctgaaaaagggagactctatatttttaaatgaagagtattgtttttacctaaatcaatctggcctggtatacgacaacctaaaaaaactcayggatagagcccaaaaactcaccaaccaagcaaataattacactgaacccccttgggcactcactctctaattggatgtcctgggtcctccaaattcttagccctttaatacctgtttttctccttctcttattcagacctagtgtcttccatttagtttctcagttcatacaaaactgcatccaggccatcaccaatcattctatacaacaaatgctccttccaacaaccccacgatatcaccccttaccacaaaatgtttcttcaatttaatctctcccactctaggttcccatgccacccctaatcctgcctgaagcagccctgagaaacattgcccattatctctccataccaccccccccaaaatttttgctgcccccaacacatcaccactattttgttttgtttttcttattaatataaga

SEQ ID NO: 885471 - DNA, 624 bp, Homo sapiens
aaatgagaaaattgaacgttgggaggctatgagggcagaagttaaatatctttgtggttttgcctagatttacacaatattgaaagatcagagagtcaaaattatttctttcagaataawctcctgggacatttcatctttggatactacagagcctgatattaattgcatgttgggagaactgtgtccctgggatctttttggattcagtgtcctgcgtccttgccagtgtctcctgatttgctgatcttcagtgatctccaatctcaaataacagccccgacaaccaatacatgagccttagacactgagttgtcacttgaaggtaataatggtttgaactctatggcttaagcttcctttctgtattaaaatatgattattagtgtgaaaaaaatgtggaaaactttttttcttgtaacatatttatttctttttatgctttgattttatttctataccatgcccatgattcttaacttttaatggcgaactggtttaaagtgatgttcatctgggtgaggggagattatatagtgcacatgttaaattttgcatcatggtaaaataaaattcttctacaagcctaaaacaaacatattcctacaaataaggagctggttc

SEQ ID NO: 885472 - DNA, 624 bp, Homo sapiens
aaatgagaaaattgaacgttgggaggctatgagggcagaagttaaatatctttgtggttttgcctagatttacacaatattgaaagatcagagagtcaaaattatttctttcagaataatctcctgggacatttcatctttggatactacagagcctgatattaattgcatgttgggagaactgtgtccctgggatctttttggattcagtgtcctgcgtccttgccagtgtctcctgatttgctgatcttcagtgatctccaatctcaaataacagccccgacaaccaatacatgagccttagacactgagttgtcacttgaaggtaataatggtttgaactctatggcttaagcttcctttctgtattaaaatatgattattagtgtgaaaaaaatgtggaaaactttttttcttgtaacatatttatttctttttatgctttgattttatttctataccatgcccatgattcttaacttttaatggcgaactggtttaaagtgatgttcatctgggtgaggggagattatatagtgcmcatgttaaattttgcatcatggtaaaataaaattcttctacaagcctaaaacaaacatattcctacaaataaggagctggttc

SEQ ID NO: 885473 - DNA, 595 bp, Homo sapiens
acatttttagatatctaatttataagaaaagaggtttaattggctcgtggttctgcaggctgtacaggaagcttggcactggcgtctgcttctggtgaggcctcagaagcttacaattatgatggtaggcaaagagagaacaggcacatcacatgatgagagtgggagcaagagagagaataggggttaagggaagatgccacatgcttttaaaccaccagatctcaaagaaacttattcactatcttgagtacagcaccaagccatgaggaatccactcccatgacccaaacatttccaccacrctcctcttccagcattgaggattacatttcaacatgagatttgggagataaatatccaaatcatatcatcgtctaagtgcttggtgttgtcattttttaaaaaacatcataataagtatgtactggtgtctcatgaagttttaatttgcagctctataatgactaagagtattgcatatcttttgtcttcaatttggtagtgttcagatctcatggacatttttaagtaattagattgatttcttatatttgatttttgagaattctttacacattctacatgcaagtct

SEQ ID NO: 885474 - DNA, 604 bp, Homo sapiens
ttgtttttgcatgttgatttaacttccttgtagattttggatagtagtctatcgttggatgcatagtttatgaatattttttcccattctgtaaattatctgtttactctgtagatagattctttagtttagttaggtcccatttatctatttttgtgtttgttgcaattgcatttggagacttgatcatgaaatatttgccaaagcatatgtagagaaagttattccctaggttttcttctagagattttatagttttaggttttacatttaagtctttgtctattttgagttaattttttttatataataaaagggttcagcttcaatcttttacatatggctagccagttatccaagcatcatttattgaatagggagtccttttcccatgatatmttattgtcaactttgttgaagatcaaatgattgtaggtgtgtggctttatttttgggttcgctaaccttttccattgatctatgtgtctgtttttgtaccagtacaatgctgttttggttactgttgccttgaagtatagtttgaagtcagatagggtgatacctccagctttgttcttttagattaggatttctttggttttgg

SEQ ID NO: 885475 - DNA, 604 bp, Homo sapiens
ttgtttttgcatgttgatttaacttccttgtagattttggatagtagtctatcgttggatgcatagtttatgaatattttttcccattctgtaaattatctgtttactctgtagatagattctttagtttagttaggtcccatttatctatttttgtgtttgttgcaattgcatttggagacttgatcatgaaatatttgccaaagcatatgtagagaaagttattccctaggttttcttctagagattttatagttttaggttttacatttaagtctttgtctattttgagttaattttttttatataataaaagggttcagcttcaatcttttacatatggctagccagttatccaagcatcatttattgaatagggagtccttttcccatgatatcttattgtcaactttgttgaagatcaaatgattgtaggtgtgtggctttatttttgggttcrctaaccttttccattgatctatgtgtctgtttttgtaccagtacaatgctgttttggttactgttgccttgaagtatagtttgaagtcagatagggtgatacctccagctttgttcttttagattaggatttctttggttttgg

SEQ ID NO: 885476 - DNA, 601 bp, Homo sapiens
agctaatccaccatgatgaagtaggctttatttctgggatacaaggtttgttcaacagatgcaaatcaataaatgtgattcatcacataaatataactaaaaacaaaaaccacatggtcatctgaatagatgcataaaaggattttgataaaatataacattgttttttgttaaacactctcaacagactaggtaacataagtttgaaggaatatacctcaaaataatagccatctatgacaaacccagaaccaacatcataccgaatgggcaaaagtttgaacctatttctcttcagaaccagaacaaggcaaggatatcctctctcaccactcctattcatcatagtactagaagtmctagccagagcaatcaagcaagaaaaagaaataaaaggtatataaacagaaagaggaagtcaaactatatctcttcacagatcaacaggttgtaaaaatcaaaaatacctgtgccctaccccctcaaatttataccagacattttcactagattaaagaaagacattatttgatatcgctaatatagtgatcttccccttagccacatctcataaatcatctaaactcttagatacctagct

SEQ ID NO: 885477 - DNA, 606 bp, Homo sapiens
gagcaatgaatgtgcagagagatgcacacatggtgttactttcctcttattagctgccccaagtaatatcagaatattccttttattccaggagatctgtttaatacatgtagtaaatataactgaattataaacatattattctatttctcaaccctagagatggaattgtagctgccatgaatccttctagaatatggtgagctataaataattaataaacagtgcttaattwggttcaactttgctgcttaatttgattctaccactttgggtctttcctatgttactgtgagctccagagttgcctaaggacagcgcccctgacacatgaggagggaacagaacaatctctgctgttagctttaacaacttaactaagaagatattttcatgaataagtaatcatttcaggaacactggaaatgccagacacttaaaccagcatttgttcttatttctctctcaaacacacactcaaattccacattttctaaaaagagatccaaacctcttgaaacgaattctgaagtttgaaaaagaaaatatttcctatattttacctggagtttttaaggggagccaccacaagcagtaacacgaccg

SEQ ID NO: 885478 - DNA, 557 bp, Homo sapiens
ttaaaaaataaagaatactttatactttaaaaaaaattttattaatgctatgtgctttatataaagcatgtctatatatactgatcttcacaaccaccatgacttctgagtattattttccaaatgatgagaccacagctcagggaggtaaaataactctactagggatgtgcagatataaaaactaggctgagattcatgatctttccactttctttcctttctaagtcctgtttctgggaaaaaggaatcacatgtgcytagagttgcccaaagtccaaggtatcccaatcttatagtagtccatgtgaacaacacctgacataattgtgcaatgctttcataggcctgtctctcctcaaggatttagtataaatggtctactaatcaggtgagacactacgtcccctccaaaccagttgtaatagttataatactaacagtaattgcagcgaatatacattgtgcaattattatgagctagacacttttctgaaacatattttgtgaattaacaaatttaatctttacaacattctatcagttaagtaatagaa

SEQ ID NO: 885479 - DNA, 557 bp, Homo sapiens
ttaaaaaataaagaatactttatactttaaaaaaaattttattaatgctatgtgctttatataaagcatgtctatatatactgatcttcacaaccaccatgacttctgagtattattttccaaatgatgagaccacagctcagggaggtaaaataactctactagggatgtgcagatataaaaactaggctgagattcatgatctttccactttctttcctttctaagtcctgtttctgggaaaaaggaatcacatgtgcctagagttgcccaaagtccaaggtatcccaatcttatagtagtccatgtgaacaacacytgacataattgtgcaatgctttcataggcctgtctctcctcaaggatttagtataaatggtctactaatcaggtgagacactacgtcccctccaaaccagttgtaatagttataatactaacagtaattgcagcgaatatacattgtgcaattattatgagctagacacttttctgaaacatattttgtgaattaacaaatttaatctttacaacattctatcagttaagtaatagaa

SEQ ID NO: 885480 - DNA, 423 bp, Homo sapiens
ataggtagtattactattcctattaattccattttacataggaagaagcaggtgcagagaggttcagtgacgtgtccagagtcacagagatagatagtgtcagagacagtattaaattttatgtattcatatcttctcctattccaagtattctgcctgaattctaagtggacttaaagccaaaccatactgaaatagtttctttccctgaatctcttctcattcaacctatgtttaatggcaactacratgattatgttataataatgttatatcaacattaatattaatgttactcataatttctgtgtgcttgaaactgtggaaagtgcttaattatacacttaacttgttagtatgccagagatgaatcagtccttcagagattttcagttggcgagatctggaaccagtggtatattt

SEQ ID NO: 885481 - DNA, 616 bp, Homo sapiens
gtaaattagttcaaccattgtgtaagacagtgaggcaattcctcaaagatctggaagcagaaataccatttgaccagcaatcccattactgggtatatacccagaggaatataaatcattctattataaagatatatgctcacgtatgttcattgcagtgctattcacaatagcaaagacatagaatcgacccaaatgcccaccaatgatagactggatagagaaaagatggtacatatacactatggaattctatgcarccataaaaaggaacaagatcaactcctttgcagggtcatgaatggagctggaagccgttatcctcagcaaactaacacaggaacagaaaaccaaacacctcatgttctcactaataagtgggagctgaatgatgagaacacattgacacatggtggggaacaacacacactggggcctgtcttgggacagggggagggagagcatcaggaagaatagctaatggattctgagcttaatacttaggtgttacctatgtaacaaacttgcacatcctgcacatgtaccccagaacttaaaataaaagttgaagaaaaaaacagaactttattagtctactaagaggatactagctgaa

SEQ ID NO: 885482 - DNA, 642 bp, Homo sapiens
ctctgagatttttatcttctttgtaagctaacaagccagcctgtcacagtttcataaatgcctgcagaaaatacaagatgcttgggtcaggagcaaagaagcttattagacattaacagtagccacattatcagcatttatcaytcttcttcctcagtcctaatttccacagagatatgaagaggataagataccactggcacatacaatggactgcgttacaggagaggaaccctgagcttagggaacctgaatcttttctgatgaatggctagcatgccaacattttgctgtggagggtagcactgtctctatctcccaaggctacaagcaagcctctcttggttctggacaaaaacaccatttctgtcttccaaggctatttaccatacagacatccttgaaatgaaaatagttcaaaataaaagaggacaaacagggtctcactcacaagatgtgcagaaatgcaaaaagacacatgggagcgaaagttatttctctttgtctttcttttggtgtatgtgttcgtatgtgcatattttattatatattatcaattgtgcatgtttatatttatatgtaactatatatttatattttaatatattaggtatatttataatttatatttaatatattaat

SEQ ID NO: 885483 - DNA, 642 bp, Homo sapiens
ctctgagatttttatcttctttgtaagctaacaagccagcctgtcacagtttcataaatgcctgcagaaaatacaagatgcttgggtcaggagcaaagaagcttattagacattaacagtagccacattatcagcatttatcattcttcttcctcartcctaatttccacagagatatgaagaggataagataccactggcacatacaatggactgcgttacaggagaggaaccctgagcttagggaacctgaatcttttctgatgaatggctagcatgccaacattttgctgtggagggtagcactgtctctatctcccaaggctacaagcaagcctctcttggttctggacaaaaacaccatttctgtcttccaaggctatttaccatacagacatccttgaaatgaaaatagttcaaaataaaagaggacaaacagggtctcactcacaagatgtgcagaaatgcaaaaagacacatgggagcgaaagttatttctctttgtctttcttttggtgtatgtgttcgtatgtgcatattttattatatattatcaattgtgcatgtttatatttatatgtaactatatatttatattttaatatattaggtatatttataatttatatttaatatattaat

SEQ ID NO: 885484 - DNA, 647 bp, Homo sapiens
aaaattagctgggcgtggtggtgtgtgcctgtaatcttagctactggggaggcagaggtgggagaaccacttgaacccgggaggcagaggttgcagtgagctgagattgtgccattgcactccagcctgggtgacaagagygaaactctgtctcaaaaaaaaaaacaaaaaacaaaaacaaaaacaagaaaattcttcacattttggaaatatcactacatttttaagacattttaaaaatatgagaagggatacgctatgaacttcaagttcctttcccagtttttgggaaaaaaagcaagaacaaaaatagaacccatacttaaacggttaagaaaattgagagtccatgtttccaaactcagatcagctaagtagaatggattatcagtgcagcctgtgttccttgtaccatgattgtttggaggagcagctccaatgcaatttcctgaaactcctgtggtggcccctagggctcaaatgtagagagcagccacatcccaaatttcagaatgaggcccactggtaacatttgcaagggccaaagtaatcaaaatgagaggtcacagaccttatatttacctattttgaatatatgtttatattagtaaacttaatttcaattctcctcccattagtttctcttc

SEQ ID NO: 885485 - DNA, 609 bp, Homo sapiens
ttttaataagtaaataaatgacaacattgataaacttgaatacattaaacaaagaactactatttatcaaatgatgccacaaaagagaatgaaaagataaaccacaaagtggaactactatccatgaaatattaaaattcctacaaatcagtaagatgaaaacagataattcattagaaaaacaggaaaatatcttaacaggctcttcaaaagtatgatatacaatgrccagtaaacacaagaaaagttattacacctcattaattatcagatgtattaagattaaaatgatttcaaaatatcactactcatctgccagattagtaaacattaaaatatttaatataccaagtgttggtaggatgcagtgctatgagaactcacagagctagcatgtgggagtgttgggtttagccacttcgaaaagcagattgacttatctgaataagttaaatattttaatttctaatgcctattaattccacttccaggtataaagagaaaatattacaaatctgcataagaagtcatgtccaagagtgtttatagccacatcatgtgtcatagacacatggaaacaacccaacgtcaatctaaactaaaatggat

SEQ ID NO: 885486 - DNA, 627 bp, Homo sapiens
tgacccaagaatcatgattaatccaattctgcatctgcagaacaaaaacaaaacataaaaagcaacatacaaggctattttttgtgaaaagatactggactcaattctttaccatttgcaattgtgcattaggctaagcytgatttgcattaagtataattgtcttattcaataatttatattaagaaataggcaactcagatactttggccacagttcagggtcactagctggcctttgaagtggtcatagccattattaccctatgtaatctgaaataagtgagcaaataatttgtttaagcatacataggcaaaattaccttccatcagaacctcacgtgggagctaattggggataaataaatatatccttcagttaatacagaatagctttgaagcacttttataaagcaaacattaattctattataacttctattttaaattaggtattgctttctccttgggaagaaatattaaccaacatgcaatcagatatttggaaaccctacaaatcttctaacattttacatttaaagtgtatcaactttctgataacacactcataagtattccctaaacagtaacaatgaaagtgatctattcttgctgctcaaaaaagtgg

SEQ ID NO: 885487 - DNA, 589 bp, Homo sapiens
tcttaggaatctatggatttcctgaaatatgttgttgagtaagtatttgaattttctctttggggttatgtgttcttaccagcgagagggcatggagccacaattcagttaattgttactaaacacccaattgaaatactacttgtagtagatttttttgaggctggtgtacaaggcaattgaaaagttagaaggcctagcttcttatagtttttgggtgcctcagtgacccatactgattctcttgcagcaaactaaacttcaagcctctggagcaggagatgcctgtkcagttccaggtggtagagctgcccagtggccaccatctatgcaaagtgaaagctctgaacaagggtgatgccaactctgaagtcactgtgtactaccaggtcagttgggtgtactaaagactggcggaaggcccagtgcctggggatcagggaccccgtgaccttcaaggcccttttatagttacttctgtagtttcatgcttggggccatttgtcctcttgaagcaactacatttaaaaattgctcctgttggtaaaatggatcctttttcaatcacagtgaggtattgcttcattaa

SEQ ID NO: 885488 - DNA, 554 bp, Homo sapiens
ccaggctggtcttgaactcctgacctcaggtgatctgcccacctcagcctcccaaagtgctgggattacaggcatgaggcactgcatccagccatgtgacaattgtaagaatgagtgacaggcaggtctgtttgggactcacaccccatattttgaatgaggaggcccagcrggtcagaaatgggaaggcgctgggcttggatccccatctgtctgactctttaatgtaacaagttctcactggtgctgggagcagcttgtgaatgggcaagatgtggtatctggaacagggaccacttgctagtggaggagacagacaataaccaagtaagcaaataataaataattccaggtaagaagtggtaagaagaaaataaaactgagtgatgtaatagggagtgactgggagtgcatcgtggggggcaacttgagacagggtggccaggagggcctctttggggaggtgacatttgagctgagatatgaaggatgagaaggcactgcctggggaagacttggggaagagtgttccggggaacaggaacagccagtgc

SEQ ID NO: 885489 - DNA, 554 bp, Homo sapiens
ccaggctggtcttgaactcctgacctcaggtgatctgcccacctcagcctcccaaagtgctgggattacaggcatgaggcactgcatccagccatgtgacaattgtaagaatgagtgacaggcaggtctgtttgggactcacaccccatattttgaatgaggaggcccagcaggtcagaaatgggaaggcgctgggcttggatccccatctgtctgactctttaatgtaacaagttctcrctggtgctgggagcagcttgtgaatgggcaagatgtggtatctggaacagggaccacttgctagtggaggagacagacaataaccaagtaagcaaataataaataattccaggtaagaagtggtaagaagaaaataaaactgagtgatgtaatagggagtgactgggagtgcatcgtggggggcaacttgagacagggtggccaggagggcctctttggggaggtgacatttgagctgagatatgaaggatgagaaggcactgcctggggaagacttggggaagagtgttccggggaacaggaacagccagtgc

SEQ ID NO: 885490 - DNA, 554 bp, Homo sapiens
ccaggctggtcttgaactcctgacctcaggtgatctgcccacctcagcctcccaaagtgctgggattacaggcatgaggcactgcatccagccatgtgacaattgtaagaatgagtgacaggcaggtctgtttgggactcacaccccatattttgaatgaggaggcccagcaggtcagaaatgggaaggcgctgggcttggatccccatctgtctgactctttaatgtaacaagttctcactggtgctgggagcagcttgtgaatgggcaagatgtggtatctggaacagggaccacttgctagtggaggagacagayaataaccaagtaagcaaataataaataattccaggtaagaagtggtaagaagaaaataaaactgagtgatgtaatagggagtgactgggagtgcatcgtggggggcaacttgagacagggtggccaggagggcctctttggggaggtgacatttgagctgagatatgaaggatgagaaggcactgcctggggaagacttggggaagagtgttccggggaacaggaacagccagtgc

SEQ ID NO: 885491 - DNA, 563 bp, Homo sapiens
gaaataatatatcaacaccatttaacgccactctgcacagtcccgatattttacaaggctatttctccattcactgtatgtgattccaccctcattaggtgtcctgcccagtcttggtcttggccagtgggcatgggggccccgtctatcagtgctccacatgtgtcgctgtcctgactgtgccctaccacacactgttgtcctccctcatggactctgcagtttagctacctggagatacttctgcagtttcccttttgctccagtggttagttccagtccatgatagctgyaggcaagactcactgaagctaatgacgcataaacttcaggctccttcagttggacaggctcctgtgatggagcgtagtaatgggtccacttggacataagctttcacagaattttgtacattttgcaaaagtaagatctagtcactacaatcagctgagaccatcatatttttccacttggttttcccttctatcacattcctcctctgccagatgttatcaaagtggtcacaggcattcttttcttttgtgattttgtatttttttcct

SEQ ID NO: 885492 - DNA, 620 bp, Homo sapiens
aatcaagtgtgggctcttttctatagatttccaccagggggtggtgttgtatcagattcagatacattggtacattcaaaaatttagaaatgactagaaatgaaagatggataccaggtatatagagtgtgcgtgcttcttttgaggttttggagtttatatactccaagtgcaactcttctgaattctgttttaagtatttgagaaatgtataagtttagacagactggaaacacatatgcatcatacataatctgtgagaaataaaaggttatgataaaacagcattttttaaaggaggaaataattttttaatagttaaaaataaaaatgaaggccactgttcagaataggtagaatttcagtcatttcgaagcagctttaartgtactcctttgttcactatgcctgtggttcagatcctgtggcatttttattgtgtgttgtgggctcaccttctatgacctttgcctatttgttactctagttcagcttcactctgcgttttatatttctaaagtgcaatgctacaagagtgcaagactggaggcttcttgagaaagtggttgtggctgcatgccctgatttcattttcactaattgctaaatattgttcccag

SEQ ID NO: 885493 - DNA, 654 bp, Homo sapiens
gccacagtgctgaaatccagggacaggagaagacagatgtcctagctcaagcagagagcaaatttgtccttcctcacctttttcttctattcaggccttcaacagattggatgatgtccactcacattggtgaagataatcttctttacttagcttactgattcaaatgcttatctctcccaaagatatccwcatatatacacccagaaataatgtgttgccagctagctaggcacccttagctcagtccatttgacacataaaattaaccatcacagcttatcttcatttacttcaaagatttcaatgtttatataagttgaggtcttcctgggtaatcggtgctactgcctgagaatagactgctttattttttctttcttgttttctatttcagaacatcttttatttttttctgaacatgaagaacaactgatttccttcttaaatctctgctttcaagtgtctggcctttgtggctgagtgtctgcctgctgtgtctgtgacccagaggaacgaggctgctttgagccctgtcattgccagcgtgtgcttcttcagcaggcaaaggttatgcacaaagttttaggattttttttttaacttttgggattttatttgcttaggaagaaaaaaaaaagtttaacagaaagg

SEQ ID NO: 885494 - DNA, 654 bp, Homo sapiens
gccacagtgctgaaatccagggacaggagaagacagatgtcctagctcaagcagagagcaaatttgtccttcctcacctttttcttctattcaggccttcaacagattggatgatgtccactcacattggtgaagataatcttctttacttagcttactgattcaaatgcttatctctcccaaagatatcctcatatatacacccagaaataatgtgttgccagctagctrggcacccttagctcagtccatttgacacataaaattaaccatcacagcttatcttcatttacttcaaagatttcaatgtttatataagttgaggtcttcctgggtaatcggtgctactgcctgagaatagactgctttattttttctttcttgttttctatttcagaacatcttttatttttttctgaacatgaagaacaactgatttccttcttaaatctctgctttcaagtgtctggcctttgtggctgagtgtctgcctgctgtgtctgtgacccagaggaacgaggctgctttgagccctgtcattgccagcgtgtgcttcttcagcaggcaaaggttatgcacaaagttttaggattttttttttaacttttgggattttatttgcttaggaagaaaaaaaaaagtttaacagaaagg

SEQ ID NO: 885495 - DNA, 650 bp, Homo sapiens
gcctgaggactatagttcaccttatattagacaataagatctgtgtgctcagggagatgtctgatttagcactttatagccagctcaggcaccaagcctggtacttgataaacatttattgagtgactaggtaagtgaactattaatgcaacatcaatggatagattatcccaatttaaatttgatttttttaaaaaagcaagccccattcaacaagctcttgttttggcctgctgattgattttccttaaaatgtaaaaatctatctactactaaaatttcacagcttgaatataccattgagaacacattcatggcctagattctcaggcagctgaattatctaaccagctagaaggaacaggctgtagaaaactttcttsggagcaaagccagcatgtgtatgccttcacccaggtctgcatatcttcctggcattactctactaagacatgaagcagggtacatgaagcaagggccatgaagcaaggtaagggtgcctctggtaaaggagcagctgaaagccatgtctcttccctgtttttatgccttctgcagcctccaggcctgttgtacctaggatttgggtcctgccacaagagcaacaagataatagattttttttctttatttcttctaaaataagaatt

SEQ ID NO: 885496 - DNA, 609 bp, Homo sapiens
tattaccattttacaggtgaagatgctgaggtcaagtgggtataaggaccttgccccaaaaggtaggggagccagaactgaacctggggccaaccgactctcaagcctgggatctgatcactaacctattctgcctccttggaggacctgacccagagattcagtctacacgttcctgttacccagatactgcagtggaagggctgggagggcatcctcctggcttcctggagcacgtgtctgtccagcgctggagtcagctgttgcagccaagaccttctccaggggctgtgtcctgcaccaggyaccacacttccggccaatgtgaggcttccgacctgggcaggggatgcttctggtagccacataggtatgcatgagtctcaacatttgagtatgtgtgagcatgcgagtgtgaacacgtgggcgtgtacgcaagtgtgagtgtgggattgtatgtgaacgtgtgaacatgtggctaagcatgtgagcgggtgtgagtgtgtttgcatgtgaaggcgaatgtgtgaacataagcatgtaagtgtgtgtaagtctgtgtggagcgtgcatgtttgtaggagtatgtgtggatgtgcatgcacaggg

SEQ ID NO: 885497 - DNA, 579 bp, Homo sapiens
aaaatgaaaacaaaattaacaaaatgaaagaaggtgaccaaggccctggtgctgcaacgagaagggctaatatttatcatttgcctcttgtgtgatagggcctgttatacccatttcacagacgggcaaagagaggcacagtaagacgcagccatttgagccaaggcacaagcctggggtggtctgaatggcttgtagctcctacagcaacccccaccccccattgtggattcttcctggtgttgctggggcttcttagcagctctgcycgaggtacatgtggagcccagatttactgatcaagtgaatacacagaagggtgactccagacctcttttctgctggctgtgggagaaccatcccccttgttcaggttggaggcaagtgtgtgtgggaaggggtttggagagggatgcggcaagagttaggaagtgtctagatccttggttcatttatcaacaaatgtgagccaaaccatgtggtgggtgctagaatacaccagcgataagaactgggagaacactgcctcatgacactggcctccttccttcccctacaggttcctggtcactgtgtgac

SEQ ID NO: 885498 - DNA, 596 bp, Homo sapiens
cactcattaaatattatttgaatgaatgaagtaaaataaaaagtaagattgaccttaaatgagagtaaactcaaagtatctattggtatcttttggttgcaagtgatggaaaccccttatcaaattggcttcagcaaaaacaagtatttaactggttaatgtaacttgaaatttccatgggtggctgaattcaagaattcaaacaatgccatcccatcaggacctggtttttctytggatctcagctccatctcctgctttattcatttttttttcaagctctgagtggtacccctgaagctacagtcttacatcttccaaatagaaaaagaaaaggtgttttttccccattagtcctgggaaagccttgattggttctctcgattctggctgtatcacatccccgtccctgagtcaatcactttggttggggaaatgcaatgttctcattggccaggcctggaggacataagaggtggaggtagtgaatgggggacaccttcactgaaagaaagtgaggtgtgggttcacaaagaaaaacatcaagattaaatagatgctgcatccacccaggctccaaatctacctaattaaac

SEQ ID NO: 885499 - DNA, 655 bp, Homo sapiens
atatggttgttcactctacaattcttttaatttttctgtatgtttgaaatttctcattaagaaatgttgaaagaaaaaccaagaatttatttagttcacaaatatatgagttcctctgctcttggatgggctaaactgatcttcacgggacttgctcacatatctgccccattgcaggatagacctactggggcctgagtagtctatgatggacttaactgggatggctattctccatgattcatcttcctgcaggaagtttacatgatggtcacaggagtcccrgagaacaagtggaagtgttcaaggcttcttgtatccttggcttagacatgtcacactatcactttcactagacttttggccaaagcaactcataaggccagctcagattcaagagatgggagaacaaacaggaagggtgaataattcgggccatttttgcaatcttccacatccactctgctggttgctaatcattgtttctacaaagcaatggggcctctacagtcagacttactgacttcctacatttttatcactcaccagcagtcatatgcttaggaccctcagagtctagaagtcctcagatggtgccttaagatctatatattggtcaggtaggacttcagaccaggtaaagttagtaattgcc

SEQ ID NO: 885500 - DNA, 616 bp, Homo sapiens
atccttagtcaaaattaattgttggatagggaaaaacagaggttagtgtggctgtcaccagagaaggaccatcaagattacaaactccaacattactattttgatgtagaccactttatagattgtgtcccaagggctttgagttttaaggttatcccattgcactgaggtccacaaggcccactaatttacattgcttgagcctaatttacattccttatgcctattgaacttgaggctcaatattagtcaaactggactgataaagtatattggcatttttctccctcacatctaaaaaacaatttaggaaaakgaagaaaaataacatctagcatattcagtatgctactttttatatcagttttcacgtattagctctaggcagagagcccttgtgggtaattatgttttaatatagtacaaacctctttaaaaatgataccatgtgcaattaggagttcaaaatgaccttgtttgatgaagtttgataaaatgtctctatttgagaaaatactacagcagtcttcaagtgtaagaccagtgggcctcatgttgcttatgaaaatgcaatagaataggcacattgaagtaagatgtgcttcactcagatgat

SEQ ID NO: 885501 - DNA, 714 bp, Homo sapiens
tttaaatgctttttaagcattttttaatcaataatccttagtcaaaattaattgttggatagggaaaaacagaggttagtgtggctgtcaccagagaaggaccatcaagattacaaactccaacattactattttgatgtagaccactttatagattgtgtcccaagggctttgagttttaaggttatcccattgcactgaggtccacaaggcccactaatttacattgcttgagcctaatttacattccttatgcctattgaacttgaggctcaatattagtcaaactggactgataaagtatattggcatttttctccctcacatctaaaaaacaatttaggaaaatgaagaaaaataacatctagcatattcagtatgctactttttatatcagttttcacgtattagctctaggyagagagcccttgtgggtaattatgttttaatatagtacaaacctctttaaaaatgataccatgtgcaattaggagttcaaaatgaccttgtttgatgaagtttgataaaatgtctctatttgagaaaatactacagcagtcttcaagtgtaagaccagtgggcctcatgttgcttatgaaaatgcaatagaataggcacattgaagtaagatgtgcttcactcagatgatttaaattatagataaacacctcacatcttctgccatgcttttgattaagcaaaataaggagtgtg

SEQ ID NO: 885502 - DNA, 616 bp, Homo sapiens
atccttagtcaaaattaattgttggatagggaaaaacagaggttagtgtggctgtcaccagagaaggaccatcaagattacaaactccaacattactattttgatgtagaccactttatagattgtgtcccaagggctttgagttttaaggttatcccattgcactgaggtccacaaggcccactaatttacattgcttgagcctaatttacattccttatgcctattgaacttgaggctcaatattagtcaaactggactgataaagtatattggcatttttctccctcacatctaaaaaacaatttaggaaaatgaagaaaaataacatctagcatattcagtatgctactttttatatcagttttcacgtattagctctaggcagagagcccttgtgggtaattatgttttaatatagtacmaacctctttaaaaatgataccatgtgcaattaggagttcaaaatgaccttgtttgatgaagtttgataaaatgtctctatttgagaaaatactacagcagtcttcaagtgtaagaccagtgggcctcatgttgcttatgaaaatgcaatagaataggcacattgaagtaagatgtgcttcactcagatgat

SEQ ID NO: 885503 - DNA, 616 bp, Homo sapiens
atccttagtcaaaattaattgttggatagggaaaaacagaggttagtgtggctgtcaccagagaaggaccatcaagattacaaactccaacattactattttgatgtagaccactttatagattgtgtcccaagggctttgagttttaaggttatcccattgcactgaggtccacaaggcccactaatttacattgcttgagcctaatttacattccttatgcctattgaacttgaggctcaatattagtcaaactggactgataaagtatattggcatttttctccctcacatctaaaaaacaatttaggaaaatgaagaaaaataacatctagcatattcagtatgctactttttatatcagttttcacgtattagctctaggcagagagcccttgtgggtaattatgttttaatatagtacaaacctctttaaaaatgataccakgtgcaattaggagttcaaaatgaccttgtttgatgaagtttgataaaatgtctctatttgagaaaatactacagcagtcttcaagtgtaagaccagtgggcctcatgttgcttatgaaaatgcaatagaataggcacattgaagtaagatgtgcttcactcagatgat

SEQ ID NO: 885504 - DNA, 682 bp, Homo sapiens
ttcagattatctcttcactactggttttcagttacaagcataccttgttttattgcactttgctttattgtgatttgcagatactgtttttttttttacaaattgaaggtttgtagcaaacccgcatcaagcaagtctattgatgccattcttccaacagcatgtgcttgcttatatctctgtgtcacatttttgttaattcctgcagtatttcaaacttactacgtccacataagacagcaaacttaatcaataaatgtgtgtgtgttctgactactccattgactggtttgtttccgtcactccctctcctgggggtctacctattcctggagacatagcaatattgaaattaggccaattaatrtcctaccatggcctccaagtgttcaagtgaaaggaggaattgtacatttctcactttaaatcagaagctagaaattatgaagcttagtgaggaaggtatgttaaaagctgagacaggccaaaagctaggcctctcatgccagttagccaagttgtgattgtaaaggaagttgagttgttgaaggaaattaaaagtgccactctagtgaacacacgactaataagaaagtaaaacagccttattgatgatatggagaaagttttagtggtctggatggaagatcaaaccagccccaatattctcttaagccaaagc

SEQ ID NO: 885505 - DNA, 638 bp, Homo sapiens
gcacaaactaatttagagtaattagtttatagttcttattccatatggtctctattaagttgttcttttcattaagttatgaaagaaacttatcaaagattttttataatctttattaagggttgaattaatgagattctctagtattcatgtctatatcagattgaccacattgttgtagtcaccatgtcatttgttctttgatgctttgatatcttggtccttgatgaccctggagagactactcctttcagggttagctaatttctaaacaactcacctgtaattgcgcctatcatattcacaccaaccaattcagagccgataccctctcaaccaccyaactttattgagctcttacacatgggaccattatccacctgccctaatcacccagggtcaggtaccagacaactggtacctatgccctagagcccactgaaattattcaaaccagtcaattctaggcatggttaccctgcctcaccagattcttcccacaggaaccacaataaaggctcttgtccacatttcccccatagctctctctgcctcctgaccaacccaggtgcctctccacatgccccccatggcatggtgtgcctctttctctctgaatctctgagtatgacaaatta

SEQ ID NO: 885506 - DNA, 582 bp, Homo sapiens
ccttccctgtattagtctgttttcatgcttctgataaagacatacccgagactgggcaatttaaaaaagaaagaggtttaattgaacttacagttccacatggctgcagaagcctcacaatcatggcagaaggcaaggaggagcaagtcacatcttccacggatggcagcaggcaaagagagagagcttgtcagaagctctctgacatctgtgagatggcatctcattttgcttttgatttgcatttccctaatgattaatgacattgagcattttttatatgcttgttgaccagatgaatgtcttttttgrgaagtgtttgttcatgtcctttgcccatttttaaatggggtgatttgttttttgtttgttgatttgtttaagttccttatagattctagatattagacctttgttggatacatagtttgcaaatatttaatccttctctggaggttgtctgtttatttattgatagtttctttttttgtgcagaagctctttagtttaattaggtcccacttgtcaatttttgtttttgttgcaattgcttttggagtcttcatcataaagtctttgtcc

SEQ ID NO: 885507 - DNA, 638 bp, Homo sapiens
ttctaggtcttcttctagggttttataaaccctggaagaaagatgctatacctagaagcctagaagactgtgggtttttcttttcttttttttttttttttttttttttgagacagagtcttgctctgtcacccaggctggagtgcagtggtgatgttggctcactgcaacctctgcctcccaggttcaagtgattctcctgcctcagcctcctgagtagctgggattacaggcatgcaccaccacgtccagctaatttttgtatttttagtggatacagggtttcatcatgttggtcaggctggtctcgaactcctgacctcrtgatccacctgccttgacttcccaaagtgttgggattacaggcatgagccaccatgcccggccttcttttttcttttttttattttactttaagttctggaatacatgtgcagaacgtgcaggtttgttacataggtatacacctgccatggtggtttgctgcacctatcaacccatcatctaggttttaagccctgcatgcattaggtatttgtcctaatgctctcccttaccttgactatggggttttcttggtatagtatcacaacgtctgcaaagatagtttgacttcctcttttactatctggatgcct

SEQ ID NO: 885508 - DNA, 641 bp, Homo sapiens
ctaagtacccagtagatgtacctgtacttattacgattggtgttcaaggagcctcagagataggaatggttattgtcaagggacagatggagggacaatttcaagtgaagtgaatgagctcattttggttttcaagtacccctaagaaaacattcttctttggcaggactggctacataagttgtggggcccactgcaaaaaaaaaaaaaaatgcagagagcctcctgctaaaaaartctttcaaagtaacacccacagagcgttacaccaagcacaggaccattcaatgccaacgccctgttcatcagagagtgcttcaactctatcttcctctaagtaggtctccactaggggcctctaggggcctatgaccaccagttctagaccagagtggagtcagtggcacaattctgtcgtgcactagcttcacagcctactgtgtcatcccactctgactcagaggccttctgttgtggctcttatgaccacttgaaaaagtggcttccttccctctatgatctcaaataaaatgaaatccttctaaatatatgttctaagctaatagaaagacaaaaagaagtaaatgaaagcatcattcccttgagaagataatctgaggtgtacacacaggatagacagt

SEQ ID NO: 885509 - DNA, 502 bp, Homo sapiens
gtgcccgtatgttctcattgttcaactcccacttatgagtgagaacatgcggtgtttggttttctgttcctgtgttagtttgctgagaataatggtttccagcttcatccatgtccctgcaaaggacatgaactcattcttttttatggctgcatagtattccatggtgcttacgtgccatattttctttatccmgtctatcattgatgggcatttgggttggttccaagtctttgttattgtgaatagtgctgcaataaacatatgtatgcatgtgtctttatagtagaatgatttttaaacctttgggaaaggcctttgataaggtgacttttgagcagcaatccaaagcagtgagagagcgagccatgcagacactatgggaagaatgttccaggcagagggaacagcagggccctgagacaggacagggtcaagcatgcctggcatgttaaaggaaacaccatgagcccagtgtttattaagaggagaaagggcagga

SEQ ID NO: 885510 - DNA, 502 bp, Homo sapiens
gtgcccgtatgttctcattgttcaactcccacttatgagtgagaacatgcggtgtttggttttctgttcctgtgttagtttgctgagaataatggtttccagcttcatccatgtccctgcaaaggacatgaactcattcttttttatggctgcatagtattccatggtgcttacgtgccatattttctttatccagtctatcattgatgggcatttgggttggttccaagtctttgttattgtgaatagtgctgcaataaacatatgtatgcatgtgtctttatagtagaatgatttttaaacctttgggaaaggcctttgataaggtgacttttgagcagcaatccaaagcagtgagagagygagccatgcagacactatgggaagaatgttccaggcagagggaacagcagggccctgagacaggacagggtcaagcatgcctggcatgttaaaggaaacaccatgagcccagtgtttattaagaggagaaagggcagga

SEQ ID NO: 885511 - DNA, 642 bp, Homo sapiens
caggttctgtgtttagctctacaggttggaatattgtatatatactggaaatttacagtaccatacttaagaatatagaggttgaatcatttgaaattgccagtttttaaccatcttttgctttaaaaatggccatttcacattgtccaacctaaaatgttattattaaagaagttagcatcagttttctattaactaatgctaattccttgcttgaaggaaaacaatcatttcaaatctgactttttttcttttgtgctgagagrgggtttacattattctgtgttcacataatattttgttgattttgttaaaggttgtttagagggctaatattcagctggtatgtacgagagcagcctcttttttatgtgttcattcatattagtcttgctgtcttctggttggttgctgcttgcaggttaccagtagtatcgtgatagtaaaaatattttatattgatttatagaagttctttaaagaatctggatgccaatttttcttagtattgtaattatattctccccacatgttgccttttaaatttgatcgtgatttattttgttgtacaaaagtttgtaaatttttgttttgttttgagacatgatctcgctgtgtcactcaggctggagtgcagtggca

SEQ ID NO: 885512 - DNA, 608 bp, Homo sapiens
ttatatttagtactttcttctgtactccttgggttaatttgttcttttcctgacttcttgacatggataattcttagagtgtcaaccactatcttttctatttaccatttaaggctacaagttttcctctaagaattgctttagtttcgtcccataaatttttatttttagtgtttttattttactyagttcaaactatgttccaactttgtgcttgtttttttttttgacccatgagttatgtagaaatatacttccttatttccaaacatatgagaattttgtatttatctttaaatttttgatttctgattatattgtgtggtggacacagaacatactatgtatttttttcttttttagttctttgaaatttgtttagacttgcttaatggcccagaatttggtcgatattgtcaaatgttttctgtacatttgaaaagaacatgtattatgcattgttgagaacagtgttctatgtacatctatttaactcttctgttttcctactgacattctgttttcatttgattgaattttaataatataattctttccttctcaccgtctgtcattaccttggaagtcatatactgtttttctatgtt

SEQ ID NO: 885513 - DNA, 660 bp, Homo sapiens
atatctagttatattatggcatccagtaaatgtttccttaattacttacctccattaacaagctttatgcaaaaaaaaaaaaaggaatgccgactttagacttttcatctccacttaaaggaagatttctgttgcttttcagaagagatatgttgcatattttgcacaagtgaaacatctctacaactggaatctccctccaagacggatactctttataaaacacttcattatttattcgattcctcgtaagtgctttatgtataattgaagaattgggcaggagggccaatgtycccactctgggagggttttgctcatagttgtatatacagatgatcctaactcatacttgtctttttacatatcctcacacaggaactcctccttatttatgccgctcctcctgcaattgcccattgattgccagcccttagatgttcttcactttttcttttccatcaccaatttgggggacttcatccctttcccatctctcctgttctcattgctcctctggtctcaacccaggcggacttttccgggcagagggagcctctgatgagggaggaggaggacccatgtgccctcaagcctgcttatttctcagaaccacctctagttcagagtttgccttggtggaggtgtctccgtatcgta

SEQ ID NO: 885514 - DNA, 660 bp, Homo sapiens
atatctagttatattatggcatccagtaaatgtttccttaattacttacctccattaacaagctttatgcaaaaaaaaaaaaaggaatgccgactttagacttttcatctccacttaaaggaagatttctgttgcttttcagaagagatatgttgcatattttgcacaagtgaaacatctctacaactggaatctccctccaagacggatactctttataaaacacttcattatttattcgattcctcgtaagtgctttatgtataattgaagaattgggcaggagggccaatgtccccactctgggagggttttgctcatagtygtatatacagatgatcctaactcatacttgtctttttacatatcctcacacaggaactcctccttatttatgccgctcctcctgcaattgcccattgattgccagcccttagatgttcttcactttttcttttccatcaccaatttgggggacttcatccctttcccatctctcctgttctcattgctcctctggtctcaacccaggcggacttttccgggcagagggagcctctgatgagggaggaggaggacccatgtgccctcaagcctgcttatttctcagaaccacctctagttcagagtttgccttggtggaggtgtctccgtatcgta

SEQ ID NO: 885515 - DNA, 567 bp, Homo sapiens
catgtgcctatagtcccagctacttgggaggctgaggcacaagaatcacttgaacctgggaggcagaggttgcagtgagccgagatcatgccactgcacttcagcctgggtgacagtgagactctgtctcagaaaacaaaaagcaaatgtaaacacacacgcataaacaacagtattgcaactagaagagattattaataattatttatgtatgtagtgattgggctgtgagaccaaaagtacttgataaatacaggaagtcatgataagtgaaaaggaacttcattgttatcattatctaggtttatagttctcaattccatgtgttcattcataggtacttgataacattacaacagacaaaatattaattgatgtattcgacggtcyacctctgtatgatgatgtgaaagtgcagtttttctattcggtgagtaatcacaaagtagcctctgccattgttcttgtctggtctaatgatttcatgtaagatttgctttactacaattcccaacaagggaggggtagggggaagaaaacaataaatcagatctataacaaattttt

SEQ ID NO: 885516 - DNA, 656 bp, Homo sapiens
tttacaaatcatttaaaaaggatgatcaacttaacagaaaaatgggcaatgacaaatagactattagttacctaaccaatagccactccccactcacaacctgttccttacagagttcacctcccactatcatggctgaaaggaacatccttgctctctcaccctcacttgtacctaggacatggatggataccagtcacggttgatgggatttaagaaaaaaatctgttggccgagcgcagtggctcatgcctgtaatcccaacactttcggaggctgaagcaggcagatcacctgcctgttccaatacggagaaaccccgtctctactaaaaacacaaaattagccgggcatggtggtgcacacctgtaatcccagctactcgggaggttgaggcaggagaatcrcttgaacccgggaggcagaggatgcggtgcagtgagccgagatcgtgccattgcactccagcctgggcaacaagaagcaaaactgcgtctcaaaaaaagaaaaaaaaaaaatctgctaagggcttccaggaaaggtttttaattccaaataaaatagatgtgcatgaacaaatatacttcatctttactggtcattgaacctggtgtgaactacgaatcctctttttctcacatgccacatccctcaac

SEQ ID NO: 885517 - DNA, 656 bp, Homo sapiens
tttacaaatcatttaaaaaggatgatcaacttaacagaaaaatgggcaatgacaaatagactattagttacctaaccaatagccactccccactcacaacctgttccttacagagttcacctcccactatcatggctgaaaggaacatccttgctctctcaccctcacttgtacctaggacatggatggataccagtcacggttgatgggatttaagaaaaaaatctgttggccgagcgcagtggctcatgcctgtaatcccaacactttcggaggctgaagcaggcagatcacctgcctgttccaatacggagaaaccccgtctctactaaaaacacaaaattagccgggcatggtggtgcacacctgtaatcccagctactcgggaggttgaggcaggagaatcacttgaaccygggaggcagaggatgcggtgcagtgagccgagatcgtgccattgcactccagcctgggcaacaagaagcaaaactgcgtctcaaaaaaagaaaaaaaaaaaatctgctaagggcttccaggaaaggtttttaattccaaataaaatagatgtgcatgaacaaatatacttcatctttactggtcattgaacctggtgtgaactacgaatcctctttttctcacatgccacatccctcaac

SEQ ID NO: 885518 - DNA, 582 bp, Homo sapiens
aacaaaagactagattaagcagaagaaagaatttctaaacttgaagacaagcgttttggaataatccaattagactaaaaaaaagaattaaaaagcatgaagaaaacctatgtgacacatgggacaccctcaagtgaacaaatatttcaattttggtagttccagaaggagaaatgatggaaaaaagcaaagaaaacctatttaacaaaataatggctgaaaacttcataagtcttgcaagagatattgacatccagatacaggaagctcaaagaaccmcaaatgaattgaacccaaaaagatcctctccaaggcacattatagtcaaactgtcaaaaaccaaagacaaagataattctaaaaacagcaaaagaaaagcatcaaatcacatacaaaaggattatcatcagactaatcacagatatctcagcagaaagagaatgggatgatatagtcaaagtgctgaaagaaaaaaaaaaactgtgagccaagaatactatatccatcaaagctattattcaaaaatgaaagagaaataaagttttccatgaacaaacaaaaattatgagaattcatgactag

SEQ ID NO: 885519 - DNA, 582 bp, Homo sapiens
aacaaaagactagattaagcagaagaaagaatttctaaacttgaagacaagcgttttggaataatccaattagactaaaaaaaagaattaaaaagcatgaagaaaacctatgtgacacatgggacaccctcaagtgaacaaatatttcaattttggtagttccagaaggagaaatgatggaaaaaagcaaagaaaacctatttaacaaaataatggctgaaaacttcataagtcttgcaagagatattgacatccagatacaggaagctcaaagaaccacaaatgaattgaacccaaaaagatcctytccaaggcacattatagtcaaactgtcaaaaaccaaagacaaagataattctaaaaacagcaaaagaaaagcatcaaatcacatacaaaaggattatcatcagactaatcacagatatctcagcagaaagagaatgggatgatatagtcaaagtgctgaaagaaaaaaaaaaactgtgagccaagaatactatatccatcaaagctattattcaaaaatgaaagagaaataaagttttccatgaacaaacaaaaattatgagaattcatgactag

SEQ ID NO: 885520 - DNA, 582 bp, Homo sapiens
aacaaaagactagattaagcagaagaaagaatttctaaacttgaagacaagcgttttggaataatccaattagactaaaaaaaagaattaaaaagcatgaagaaaacctatgtgacacatgggacaccctcaagtgaacaaatatttcaattttggtagttccagaaggagaaatgatggaaaaaagcaaagaaaacctatttaacaaaataatggctgaaaacttcataagtcttgcaagagatattgacatccagatacaggaagctcaaagaaccacaaatgaattgaacccaaaaagatcctctccaaggcacattatagtcaaacygtcaaaaaccaaagacaaagataattctaaaaacagcaaaagaaaagcatcaaatcacatacaaaaggattatcatcagactaatcacagatatctcagcagaaagagaatgggatgatatagtcaaagtgctgaaagaaaaaaaaaaactgtgagccaagaatactatatccatcaaagctattattcaaaaatgaaagagaaataaagttttccatgaacaaacaaaaattatgagaattcatgactag

SEQ ID NO: 885521 - DNA, 582 bp, Homo sapiens
aacaaaagactagattaagcagaagaaagaatttctaaacttgaagacaagcgttttggaataatccaattagactaaaaaaaagaattaaaaagcatgaagaaaacctatgtgacacatgggacaccctcaagtgaacaaatatttcaattttggtagttccagaaggagaaatgatggaaaaaagcaaagaaaacctatttaacaaaataatggctgaaaacttcataagtcttgcaagagatattgacatccagatacaggaagctcaaagaaccacaaatgaattgaacccaaaaagatcctctccaaggcacattatagtcaaactgtcaaaaaccaaagacaaagataattytaaaaacagcaaaagaaaagcatcaaatcacatacaaaaggattatcatcagactaatcacagatatctcagcagaaagagaatgggatgatatagtcaaagtgctgaaagaaaaaaaaaaactgtgagccaagaatactatatccatcaaagctattattcaaaaatgaaagagaaataaagttttccatgaacaaacaaaaattatgagaattcatgactag

SEQ ID NO: 885522 - DNA, 564 bp, Homo sapiens
atctgatggttttacaaggggcattttcccttttatttggcacttctccttcctgtcatcatgtgaaagacatgtttgctttcagttctgccatgactgtaagtttcctgaggactccccagccctgtggaactgtgagtcaataaaacttctttcccttataaattaccaagtctcaggcagttctttacagtagcatgagattggactaatacagtaaattgatactgcagagtggggtgttgctataaagatacccaaaaatgtggaagcgactttggaactgggtaacaggcagaggttggaacagtttagagggctcaaaagacaaaaatgtgggaaagtttgsaacttctaagagactttgagggctaggaagacaggaagatgtgagaaagtttgaaacttcctagagacttgttaaatagctttgaccaaaatgctgatactaatatggacaatgaagtccaggctgaggtggtctcagatggagatgagaaacttgccgggaactgaagtaaaggttgctcttgctatgcaaagagactggtggcattttgtccc

SEQ ID NO: 885523 - DNA, 568 bp, Homo sapiens
aggtgctagagcgattgaaagataattaaaacactagtcttatccattctaagcatgcagtctagtaggaaaaatatggaacaaactgaaccatattataaaataattactacttaaagtaacgagaaaggtcagaggaaggtgtgatccaatataatgaacagacatgataaagctttagaactgaggkgactttcaacatttcttaatggataaataagacttatgaaggtcaagaggggagaatatcaggctaatgtaataatacaagtcaaaatttaaaccagtaataaggaaattggatacagggaagaaataggtggatgacaaagttggcattgcaaatttattagagtctacggatagaaaaaaagtgactttagactcattgaacttcttgagaaaagacttggcattgttccccacatattttagaatttctggcttgcaccttcccagtatagaagaaatagttattaagatgaaaaagttattaagggtctttccctccttcccacttgtcaatccagatcactggaaaaaactggtggggatagtgactgcctga

SEQ ID NO: 885524 - DNA, 581 bp, Homo sapiens
atatacagtaaatgaagagactatgtaattaaaacacattttatgctactgaatgacaagtgctatggaacaaaatacagcaggaatgcggccagggtgtgagtgtgagtgtgtgtgtgtgtgtgtgtgtgtgtgtatccatgtgtaggatgcaagggaataaaatatatmaatatttaaaggaaaagaggcaggtgtatgaacaggagtggtgaggcttgggtgggagtctttgaggcagaggcatgcctggttattttgaggcaagtcaaaagtaatgtgtagctggaacaaaattcaatcagggatgatagtaggaggtggttcagagaggtaacaagtgccaaacagtgtaaactttgaaggccattttaatgactttaacttttattctgaatgtgatggaacaactttggagaagtaatgtgagttttgatagagttactctgacattctggctactgtgttgaaataagactgtgaggggtcaagagcaaaagttgcttttgcttctgtttagtagttcatgattaggagactttgcagtagaccatgtaagaaatgatagcagcctaaccaag

SEQ ID NO: 885525 - DNA, 627 bp, Homo sapiens
atcccatttgtccattttggctttggttgcctgtgcttttatgggcttactcaagccatctttgtccagaccgatgtcctggagtgtttcccccaatgttttattctagtggtttcaacattttaggtattagatttaactctttaatccattttgatatgatttttctatatggtgagagataagggtctagtttcatacttcatatagttatccagttttcccagcatcatctactgaagcgattgttcttcccccccagtgaatgttcttggtgcctttgttaaaaaaaaaaaaaaaaaraaagaatcagtgggctgtaaacatagatttatttcagggttctctatcttgttctctattctgttccattggtctgttgtccatttttatgccagttatcttggttactataattttgtagaatattttgaaatctggtagtgtgaagcctccagttttgttctttttgctcaggattgctttggctatttggtgtgttttgtggttccatacaaattttaggattttttttctattcctgtgaagaatgtctttggtgttttgatagggattgcattaaatccctatcattaaatagggattgggtagtattgttattttaac

SEQ ID NO: 885526 - DNA, 647 bp, Homo sapiens
cacttttcgcagatcaccatgtgattataaaaagaggagttctttctattgtggtttgtgaattttaactacattgtttcctggaggatgtattgggttaagatgagttattcacaaaggtcaaaatgatcaacactttactttgacagaagtttttttcaattaatttgaatgaaacctgttagttkgctgatagcaaaatgtggatccctacatttacgttccttccaatgaattggaaggaaacatacatctttattacattttaacagtatatcatgtaaatatattattattattcctgggtcagaaatctaagcacaggtgatgatattgtatgtgttccatgaataaataagacatggctttacatgcttatgtggtgatgatagacacataatagatcattacaatataatgtgataaatgcaatgtgctgtagcagaacttaagtcaataaaggcatgtcaaggaaggctttctagaaaatggcctgagctgagtggatgacacacagctctgttccatttacttacgtggtttccccagccagattttactctctagttcactgatcccatttcccacgaatcgtagtccttctaaccagatacagagagacaaataaccagattttttagtgtctg

SEQ ID NO: 885527 - DNA, 647 bp, Homo sapiens
cacttttcgcagatcaccatgtgattataaaaagaggagttctttctattgtggtttgtgaattttaactacattgtttcctggaggatgtattgggttaagatgagttattcacaaaggtcaaaatgatcaacactttactttgacagaagtttttttcaattaatttgaatgaaacctgttagttggctgatagcaaaatrtggatccctacatttacgttccttccaatgaattggaaggaaacatacatctttattacattttaacagtatatcatgtaaatatattattattattcctgggtcagaaatctaagcacaggtgatgatattgtatgtgttccatgaataaataagacatggctttacatgcttatgtggtgatgatagacacataatagatcattacaatataatgtgataaatgcaatgtgctgtagcagaacttaagtcaataaaggcatgtcaaggaaggctttctagaaaatggcctgagctgagtggatgacacacagctctgttccatttacttacgtggtttccccagccagattttactctctagttcactgatcccatttcccacgaatcgtagtccttctaaccagatacagagagacaaataaccagattttttagtgtctg

SEQ ID NO: 885528 - DNA, 647 bp, Homo sapiens
cacttttcgcagatcaccatgtgattataaaaagaggagttctttctattgtggtttgtgaattttaactacattgtttcctggaggatgtattgggttaagatgagttattcacaaaggtcaaaatgatcaacactttactttgacagaagtttttttcaattaatttgaatgaaacctgttagttggctgatagcaaaatgtggatccctacatttacgttccttccaatgaattggaaggaaacatacatctttattacattttaacagtatatcatgtaaatatattattattattcctgggtcagaaatctaagcacaggtgatgatattgtatstgttccatgaataaataagacatggctttacatgcttatgtggtgatgatagacacataatagatcattacaatataatgtgataaatgcaatgtgctgtagcagaacttaagtcaataaaggcatgtcaaggaaggctttctagaaaatggcctgagctgagtggatgacacacagctctgttccatttacttacgtggtttccccagccagattttactctctagttcactgatcccatttcccacgaatcgtagtccttctaaccagatacagagagacaaataaccagattttttagtgtctg

SEQ ID NO: 885529 - DNA, 665 bp, Homo sapiens
gctatgataaatggttagttcattaaatgactggtaataagattaatttgttcctttcatgcccgagagatacttaaagtaattgcatctctgaaaactgcactgtcatcattttatgcttttgatgatgtcatagattagttccataggctgagaaaggctcagcagtttttcttgtatctcccttggtatatattatatyatattgtattaatgtatgtgctactgttcaccacccatgaatttgcaatattctatggtatccacaggataagaagagaggcctctaaatcacccagtctcctaaataaaacatgtgccagttttaataaagttaaactgatatatattaaagtgtcctggagaaatctggaagcaccatgaaatattcctaatgtcattttgcagcaaaaataggttggggatcactgctatgcacactagaaagaaaaaaggaaaaaaaaaaaagaaacacattacttcaaaacacttcaaatgtttaaaagtatcacttgctcttcaaacatatcctcccaacttagagacctgaatttggaatccttcatatttatccttatgcctacaagtaaaatccttttacctttgtcctaaagaagacatcactactcaccagtcacttcacaaaattaaatgattgcagctcc

SEQ ID NO: 885530 - DNA, 665 bp, Homo sapiens
gctatgataaatggttagttcattaaatgactggtaataagattaatttgttcctttcatgcccgagagatacttaaagtaattgcatctctgaaaactgcactgtcatcattttatgcttttgatgatgtcatagattagttccataggctgagaaaggctcagcagtttttcttgtatctcccttggtatatattatatcatattgtattaatgtatgtgctactgttcaccacccatgaatttgcaatattctatggtatccacaggataagaagagaggcctctaaatcacccagtctcctaaataaaacatgtgccagttttaataaagttaaactgatatatattaaagtgtcctggagaaatctggaarcaccatgaaatattcctaatgtcattttgcagcaaaaataggttggggatcactgctatgcacactagaaagaaaaaaggaaaaaaaaaaaagaaacacattacttcaaaacacttcaaatgtttaaaagtatcacttgctcttcaaacatatcctcccaacttagagacctgaatttggaatccttcatatttatccttatgcctacaagtaaaatccttttacctttgtcctaaagaagacatcactactcaccagtcacttcacaaaattaaatgattgcagctcc

SEQ ID NO: 885531 - DNA, 577 bp, Homo sapiens
ccagtgagcatctgcttcatgcgcccatcaatacgtctcaaggaaggacagcctaaattccagccactgatctgcactcagtggctcttcacatgggcaactccatacagtggcttcagcctaagtcacagcaggcttcattcatttgcgctccagatcgaacagtgacaaataggatcttcaaaggagatttgttacaatgtttaaaattattacaactttacattaatacatttgagatgttttcagaatccaacattaactaaccaatattatttattctattatactttatctaataacagttaatgattctcctgagcactatcaatagtattgccaggatatagaaaaataaatatttgaaagtttaaaagtaaaatcattactatataaccacttcagcaataggcaaaaagttttwttttttttatctgagtaatgcttggttatcacttccagtaagacagcattgaatccaaggttttccctcccaatattttagagatgacaccttggcatctgtgtgggtgtgtaactggcttaaatgtaaggataagcagttggccaaattcac

SEQ ID NO: 885532 - DNA, 577 bp, Homo sapiens
ccagtgagcatctgcttcatgcgcccatcaatacgtctcaaggaaggacagcctaaattccagccactgatctgcactcagtggctcttcacatgggcaactccatacagtggcttcagcctaagtcacagcaggcttcattcatttgcgctccagatcgaacagtgacaaataggatcttcaaaggagatttgttacaatgtttaaaattattacaactttacattaatacatttgagatgttttcagaatccaacattaactaaccaatattatttattctattatactttatctaataacagttaatgattctcctgagcactatcaatagtattgccaggatatagaaaaataaatatttgaaagtttaaaagtaaaatcattactatataaccacttcagcaataggcaaaaagtttttttttttttrtctgagtaatgcttggttatcacttccagtaagacagcattgaatccaaggttttccctcccaatattttagagatgacaccttggcatctgtgtgggtgtgtaactggcttaaatgtaaggataagcagttggccaaattcac

SEQ ID NO: 885533 - DNA, 448 bp, Homo sapiens
ctccaagtatgaggtttgaaaagactgttgtggggaacctgatcagttcaagaagaacatctaaagatactgaaaccagagggttcaccaaatggtcagcacaaatcaccccactaaacttacaaatcgacaagcaccrccacatactcaaagctttctaatcaactacttaattccttttttaaaaataaaaatactatctatccagtctccatctttagttcttcacttttaatcatgcatgtaccataaagattatctgacaatggtctataacaagcttgtccaacctgcagccaagatgctttaaatgcagcccaacacaaattcataaactttcataaaacattatgagactttttatgaggttttttttttttttaaaaaaaaaaagctcaccagctatcattagtgtattttacatgtggcccaagacaatgcttcttcc

SEQ ID NO: 885534 - DNA, 646 bp, Homo sapiens
gagaaatagaacgatactccaaaggaatataaagtttgctgtcagtgaaaattaggtcggcaaggatgagagtgacatccagtaagaccaggaaaactccaaatagtctaaaataaacaaataaataaataaataaataaatgcaaagataaargggcatttgtccctgtagctatactatatttaagccactgatcaggtaccaaaatgttattatttagtattaagctgcccagtggcaggaaaaactgtaatgccttagaatctcagaaaaatcactgttttcacccaatagaagcagttcttaataaacaaaattctcaccaaaccacttcacaagatattatagtaaacacatcagaccaacacctcaagagagaaaagtaaaactgaattaaaatcacctgtctgtttacaaactcttcttaaaatttgcgaatttcataagaagtttataccaatttctcataaaaaataaaccctcattaatctggataattctaaagaatttattaataaaaaccaaatgaaagcatgagtaacataagctcttaaaagaccaagatttttcatcagtgacattttcaacaagtacatgatttcatatttatgggtgcttctagcagagtgatgggcacatgagtct

SEQ ID NO: 885535 - DNA, 611 bp, Homo sapiens
tgtcaagtcaaatatagcttatatcaactatacctcaataagcctggttttaaaatttttctttttgaaaaaaggacgagaatctaagtttccttattcctggtttagtggtaaacttgaacaatttcacctgtctcctatacttaaaatgacatttcagaattttaaaaacaggattttaataaaatagcgaagttattacataaaatatttgctagtagttagcaaatgtatttgtaatacacatacaaataaagcttcataacatgatagcaaatatctatcaatcttaaaattttttaaataaaagagcaactatattacataatgactttttagagagggttggcatagaaagataaggagtcaaagaggaaggtaagaaaagagaaagratgagaaagtaaatatacaagaaaatgtaaccagaggctcaaaaaaaagtaggacagtaaaataaacattttgacctatttatatgactcatcaaaataacttgctatgagattttcatcattaactgacatttagattagagaaaatatacatgaagcaagcctcaccccaggcaatacaacagctccgattccacttttcagctttgacctgcc

SEQ ID NO: 885536 - DNA, 551 bp, Homo sapiens
tacataaaatatttgctagtagttagcaaatgtatttgtaatacacatacaaataaagcttcataacatgatagcaaatatctatcaatcttaaaattttttaaataaaagagcaactatattacataatgactttttagagagggttggcatagaaagataaggagtcaaagaggaaggtaagaaaagagaaaggrtgagaaagtaaatatacaagaaaatgtaaccagaggctcaaaaaaaagtaggacagtaaaataaacattttgacctatttatatgactcatcaaaataacttgctatgagattttcatcattaactgacatttagattagagaaaatatacatgaagcaagcctcaccccaggcaatacaacagctccgattccacttttcagctttgacctgcctcggccacctcgccccgacagtcctgcacctcgaggtctccgctttcttggaaatccagacccatggccctatgtaacagattaggaaaagtcaacattctgtgacagcccaaaataatttttaaatccaaatgccact

SEQ ID NO: 885537 - DNA, 814 bp, Homo sapiens
tctgtcacccaggctggagtgtagtagcatgagtccaactcaccgcaacctcgcctcctgggttcaagcgattctccggtctcagcatcctgagtagctgggattacatggcacccgctaccatgcctggctaatttttgtatttttagtacagacagggtttcaccatgttggccaggctgatctcgaactcctgacctcaagtgatccacccacttcagcctcccaaactgctgggattacaggtgtgagccaccacactcggcctagggagtaagtttttcaaatctagaaggaaattctgaggaaaagcaagatatttgcatggtcttaawgtatcctcacatactgctttattagatacaaaggaggggggaatagaaattgggcaacagcctgaccaggtgattctcatgagggaaagtggaataatatgtgcttccagttgtgataccctgaggatggatcagcattttgcagtattctggccaataatgcatgcctctcatctaattataaggggttatcaaaaacaaaatggggaaatttctgtttgaaaaaagaaaaaaacaagtatatcgagaagaactctattcttcaaaaataccaatgacaaaaactaaatcctagaacctacttggaggaaggggtagattatgaaggacataagatcaaatgacataactgtaatatggctggtacattagataaacatacggcattgatgtaagtttaggaatttgatagcaggattgtgatttttaaagaatattcctactattaagaaatacatactgaaatggtggtaaaaagg

SEQ ID NO: 885538 - DNA, 634 bp, Homo sapiens
tttagaaccagtggatttttatgaatgtgaaccctttcatgtcttgtggaagattttctgttttttaatctttttatttatttatttatttttgctatgttttcataggaaccagggaaaatgtgtagagggcatggtggagatcttcgacatgctgctggctacatcatctcggttccgcatgatgaatctgcagggagaggagtttgtgtgcctcaaatctattattttgcttaattctggtgagttgataacacaagataactcaatgctggatgaaatgtttatttgtagttttcaaccagatacgatctacccactccaaaggcataatgtcataaatagaaagaaactactgacacacrttttaaaataacctaccaacattgcagattccttataaaggtagaaccatgctagccaaatagacacatgaaaaattgtaatttggcattgaatcaaatggcctttgagctaaaatttttgtatgctttcacagataggatgtttttattcaaatggtacatgtatatagacatatgttagttgatagttatattatgtctgaaaataagtagaccaagtaattctgttaagaaattgtgaccaattccaggctccagatagtaaagaa

SEQ ID NO: 885539 - DNA, 694 bp, Homo sapiens
gtaagtcccagctgctgccattcggatacatcatctcatttaattgttgcagcaactctaagaagagttattataaccagtacccctccctacctgaactctgactgtatgaactcggtaatgaatgggatttagataacacatctctgtccagactcagtatcaagcatctcattatccacatgtagaacctgaataagtgtggatagtaagcagtcctgagtcaccgcctccttctgcagatacccaggggcttagaaagaccattcataacttgccaagatcacacagccagtgacgacaagccgagatctgacctcaggcctgtctgactccaaaacccgacctggagaccatgtcctccagggccgttgcycacctgcttttgtgtcagccttcctcccagtccctcgagtgacaccaagcaccttcccatagccccttcccagtgagagtcccgccctgtccatccttatgcccagcccatagcccctggccttatctgccccacacttagcactgctctgtatcctcagcagtgaactagccttccagaaagctctgtgcttcaatctcatgccaacatagacaaataggacagtctcaaccactgtaccatcaccaggcctgcttaaacatgtgtgtgaaattcaacatatcatgcatttttagtgtcatctacactgtgcaaggc

SEQ ID NO: 885540 - DNA, 692 bp, Homo sapiens
aacactggggcctaagacggggaggaacagaagtgtgagaggcgcggatggatggcagagcagtcaggtgggaggctcctgaagcaactcaaagatgcagcaggggcccgagcgctgactttcagtctgcacgcccatcgctgaggatttcgctccttgaccgaatggtttggagaacaggtcttctttcagaatgtcatcttcccgcaagttaatattctgaagtggagaaaacaagctccaaagttacccgagctgccacagtcagcttttggaggcagcgggctacctcggctgtctccccagactagaaagctgtaacaaacgtggtttattctggaagcagccaggaagatgctcagttgctttctgatttataccatacamgtgaatcaaagaatgtgactgaaatatttatgcatatgaccgtgtgtgtgtgtgtgtgtgtgtgtgtgtgtgtatgtgtgtgtgtgtgtgtgcatgtgtgttgatatgcctgtgtggtgagtttgaactggaaatcaataatcaacatgtgtcaactcattttattttctgtaacttttctttgacaagctgccaatttctctcagcagcaggagaactaaatttagtccaacctagtaaaatcagtgtaatcattttttagctacttctggtttaaaacctagactctttttgacagtatccag

SEQ ID NO: 885541 - DNA, 607 bp, Homo sapiens
tctcttcatagtcaggtattctggggattgcatctgttttgaggcccaatgaggggatagttagttcatgagtgcaggacatcttcggatgagattaatatacggatggggatctctactgggagaattgtttggttatcaacatccaggaatcgaagttttcctggctttaagtctgctgttgggactatataagaatcgaagactaattcttcatagcctgtatattcatagcttcaatatcattggtggccaattgctttgacagtgatagaagggttgttaacctcatctgttatgtacagaacacgtaaggataggagggcaattaaaattaagataatggcaggtaaaatagttsagacagtctcgattttttaggcatctatgatgctagtatgagttaattttttggtgagtattaggaaaataatgtataggaccagggaactaattaggaaaataattataagagcgtggtcatggaaagtgagctctataataggggatatagcgtttgaaggccaaattgaactagacgagctattaaaacatgcgagagttaacttatacattaaaagttgaggcaatatctcattttttttct

SEQ ID NO: 885542 - DNA, 627 bp, Homo sapiens
ttctctctttctgtctctctctctctctgtctctctctctctgtctatctttctctcggtccttctctttttttttttttttttttttgttgttgttttttgagacagagtcttgctttgttgctcaggctggagtgcagtggtgcaatctcagctcactgcaacctccgtctcccgggttcaagtcattctcctgcctcagcctcccaagtagctgggactacaggcgcccaccaccatgcccakctaatttttgtatttttagtagagatgggattttgccatgttggccaggctggtcttgaaatcctgacttcaggtgatccaccctccttggccccccaaagtgctgggattacaggcgtgagctaccatgcccggcctgggtccttctctcttactcttcctcacacatacttggcactccaaccctccattcccttttccaattttcttttttcccaagtcgggatactggagccctggtagcttccaatccccattggcactgctcagttttctgttctcatcttgcagcttttccatgacttgacctatccactggaatttaactgtaaaggttgcgattttaaagggatgatctagtcattggatggatgttttgtt

SEQ ID NO: 885543 - DNA, 588 bp, Homo sapiens
cttgtctctaggactagtcacctgtaagaatagaagccaaattcaccagaacaatagacacaggtagttacagaactatggttttttatttctgcagggaatgcagaaaaaattatgtgatagacagatagatagataagggtcggtaggtacaaccaaatctttaagtgaccttctgattagacctagagcaccgacttcacttcataacggcagtggttcttcaggcatggtctaagttctttattacatawgtgaagctgtaagtcagggaattaaattggttgcattttggctgctgttctgctttcttctgatgaattgtgtatttactaggattgatcgatggcagtaagaaccataagacttgtttggctgagtccgttcttcaaccacacactggcttaaaaagttctcatgagaggagaatgggatacagttcagttattaaaagaggccattttcagtgctgctgaagttcaaacactttgttttatggtataaaaaataatcacagttcctatagcacccatagtgctgcctccttcgtaattcaccatcccacttatttacaactgtcctcatcgc

SEQ ID NO: 885544 - DNA, 670 bp, Homo sapiens
agaagtgaggatgtcagtatcattttgatgctgttctgaagtaaagaagcaataatcactaatagctagaaatgagttgccaagctctagggaaaacaggctgcatgcaaatatgcctgaaggagctgataataccaggaatggggccattttcttctatatggcaatgtttttttaacctggtgatcaaaaattgaggatccctggtcggtgtatttttctctcagctggatcagccaagctgtctctgaagatcatagtcccaagagatgttccttttttgatatacatgggttttgctgggtttttttaaaataggtaaatgtacttattattacaaacaggctcaggcttcatttaagtgcaaaatgctttttccttctaataaggaaacagttggtcctggtttgccatgtagtgtacacyaaatgagggtctacaagtgttctagactgtgcattttaaaatgagttatgacaacattagtcaaaatcaacccaatccctcattagacttaggcgagttttatgccctgaatcatttctcttctaattatcgtgaggccagctgctactccctgcatttatttaatccaccagaaaaggagaagaaatagttttcatttttccccagggctaaaatggtgtcaattatctagaagttcctacaa

SEQ ID NO: 885545 - DNA, 637 bp, Homo sapiens
ctctcagaattgcctgtttgtattcttaattcgatagaaggtttggttaaatttttaaaaaaggaaaacaccataagggttaagacagtagcatctagctattgtattttcgttttaatttcatgatgtttgatgtcctgcaactcaagcatgcacaaatgatcacgtggtctcttgtttcccatagaaaagccctggtctcatccttgcaggggtttcctttagcctctggccaaactgccatatctgaaaaatcagaaataaaaggcacatgtaatgcggactcattagttttcctcttattattcaaaggagcacatggaatatggggtagacttgagtatccttttaaagatagctttgttaaaaagctaattgatagccccctcggcatagctttaaaaaaagaatccgatagaaaaagcagratacaaaattttgcatgcaatatgctcaaattattatgctttatatgagaagggaagagctagagaaaatttaacagaacaaaattcccccggtggttgtctttggatgatacaaacggtatggttcttctctccttctccctacactgcctcctttctactttctgtgttttcctaatacaggagagggcttttgtgcttgtaaaaac

SEQ ID NO: 885546 - DNA, 708 bp, Homo sapiens
cgttgcatctccctgaccgtttttcgtgtcatctctagctgtcatcttgtgcctcactctgccagtttaaggaccatcgtgattatacttgatccacccagattatccaaaaggatctccctatctcgaggtctttaatgtgagcatgtgtgcaaagtaccttttgtcatgtaatgcaacatagtcacatagtcacgggttccaggaattaggttacgttcatcttggcggkggtgggcagaatattctgcctaccacacagtggagtggtcttcctaaaacacatctcttctcctactgacaattactaactactacctgtggagtaaagtccaaacttcctatttgggcataatggtctccatcctccgtcccgcgtccagtagtgcctacattcaagaaaccactggcatttgctccgtagcagtgtgactgcctctgtgtctactagttctgctctttgaccttgagtggccttaccttccctcagctctcgtgatcattcccaagtcaccacctctgcaaagcctcccaggacccaccctccgaggtggaacggcacactccttctaggtgcttgctgtccctacaaccacatctctcatgtcacctctccctcttcattgcaccttgctggttaccagcagagctccctgtgaacaggaaacttgtctgtcctgttgctgcatccccagcaccaggcatagt

SEQ ID NO: 885547 - DNA, 597 bp, Homo sapiens
ctcactgttttgagttgtataatcttctggcacatctctgtcatcacacttgccattatcaaacctaagataaccctaactttcctgtccattttagtttctacccagtgtctttcataaaagagcatgaggaattcacacataaagaaaacatccctcttccccaagtcaggatttttctggatttttaagcttctttctttccttcccttttgctttgccagggaagggattctaccactttcgcaggatggtctttcctcatctgtaaccttgctaaataatttctctcttttattttcatcaagctctttcatttatgggatcctttgcctytgcttatagccataagaaattcttcttatctcattccctcaattcctggatttttgttaactctatgtgaaatggaaatagaagaaaactacctaaatatgatcaaagctacttacaaaaaactgtggcatatgaaataaacattgggataattcccacaaaaaaatcacaactaaggaaaagatatctactaataccactataattcaacatcatttgggaggcactagaaaatgcagtaagaaaaacgaaataaccaat

SEQ ID NO: 885548 - DNA, 666 bp, Homo sapiens
cttagagagctcttgcaataagccatggagagaggctggtgggtttatcaagggtaagagcagtgaggatgcaggaaagtggaaagatttgagaggtaccaaggacacagaaccaccagaatctggtgattaatgaaatgttgggagttcggaagagggaaatgtgaagaatactgccgaaaatgctgttttgggtcataagatgaacaatgtaccagttattaaataaggaaaccaaaaaagagggtcaggtttagaatagacaactagaaataataacatcattttaaggcatgctcacttgaggcttctgtgggacatgcaagtgaagattgtraagacagaatatagaatgatggctgaaagagacagagaaagagagacagagagagagatgaagctatgggattagaggacatctaccagggaaaatatatggcatgagaaagaaaagagccagaaacagatactggtatgaaactacatttcggagttgggaagaaatcacatttcagagatgggaagagggcaatgatctggcaaagaagactgagaagaaacatctagagagaaagaaaaccagaaaagggtggtatcatgggagccaagcagagtcttgtgggaacatggacgtgttcaaaaacactgagagaggacaaataaaat

SEQ ID NO: 885549 - DNA, 670 bp, Homo sapiens
agggtgagtgatctctgtggtcttctagatcctgtcctgctcatgtgagagagtccagtgcactgtcagatgctttgtgtactacatttttaaacaaatacagccatagattagtaaatgattccttgatgaactgaaagagcaatgccaaaaaaagtctatctttcactaacagaattatatttatccttaggatatttaccattgggataaatgtaaacatgaaatccttgaggattttttagtaaattcctcacccaaaataaaagactgtttcctttacttttccgaagtatgcctctggtaccccgtgcctcctacacagtcacttactcatctgatcattttaaaatgatatttgaaatgtcacaatacatattttcttcccttcccattcccactctgcttcttgcatgacagcagtcctggcaatgacatttttcaccaagtcttcagttcarcaaacattgatttaaggctttacactttcagcatgtcctggactctccccaacacctgtgggcaataccctggcctgcagtgggtacaggcataacgcaaagcctcaactgtcacaagacttctgttttttgctggctgtaggatgtttgcaggggctccctggagatgttctgctaataatgagttacaggctgcctcatctatccag

SEQ ID NO: 885550 - DNA, 558 bp, Homo sapiens
ccttgaacacaggagttagtcagtaagcatttgttgaataaacaataacaggacatctttccactttcctgaaactcatcaaagaattcttactcattctgatccatcttcccttatgatgagaccaaaccactcactgtggtcaacggcattcaaaaataaaaagtgggggatttccagaggttaaaaaatgggacaaaactatttgaaatattcatatatttatgaaccaattcattaaaaaattctcactattaatatttgcacatcattagggaccgtgagtatagcagagaacaaaaaagaaaaattttccggccacatgaaatctatattycagaggacagaagaaatggtctgataagaatcaggaaagaacatgatatgtccagattaaatcataacctttatgtagaataagagtgaaatccctgtaagctatgttgatatttgaccaggctacttgaacacttttagataagtgctttaaagctattggtggcttttgaacaaggaactactgtggttattgaatttcatgacagagtgcaatagaag

SEQ ID NO: 885551 - DNA, 636 bp, Homo sapiens
atcaattttgttttggcaaatccagtcaaagaaaataagttatctaaaggctcagaagtgctttgtcctagttctttctcaggcttcttaatcaatactcacaactctgtaccaattattggtaagtaatatatatagattatcagagactgcagtttctgccagtgtgtctgaattaaccctttcagtgttttgtgaacttcagttgtaaaatattagcagaatataaaataattctaaatttttaaaattttaaagtggggaaacatttgagcaaacacttcacaaagatatgcaaatggccagtaagcatatgaaatgatcaacattattattcactagaaaaatgtaaattaaatccacaatgagaygcccctacacatataactaaattggctaaaatttaaaaattatagacaactgaaagtatcaagcgatagtgaggatgtggaacacaaaactctcagtttgctagcagggttgcaaaaagatacagcaactttggaaaacactttggcagtttcttatcattttaaatattctcttacatacaacccagaaagtcctctcttaagaatttacccccaaaaaagggagcaagggaagttcatgtaaatctctatatgcaaattattc

SEQ ID NO: 885552 - DNA, 561 bp, Homo sapiens
ccctaggttttcatctgtaaatcgtagttactctaactcttctagttattagagggaaatttttctttattcctgttgctgtgctgttcatcttggaaagggaaagtaaaagctttgtaataacacctaagatattaatagcctcacagattactatgatcatacaggacagcgtgtttcatagttttacatgtcttaaaatcttgtcyacaaacagaaaatattggatgtaaagagtagaaaccaatctaagaagaagagcaaagaaaagcaactaaagatgcttaccttgaaagaaagaggacttaaggcaacattagttgttttcaaatattggagggcttgccaatgaataaccaaggggacaaattttatacagccattaagggtggagaaagaaatggtggatacaagttttaggatggcatatgtaaactactctaaggaattaataattactagcatacatggattgctttaagggatgggggacacaaacagcagggtcaaagcaaagtcttatggtcaggaatactgtagagaaaatacggccgttgaatg

SEQ ID NO: 885553 - DNA, 583 bp, Homo sapiens
atatttggaagtatttttattttctttacatggaaacatttaaagctatggatttctcctttccctctcactgtcactctcgctctgtttgtgtgtgcacacacgtgtgtgcatgcatcatttagccctgctgactgatacrcctggttatttatgatcaaaagccagacattgacctaagagaaaaagtctttagatgggatctccctccaaagaaattgtagttttcttctggcttagaggtagatcctcttggtccaatcagactgaaatgccttgaggctagatttcagtctttgtgtcagctggtgcatttctagtttgccttttcagctagggattagctttttagggatctcaatgcctagggagatttctaggtcctctgttcttgttgaactccgattttgtctatccttttgctgagcggtctgcttaacttccttttagtcgggtagctccattttatgctaagcttcttagttgctcaccttctgcaactaaagaatcagaaaatgttgtgaaggaaaaacaaaacgaaattgttttgtttctgctggccctttatcaagccctggccacc

SEQ ID NO: 885554 - DNA, 632 bp, Homo sapiens
catacgttaaaactcatagatctttgcaacacaaagagtgaaccttagtgcatgcaaataaaaaaattaggagttaaggaaattccagaatggaatttagaatgcggcaaaagaatctaaccatattacaaatgtatgaaacaatctaactgaaggggataggagaaaaggtgtygacctaaataattttggaaatgacagtaaaggtgaaaagaactgcacataagtaccgtattctacttgataaagctgtttcccataagagttcaagttgacaattctgaaaccactatacatttatattgaaattgaacaatcaagtgaattgatagcagatggaaagtgacaggtttcttagtgttggagtatgaggttacaaatagcaaagagaggaagctgaaatgatccagatcataatctgcagttggagatatgagtaagaactcatgtttagcttaatgtaggtacacagggttgcatatggaaatattcagagatacaaggatatgcacaggttagtatacactcatgcatttgatcattctgtcggctgaaagggcctagcagcaacaacactccagcagtaatgaccaaacccaggacccagcttttagtttgtaatactattctct

SEQ ID NO: 885555 - DNA, 632 bp, Homo sapiens
catacgttaaaactcatagatctttgcaacacaaagagtgaaccttagtgcatgcaaataaaaaaattaggagttaaggaaattccagaatggaatttagaatgcggcaaaagaatctaaccatattacaaatgtatgaaacaatctaactgaaggggataggagaaaaggtgtcgacctaaataattttggaaatgacagtaaaggtgaaaagaactgcacataagtacygtattctacttgataaagctgtttcccataagagttcaagttgacaattctgaaaccactatacatttatattgaaattgaacaatcaagtgaattgatagcagatggaaagtgacaggtttcttagtgttggagtatgaggttacaaatagcaaagagaggaagctgaaatgatccagatcataatctgcagttggagatatgagtaagaactcatgtttagcttaatgtaggtacacagggttgcatatggaaatattcagagatacaaggatatgcacaggttagtatacactcatgcatttgatcattctgtcggctgaaagggcctagcagcaacaacactccagcagtaatgaccaaacccaggacccagcttttagtttgtaatactattctct

SEQ ID NO: 885556 - DNA, 555 bp, Homo sapiens
tactgtcttacaaacagctcgtttcaatgtaccctccaaagatgttgagtgaggtaggcttcaagcccagtaaaatgagatcataaggaaaatgtaacttgggtctattttggcagcatcaccacgatgacatgagaggctgaagtgtacatgggtgaagagcactccatcatctctctacctcagtctccagaacttgtctggtgtcttaagttatttattttccactttagctttccyttccccaacctacaactgcctatttattcgtgttgaagacattgtgaccctatcggacccgaatctcagatgtcctctcaaacttgagacagcaggcccagtaatttcccccaccccactgaagtggctggcaccagtgtgcacctggtaggcctgcatgtccctgggactaacttttaatcaggccaaaaccctaaataggccccgccatccagccaccagcatccctcagtagccttcagattgatacagagctggtcattatttagaaaggaaaaaaactcatttaggcctctctgtctcctctctgcatgc

SEQ ID NO: 885557 - DNA, 555 bp, Homo sapiens
tactgtcttacaaacagctcgtttcaatgtaccctccaaagatgttgagtgaggtaggcttcaagcccagtaaaatgagatcataaggaaaatgtaacttgggtctattttggcagcatcaccacgatgacatgagaggctgaagtgtacatgggtgaagagcactccatcatctctctacctcagtctccagaacttgtctggtgtcttaagttatttattttccactttagctttcccttccccaacctacaactgcctatttattcgtgttgaagacattgtgaccctatcggacccgaatctcagatgtcctctcaaacttgagacagcaggcccagtaatttcccccaccccactgaagtggctggcaccagtgtgcacctggtaggcctgcatgtccctgggactamcttttaatcaggccaaaaccctaaataggccccgccatccagccaccagcatccctcagtagccttcagattgatacagagctggtcattatttagaaaggaaaaaaactcatttaggcctctctgtctcctctctgcatgc

SEQ ID NO: 885558 - DNA, 634 bp, Homo sapiens
attgttttatttttgagactcaaaagccaaaaatatgagctgtgaaatcctaaaaatcaccactggctattgaaacctttatgtctcttaatgataagaccatactgaaagtgtccaaattaaaaaaaaatgagatgataaactgagaatagtatgagttgaaagagatgctgattaaaagacacaatagaagaaaattgtatgtataccctccacatttacaytacactctttctgtgtctctttggctataaagtgaagagtgacaagggaaatgcagaggggagtaagaatgagaaaagagggataggaaaataaaacaagaaggacaggcaccatttgagggttcatagtaatggagatagtgacagagcaagtgtcttggtcttagttccttcttctataacatgccaatgttgacaagggtggtctctacatactcaaataacattaaagttttttagttcttacttttaatgtaagaatctgactttagccaccagacaataaaacatgtcagaatgactgcttctcatatcttggaataaaaatagctccttgaaacatgatttgtgagaacaagttgtctcctagttttttgcgttttttttttctacacaaagaccaacttatc

SEQ ID NO: 885559 - DNA, 649 bp, Homo sapiens
gtgccaagttaaatcctagcactgtgattgtgtgtgtgtgtgctcgcacatgtgtgtgagagagagacagagacagaaagacagagaaatatagagtgtgtatactctatagaagtatagagtgtgtgtgtgtgtgtgcatgtgtgtgtgtgagagagagasagagaggaggggaagagagaggattgaagactaaagaaataacatgcctctgagatcaaacacttaagacctcaactctcaattcgctttcctttactcccatctccaatgagaatatattaccctgtctgggggaaatagagtgaaaaggtgggagagacacaaaaagaaataaagctacagagtcctgtgttcctgacttcctcagagagcaaggtagatcttgaaggacttcatttttctccattaacttttatgaagcctgacttggctgtaatgttgtgtaaatgccagccagtttccagccaggcttttccaagtgcgtctaattgcccactttatcacaggcactatcaggtaaatggtgttccacctccgctgggcctgcctgaggttgacactcaggacttgtcaggcaatggatcacagagccggcatgggggcccctcgccctgcattcctgcatgggggtgacagtaaattatga

SEQ ID NO: 885560 - DNA, 622 bp, Homo sapiens
actgatgacaatgcagatatttcaggctgcagttccttgcacactacggcctgtctgagtttgttttgcccctggactatttttgctcacatggttgctctcagccgcagacactcaaatggaaaccagagtgatccaaatgcttgggaggaacttataaacaaaygtaggaagaagcatctcgtctgaccacggcgcccacagcagtttctgtagacagaatataaggagctggaaatccagcccctactagttaagaacttgccttaaatctttcttaggtatttcaatatttcacaccaggatggaaggatggaaattgagaggagcaggttgggaagagcttattaatagtgtgtgcatgtgtgtgtgtgtgtgtgtgtgtgtgtgtgtacctaaatattttttttggcgggaaaggtggcctggaagggctaggtgcctgccattctgtgcttggagagaaaatacaggaccaggcacagtggctcacacttgtaatcctagtgcttagggaggctgaagcgggatgactgcttgaagccaggaattagagaccagcctgggcaccagagtgagaccttatctctacaaaaaatgagaaaattatctgggcatggcc

SEQ ID NO: 885561 - DNA, 622 bp, Homo sapiens
actgatgacaatgcagatatttcaggctgcagttccttgcacactacggcctgtctgagtttgttttgcccctggactatttttgctcacatggttgctctcagccgcagacactcaaatggaaaccagagtgatccaaatgcttgggaggaacttataaacaaacgtaggaagaagcatctcgtctgaccacggcrcccacagcagtttctgtagacagaatataaggagctggaaatccagcccctactagttaagaacttgccttaaatctttcttaggtatttcaatatttcacaccaggatggaaggatggaaattgagaggagcaggttgggaagagcttattaatagtgtgtgcatgtgtgtgtgtgtgtgtgtgtgtgtgtgtgtacctaaatattttttttggcgggaaaggtggcctggaagggctaggtgcctgccattctgtgcttggagagaaaatacaggaccaggcacagtggctcacacttgtaatcctagtgcttagggaggctgaagcgggatgactgcttgaagccaggaattagagaccagcctgggcaccagagtgagaccttatctctacaaaaaatgagaaaattatctgggcatggcc

SEQ ID NO: 885562 - DNA, 601 bp, Homo sapiens
cttctatcttacgtcttcacaggactgacactgaagcttaatatcaaaacaaaaccaaatgttttaaacaagaacaagaaagcacaccaaaaatcaagaggcaaaaatgagataatctcatttcagtgaattttcacacaaaaaaattgtcaacctataagtttgtaaagagaaaagggggtaggttcataggtgtaaataccataaatgctgacctaaaatggccaaacaactctatttggttataatacaaattgctcattggaggcctgaggctcaacattcaagactgtatgcctggcaccttgacttgtaaatgagagacagacttttgaccagtcaactctacacaaaaagtggatgatgcaaaggcaccaaatttgaattcattcccttcatgatgtcttatttgttgatgaccctgagcaagtcatctaacttctctgggcgtaattttctcaycttaaaatgtggataaaactacttagcttgtagaactgtagtaaggactaaatgaggtagtggatacttaagcactttgtaaattatacagtaaaattattttcagtagaaatcacctggtatttattgaaacttgtgc

SEQ ID NO: 885563 - DNA, 582 bp, Homo sapiens
caacccagaatttcatatccagccaaactgagcttcataagtgaaggagaaataaaatgctttacagacaagcaaatgttgagggatttcgccaataccaggcctgccttacaggagctcctgaaggaagcactaaatatagaaaggaaaaaccggtaccggccactgcaaaagcaaatcaaaaagtaaagaccatcgaccctatgaagaaacttcaccaactaatgggcaaaataagcagctagcatcataatgacgggatcaaattcacacataacaatattaaccttaaatgtaaatgggctaaatgccccaattaaaagtcacagactgacaaattgagtaaagagtcaagacccattggtgtgctgtgttcaggagacccatctcatgtgcaaagacacacataggctcaaaataaagagatgraggaaaatttacaaagcaaatggaaagcaaacaaaaagcagggattgcaatcctagtctctggcaaaacagactttaaaccaacaaagatcaaaaaagacaaagaagggcatcgcataattataaacagatcaatgcaacaagaagagctaac

SEQ ID NO: 885564 - DNA, 527 bp, Homo sapiens
ggcagtaccattcaggacataggcatgggtgaaggcttcatgactaaaacaccaaaagcaatggcaacaaaagccaaaattgacaaatgagatctaattaaactaaagagcttctgcacaggaaaagaaactatcatcagagtgaacaggcaacctaaagaatgggagaaaatttttgcaatctatccatctgacaaagggctaatatccagaatctacaaggaactttaacaaatttacaagaaaaaacaaacaaccccatcaaaaagtgggcaaaggatrtgaacagacacttttcaacagaagacatttatgcagccaaaaaacatatgaaaaaaagcttatcatcactggctattagacaaattcaaatcaaaaccacaatgagataccatctcacaccagttagaatggcgatcattaaaaattcaggaaacaacagatgctggagaggatatggagaaataggaatagttttacactgttggtgggagtgtaaatttgttcaaccattgtggaagacagtg

SEQ ID NO: 885565 - DNA, 583 bp, Homo sapiens
aaatacatcagataaatccctgccgaggatcattctaaaacacacctgaccaatgctcctcaaaacagccaaggttatcaaaagcaagaaaagtctgagaaactcacagccatgagggcccaaggagacacaacgactaaatgttaagtatggaatcttmgatgcgattctggagcagagaaaggacattggtaaactttaaagatatatgaatacaatatgggctttagttaataataatttaacaatattggttcattaattttaacaaaaataccccattaagatcagatgttaatactagggagcttgggtatgaggtatataggaactgtccatactattgttctaatttttctgtaaatcaaaaactatacaaaaaagaaatttatttaaataattaatacactagtactacttagaaaaaggaaagaaaggtttttatgtaaattttaatagggtagtgctgatgttatgcttgaacttcagagattctcttgtaaattctctagagttatgctaccttatacattcttattgctcacagattctggatatttaaaaaagagagagaaatggggag

SEQ ID NO: 885566 - DNA, 634 bp, Homo sapiens
catactagctcttcaatattgaagactttactgggccctagctgtatttcatatttaatttaaagccttctcctgatggtcttgtaattcttcttatccaactggtcttatattgcagtttctttttctgacaaataaccttccttgccatgtttttcacccgtcttgccacctgattcaaatacattaagtcaacctttatttagagaaataagatttaggaaaacttttcaaaaagttttttaaaacatttttaaaaagtaaaatgttcatctgggaattgctctgggaaaatatatatgcctggctagccatacataaatgtgtawctagtgcagtgatacacatgtgtattacaagtaaaatccatatgttgaagattatttggacagaagtagacttgattaactagagttgcctttttaggattgatgcccgagaattgtattcttattatgtaatacataggcaaagttatgttactgtacctagatgcagggcaaaaatttatgatgttctgccaaaattgccacctgaggacacagagaacaaagaaacaaaaagtcctaatcagattagagcttaatgaaccagtctcaagcctgttgggaactcaccaaataccaagtcattc

SEQ ID NO: 885567 - DNA, 740 bp, Homo sapiens
aatcttattgctatttcctttaccacttccttttaatgacaaaccataccatttttcctgtatcccatttcaagttggtgatttaaaaatacagccagttctagacttctacagtttgaaaaagaggaaatgagaaaaatgaagtccttaaataatgtataatagaacccaacatgaatcgaatgtagtactttgaatttcattcttcactaaactttttcccagatatgtttccagctatcagttttaaccaattaaaggattgttttcctttaattttctcctgtttccctaatattagaagcaatgaaaatggaaargaatatttcatagtcttgaaaaccaacttgagtgattgaaattttgcttaatttcctgaagagcaagatgcatttaaatatgggttactgataatataaaaaaataattaatataaaacaaatgatattcagctgttattagaaaacattaaacaatttttcattctaagatgtggtctgtttgcaattagtctattatgtcataactaaactgtaattatagactgatcattctgcataggcatttgacttactactgtatttgaagtttttcttcatcttcttctttatcatttgaacaaatatattgaaaggtataatttttccagtttgttcttcatatgctattatctgtttcattactgaatgaaatagaaatagcaagctgtccatcaaccaccattaattcataattaacct

SEQ ID NO: 885568 - DNA, 545 bp, Homo sapiens
ttggtgttagaagctgatcattctctatagcatcctaatttgtaattttagtttgcaattgacattatttcagttaacaagacatcttagatattgaaatattggttaagttgttgaaaattctttcagtaactatcaggtaagtaaaaaaccattgttaattggtctttgtctctacacatgtgcatgcacatacaaatgcacatctctttttttaaaccacaaatttgcctttgtattaatattctcaataacattatatttaagtatgttacattaaatcttgggaaatagtgaaaytttttttcttttcatttcagaaaatagagaatcctgatgaactggcagaacttataaatatgaatcttgcgcaactttgctcacttttgatggctttatggggacagtttctggaagttataacgctacacgaagaactaagaatattattagcacaagagcaccatactttgagggtaagttaaagagaagtgattttagagcattttaatgagtattatttacctttagaaaatttttatgaa

SEQ ID NO: 885569 - DNA, 595 bp, Homo sapiens
cctgtaagcccaaggattcatctaaaaattgaaaggagaccttcatagatggatagactatattgtgctcttggttttgtttgtttttcccacagaatgtttatggaaggaccatagtaatttatttatatttttacttaataaacgtgtatagcagttattatctgtgtaaggcactaattgctttataaatgttaactcatttaatcatcagtacaatctcatgaagtaaatattttgtcattcccattttataaaagaaatattgaggttctagaaaggtgaaataacttagccaaagttgcatatcttgtacatggtagtgactggatgggaacccaggcagtagatgcagacctgatatttccacatttcatctctttcccatgaatttgcaaagtattaaaaacraagtaaattaagacttcaaacaaaatagtagtacaaacttataacattagaataccgtttattatgacgctggtttgctatactgtttatattttacaagcaaaaagaaatacaatctcaaacatagttttcagtgtcaacttggtggtataaaatatagttttggattttttttccagttgaa

SEQ ID NO: 885570 - DNA, 568 bp, Homo sapiens
ggcagctcctgctctacctccttctgctcctcctaagcctagacccaaacctaaacccaaaaaatcacctgtgcctccgaaaggggccactgctggggccagccacaaaggtgatgaagtgcctcccattaaaaaaaataccaaggctcctggtaagcaggcccccgtccctccacccaagccagcaagcygaaacacgacccgagaggctggtgagtatgcccccagtgccctgtggggtcacttctagggtgcttggctctgggatggggctaattgtttcttctaggtgtgatgggcttttggtgtcttaggacattacaccagcaggttcagctttgacacaaagaatgcccaggagattcctttgttgctctctaccaaaggaaattcaacccattgaatagttcacctcattagtttttgagtgaatatactggtttcatcttgagtatccactatcagcaccagttgaaggatactgggagtagtatgcctgatgaatgacaatgatctgatataacattatttagacattgactgaccttctacctatatgagcctatgg

SEQ ID NO: 885571 - DNA, 568 bp, Homo sapiens
ggcagctcctgctctacctccttctgctcctcctaagcctagacccaaacctaaacccaaaaaatcacctgtgcctccgaaaggggccactgctggggccagccacaaaggtgatgaagtgcctcccattaaaaaaaataccaaggctcctggtaagcaggcccccgtccctccacccaagccagcaagccgaaacacgacccgagaggctggtgagtatgcccccagtgccctgtggggtcacttytagggtgcttggctctgggatggggctaattgtttcttctaggtgtgatgggcttttggtgtcttaggacattacaccagcaggttcagctttgacacaaagaatgcccaggagattcctttgttgctctctaccaaaggaaattcaacccattgaatagttcacctcattagtttttgagtgaatatactggtttcatcttgagtatccactatcagcaccagttgaaggatactgggagtagtatgcctgatgaatgacaatgatctgatataacattatttagacattgactgaccttctacctatatgagcctatgg

SEQ ID NO: 885572 - DNA, 604 bp, Homo sapiens
ggcctgctttttcatctcaagaagttcatagagaaaaatcactttttatttatgtttcagataaatgactttttatcagaaaggccttccctgaccatgtatcctatttaaatgttattaaatattatccctgatgtgctttattattattcttagaacttattaaaataggacacacatatttgttcacttttttctttattcttttctcctttactagaatgtgagctccatgaggccagaacctttgtcttttttttttgtcttaactgttgaacagtgtctggcaatacagtaggagttcttttaatatttgttgagcaaatgaagaataatcctttatttacatgkatccttaatctcagccagatcttccaacaagtcctgggtttactagactttcttgttcttcactcaggttcttacaaatggtcaccagaaggaggacaatcacaagtaagtcactcaggcaaaaactgagagttcacaaaggcaaaggattataaaaatattaatgaactttgaaaaactcaagtctgcatcatgtccttaagaatagaaacagattataaagaaaaggtataattagataaaaatataacta

SEQ ID NO: 885573 - DNA, 589 bp, Homo sapiens
actccctgttacaacaaaaccctctagtctaaattcttctgataccaacatctttaatagtaacatgccttcaagcaagatctccccaagtttcagttggggagatggaagaaggaatgaagctgcagtgctgctccttgtcatttctagcactaaaccttaaaaaaaaaaaaagattccagagtcttttaagttcacaaaagtagaaaaccactaatgtaagacatattgtaaggctggaactacaatttgactagtgtcaacagtgaaaccatgcaggaagccagcatcttcggaagatgtgattgatgataagccagaaccagataatctcattgaagaagacctcaattttgtgctgaggaatcacttatctcaaaaaaaaaaaaaaatctatagcgacatgtacatatgggccttctcacccytctgttgaaatttactcagtatcttcaagttaaaatgcagatagaggtccattgaaacaggtagtaatttcaacaacagcaaaacaatattcacgctgccaagagagttgataaatagaacaaatacatgaaaaggagatgttagccagaattgcttaaca

SEQ ID NO: 885574 - DNA, 644 bp, Homo sapiens
tcaaagacaaacctttgatacctagtgcccttgttgaaccctttgattaaatggttatgcctagatggcataatgggtggattgaagttatgattcacgtaactcttaaattgtgagagatgtctaaaatgttcatacttgagaggaagagaatgtagaaatagacacactaagtctttcctacaagaggccaacttgttttgcaagtatgggattaaagataggatttcattgtataagccaaggagcttaaaaataaactcataattgagattggaacaatgagcattatgtacacttktctactaaactcacattcgaaagtgtgtgaattgttgaaaaatgattttatgaatatctattttggaaatatctccagaaatctcttcccagtctgaccaagatgttacaaacatattttagtttcttttgccttcaattggtttagattgattactcttctaaagtaaagtaataaataatgtggacataaagcaagcagaaagcagatattttgctgcaggaggaagtagataaaatagcggcagaattaaaggaccaacctgtagccttaggagatcccatcagaaatcaatctgaatcacatacatacttctgtgtggtgtcagatatttctcagtgcc

SEQ ID NO: 885575 - DNA, 644 bp, Homo sapiens
tcaaagacaaacctttgatacctagtgcccttgttgaaccctttgattaaatggttatgcctagatggcataatgggtggattgaagttatgattcacgtaactcttaaattgtgagagatgtctaaaatgttcatacttgagaggaagagaatgtagaaatagacacactaagtctttcctacaagaggccaacttgttttgcaagtatgggattaaagataggatttcattgtataagccaaggagcttaaaaataaactcataattgagattggaacaatgagcattatgtacacttttctactaaactcacattcgaaagtgtgtgaattgttgaaaaatgattttatgaatatctattttggaaatatctccagaaatctcttcccagtctsaccaagatgttacaaacatattttagtttcttttgccttcaattggtttagattgattactcttctaaagtaaagtaataaataatgtggacataaagcaagcagaaagcagatattttgctgcaggaggaagtagataaaatagcggcagaattaaaggaccaacctgtagccttaggagatcccatcagaaatcaatctgaatcacatacatacttctgtgtggtgtcagatatttctcagtgcc

SEQ ID NO: 885576 - DNA, 614 bp, Homo sapiens
acattatggtaagtgaaataagccaggcacagagagacaaatactgtataatctcatatgtgaaatctaaaaaactcaaattcatagaagtaaagtagaatgctaattacaagaggctgggaagtggagggcggatggaaaaaggagagacattggccaacgtgtacaacgtttcagttaggacgaatcagttctgcgttccattgcacaggattttaaatgttttcatcacaaaataatgattttaaatgttttcatcacaaaatgatgattttaaatgttttcatcacaaaataatgataaatatatggggtgatagatataggaacctgcctgctttgatcattccacaatgtatacctgtaataaaacatcattttgatctgggaattctctctctttgagaaacaactgagcttaaggaagytatgcctgattcacaagtttttgcgaaagcaaatatagtcattattccctaacaccacttcttgccagcagcaagtatatcaaaactaaaatttgacaagttataattttgaaactttggatatgattatatatgtgtattttaaaatgtctattccactttttggggaagagtaatacttaattgg

SEQ ID NO: 885577 - DNA, 656 bp, Homo sapiens
cattgataactatatgttaaagagctttaataataaaatatgcaaatttgggggtggtgattttggctttctgtttcttacagtcatagtaactgtggctttcatgggatcaaaatgttgtgctggagaaatgtctagttgtatgccttcacttgaggcacataatgggtaagaggctctgttttcaaaatacctgggctagaatttattacctgtgggatcatgaagtgggggattttctatcctctcatgctttgacttatctttaaaaggatagaacccacattctagggtttgttgtgagacatctattagtattttaatatattttaagattctattagyattttaatatatggatagagtctaaaattggccctcttatgttatgacaactcacctatgtagccttcaataattctccaaatataccttgtagaaataccaagtatgtggagtaagaagcaagaaaacttttgaagagtcgtaagtcatatcactcaatatgcagactaattcccaagcacttaatccattcaggttcccattcatagctatggaatcttgttttacatgtatttctaacagccttttctcagctgttagtagactagaaataaattaagattgtgtttttaaaaagcaacataaaacca

SEQ ID NO: 885578 - DNA, 588 bp, Homo sapiens
tatcagcaagtacttttaaaatgagttattgttctctttttcactttgctcctttttcatggtgtcgtttttcttcacctctttccaggtctgtggctagtctcctcccagacattgtgaatggatgtttatcataattagtgtacacagctggacttcctytgctaatgtcaagtataggtctcttattgtatttctctgctttagcatgtttgattgcaggctctaagaataaagggagcatttttaactggctgacttcactttgaggttcgcaaattgtgaacaagcaggaaagatgggttccctcaaaagcccaaatcttgcttgtattgttctctgtggggtcaggcatgtaaatgtaattctcttctggatattccttttctcttaagggttctcctttctttcacgaaagtctgggtttccctcagtctctgccatggttctctccttctgaggttaacaccctaactgtcttctcaggcagagcttttctaaaaacctctctttagaggacaggtgtttgggggatgctcaatggacaaactctccactaccagtgcctcagaaatagttgtggggtgt

SEQ ID NO: 885579 - DNA, 577 bp, Homo sapiens
ttatcctcacctttatgcctcgaaataccctgaggcttgaccatcttttgacaccaggaagtatgggaactcgtgaaggcctttttgttcctgagttggggtggaaaataagaatcgtccactaggcctctgctgatatcatcctctctgggagtgtaaggagtgcctcattaccattttcaggtggtggccactgatattataggggactctataaaaycctgtaaaatcttgactctctactagccctcttttgacatcacctccaaaatggaaagaaaaggccaccttatcactgctggatagttctagaagttcagatttcctagtctccactggctggcatggcagatagagtgaggatgttccttaagactgggcggaaatgcaagtgccgacttccacatggtcttctgtgacaccacctcagcagggagattacctcatcgcagcttagtggaggtgaaattccaggctccccattcagcattttttagccaagaccacagattctttcttcttttttgtttttctctgtagtgtttggctggagtagagttgttattgtttaaaaggt

SEQ ID NO: 885580 - DNA, 568 bp, Homo sapiens
tatatcatcaatatctaagtaaaaatttgacagatattttttaaacattccctcccactcaaccccctggtgagcttcctttttgctttgctggcttttctttggctgtttaatgttggagagaaacatcttaaggcatatactatttttgttatcttaaaggtaagctcttttagtttcgttttcttttattttgtttcctgcttgagttcttacagccatctaaaacttatttttcaataggaacaatttttccaagacttacccagtatgtctctcttttcattaactttgcaagaatctggtgaattcttttgttaggtttacacaagccttcatttcaacaccagaaagttttctttttaatgtctttrttcttcaggaaaaagggagcaacattattacactggtgctaaaagcatgatttttggagtcagactattttgtttaaattctagcttaattatttataattctgcaggctatggaagctttcatgacctctccttgcctcagttttctgtgtgtaaggtgatgatagtaaacgctagtgcaaatgacataagat

SEQ ID NO: 885581 - DNA, 629 bp, Homo sapiens
taaatataaatatactatacatcagaaaggtaaaccaatagagatatttatgtagtaatatttaaatgtgccaaaggcagtgatatccttaaaacaagatcacttttagctgccctgctttgcacagatattgcagaatcttcaaaatagaaaaagrtattatgtatgaataggagtcatttgaattggaaaatagaaacttaaatcatcttgtccatcacactgtcaaggtagatttcctttaacatgctctatgacttaagatataaaagtgtaaaagaaaaagaaaagcttaaaatttctgaatattatcactttacttttttagggaataagccttaatatgtatctaatttgacattgttaatattttcatacttatataggcttgactttgattaaatcaagcaaactatcagtttgtctttagtgaatgaagtcttcttttatatatgtgtagcatataccttttgtttaattttctgtactttatttaatagtaatatatctggtacaataatcttaacaaaattgaagttttcagtaccgaatctagaaatgttggatgcctggtgagatgtgaataatttatatgtaaaaacaaaaactccaacctttattttcctttt

SEQ ID NO: 885582 - DNA, 638 bp, Homo sapiens
ctcaaggatagactatatgttaagccacaaaacaagtctggagacattcaaaaaatttgaaataatatcaggtaccttctctggccacaatggaataaaactatcaatagaaataaataacaagaggaatttttcaaactatacaagctcatggaaattaaacaatatgctcctgaatgaccagtgaatcaatggagaaattaagaagagaatttaaaaatctctttaaayaaatggtaatggaaacacaacataccaaaatctatgggatatagcgaagcagcactaagaggagagtttatagttctgagtgcctacatcaaaaaagtagaaaaacttcaaataaacaacctgatgatgcatcttgaagaactaggagaggaagagaaagccaaacccagaattaatagaagaaaagaagtaataaagactcacgaaaggaaagacttcacatgttctcacttatttgtgggaactgaaaattaaaacaattgaacaaatgtagatagaaaatagaaagatggttaacagaggctaggaagggtagtgagggtgtgtgtgtggcaaggagtgggattgcttaattggtacaaaaaataggaaaaacaaatgacacctagtattttagcacaacagga

SEQ ID NO: 885583 - DNA, 593 bp, Homo sapiens
ctcacttatttgtgggaactgaaaattaaaacaattgaacaaatgtagatagaaaatagaaagatggttaacagaggctaggaagggtagtgagggtgtgtgtgtggcaaggagtgggattgcttaattggtacaaaaaataggaaaaacaaatgacacctagtattttagcacaacaggatgtctatagtcaataataatttaattgtatattttagagtaactgaaagagtataattggattttttgcaacacaaaagataaatgcttgaggaagtggataccctatttaccatgatgtaattatcatacattccatgcctatatcaaagtatttcatttaacatataactatatacatctactaagtacccacaaaaattaaaaatcaaaaatttaaaaattaattaaattgaaatgaagaaaayaatacaaaaatcaatgaaccaaaaagtgagttctttgaaaagataaataaaattgacaaacttttagccaggctaactaaaaaaaatccaaataaataaaattagagatgaaaaaaggagacaatacaactgatactataaaattcaaaacatcattagaggcta

SEQ ID NO: 885584 - DNA, 637 bp, Homo sapiens
aaatgggtaaaagatatgaataaacatttatcaaaagacaaaatacaaagacatccattatgagagaaatgtgaatgaaagctgcaatgagatattatctcacacaagttaaatggcttttatctaaaagacaggtaatcacaaatgctagtaaggatgtggagaaaagggaaccatcctgaactgttggtgggaatgtaaagtagtatgatcactatggagagcagtgtggaggtttctctaaaataatagaagtacccactgctaggtgtatacccaaaagtaatcaggatatggaggagatatttgcactcttatgtttattgcattactcttcaaatagccaagattgggaagcaacctatrtgtcccatcagcagacaaaaatggataaagaaaatttggtacatgcacaaaatggagtattattcagccataaaaaagagtgagacgatgtcatttgcaacaacaggaatggaactggaggtcattaggttaaatgaaatgtcaggcacagaaaaacaaacttcacatgttctcatttatctgtgaaagttaaaaatcaaaacaaatgaactcatgaaaccacagagtagaattatggttaccagagtctgggaagggtagtgggaggtgg

SEQ ID NO: 885585 - DNA, 646 bp, Homo sapiens
tggggcactgcctagtggagctgtgagaagaagcccaccatctgtcagaccccagaatggtagatccgcttgcaccatgcacctagaaaagccacagacactcaatgccagcctgtgaaagcagacaggagggaggctgtaccatgcaaagccacaaggctggagctgcccaagaccatgggaacccacctcttgcatcagcatgacctggatgtgagacgtggagtcaaaggtgatcattttggagctttcaattagactgtcccactggatttctgacttgcmtgggccctgtaacccctttattttggccaatttctcccatttggaatggctgtatttacccaatacccatacccctattgtatctaggaagtaactagctttcttttgacttcacaggctcataggtggaagggacttgccttgtcttagataagactttggactgtggacttttaggttaatgctgaaattagttaagactttgggggaatgttgggaaggcatgattggttttaaaatgtgaggacatgagatttggtggggccaggggtggaaatacattgtttggctgtgtccacatccaaatctcatcttgaattgtatctcccagaattcccacatgttgtggatgggacctagt

SEQ ID NO: 885586 - DNA, 646 bp, Homo sapiens
tggggcactgcctagtggagctgtgagaagaagcccaccatctgtcagaccccagaatggtagatccgcttgcaccatgcacctagaaaagccacagacactcaatgccagcctgtgaaagcagacaggagggaggctgtaccatgcaaagccacaaggctggagctgcccaagaccatgggaacccacctcttgcatcagcatgacctggatgtgagacgtggagtcaaaggtgatcattttggagctttcaattagactgtcccactggatttctgacttgcatgggccctgtaacccctttattttggccaatttctcccatttggaatggctgtatttacccaatacccatacccctattgtatctaggaagtaactagctttcttttgacttcacaggctcataggtggaagggacttgccttgtcttagataagactttggactgtggacttttaggttaatgctgaaatkagttaagactttgggggaatgttgggaaggcatgattggttttaaaatgtgaggacatgagatttggtggggccaggggtggaaatacattgtttggctgtgtccacatccaaatctcatcttgaattgtatctcccagaattcccacatgttgtggatgggacctagt

SEQ ID NO: 885587 - DNA, 661 bp, Homo sapiens
gctatatctatgcacagttaagttatggcacttatagttgccatataagtgatgtgttagcaactgctagttctaataatcccctgtatatcctctcctgtaataaaggaactttcattttgagctgaggtcacggtggccaggaagttgcagcaaattgactaagttctgggcaatgagttggaggaaaagtgtgccattttcaggccatagtcttaaaggaagaagtgtagtttttctgctcctctctaaaacctgttgcttggatctcagacattcttggataggaagagaatgagagccacaccctagggatgatggagcagaaagctggcaacggagtcactgaactgaagacaaaataaacgactccttttgtgtaaccccctgttatttggaggtctatgttatgtttctgctaattgatactaattactacaagaaaatagctaattgtgtgaaaacagcatctcctttgctcaagttactggccagttcatttgttctgggagctcctgrgttgagctaaaatccctagtatattaatcccacctgaaaattctggggcttgaagcattagtgttttctgaagatagttggttgtctctaggttattaatttgtaagacattataaatgtagcaagtagtatctgaatagat

SEQ ID NO: 885588 - DNA, 436 bp, Homo sapiens
tcaccttataggaacaaatttccaaactcctattggccatgtggactctgtctgtacctagccttacacttctgctcctcactggccattagaaaagcaaatggagggagatggagaaagatagccaaacaaaagcctctactgatcatcctccttgcagaaccaccaaatgtaacacctatttacacaaaaaagagccyttcataagaagcagaaatcagatgagcaattatagtacctggttttaagttcatattactgaaaaaggcactgaagacagcaggaaagacagtcttgaattgcccatgccaaccctcccctgtcttatggcagctgcagtggggcatggaaacaaaatcttgtatgcataggggagggagagcacagtgattgtgggatgttgcattaaagcttagtcctttccttttacagtgga

SEQ ID NO: 885589 - DNA, 658 bp, Homo sapiens
atacgtggaatttacaaaagggtattatatattttactacttataaatttgtgttatgctttattatattacatttataaactttatatgtaaaatgtataacaagtatgtatatatatgcacacgtacatatacatatctgtacacatacacatgcttttttcctaaaagctttattatgaaacattcactgcacacgtctgcctttggattttcttaccaatcaaaggataaaataactttgctaagggtggaattcatacaaaaatgagatggtgaaaaggaaaaatggacatcaccttagaaaaccatggaatcgttcaagtagcaaatatttataatcagttattgctgcaaaacaaatarcctcaaaatcagaagcttaaaactgagaatattttttattgctctgaatttatggttcagctatgtagtcctgctcatctgaaacaggtttgactgggtttactcatgcattcacaatcaactagctggtctaggatggctttgctcgtatgtctggcaacagtcaggttgttgtctggggtgatagaggtaatcgagccacatgtatccacctgccaacgggatacctcagctcattttcatagttatgggcaagattaacacaaggcctcttggagcctgggcttagaag

SEQ ID NO: 885590 - DNA, 495 bp, Homo sapiens
gtttgttctgttttttttttttttcattgctgtttatggaggaccattgtacaaggaaaattaaagcttaaaaaagacagttctgccaatgttacatgggtggaaactgcactattgattctcatttgcctcatgagtcacccaggatttttccctatttcctgtcaatggaaattgtctggtagggttttaaagaataaactgtgtctcatggtcagggcaggcagaacagcattaatggtgaaaagcgtgtggcttttaggtaractgcctgggtttggagcctggctccacaacttactggttatgtgaccttgtgcaagtttcctaacatttttgcctcaaattccacatctataaatggagatgataatagtacctacttagtagagatgttatgaggattatatggattaatgcatgttaagctcttaaaatagtgtgtagcacatggaaagtgctcaacatgtatttgtcactgtaatcagctcaggt

SEQ ID NO: 885591 - DNA, 663 bp, Homo sapiens
aaagtagagtaaccggtgtagagaagcccttaaatgacccaatggagctgaaagccatggcatgagaactaggggacgaatgcacaagcttcagtagccagttcgatcaactggaagaaagggtatcagtgattgaagatccaatgaatgaaatgaagtcagaagagaagtttagagaaaaaagagtaaaaagaaatgaacaaagcctccaagaaatatgggactatgtgaaaagaccaaatctacgtctgattggtgtacctgaaagtgatggggagaatggaaccaagttggaaaacactctgcaggatattatccrggagaagttccacaacctaggaaggcaggccaacattcaaattcaggaaatacagagaacaccacaaagatactcctcgagaagagcaactccaagacacataatagtcacattcaccaaagttgaaatgaaggaaaaaatgttaagggcagccacagagaaaggtctggttacccacaaagggaagcccatcagactaacagctgatctcttggcagaaactctacaagccagaagagagtgggggccaatattcaacattcttcaagaaaagaattttcaacctagaatttcatacccagccaaactaagcttcataagtgaaggagaaataaaatccttta

SEQ ID NO: 885592 - DNA, 436 bp, Homo sapiens
cattaaggtttacattctctgtagaaacctgtcccaggaattcgttgatgtttgcagcatccgattactctatagccagagaaggccaagagtagaaccttctatttttcttgttgacctttgaaaagtatcatcctgtgacttcctctgtaaagcccatgaccttcaagcatctaaatcttcaacttttccaaaaattatgctgcttttttcccaatgttttctttaacagatattagaatggcatcagtgtttgctttcactaagaggaagcggagtcctgggagaaagagccrcagcctgtgattgcacagccttcccttgatggtacctttaccctggcatgtgagctatcagccgactggggatgctttcaaatgagacaggaaacagtttagggtaagaaatgcttttaaaaaatcattctcacgccaga

SEQ ID NO: 885593 - DNA, 626 bp, Homo sapiens
caaagtggtgaaggtgaataaagctggagaacagataggatgttgtttgaatccttcccttaagaatgtcctttgtcactgaaatagcatgtgtcttgagacctggtctcaatgaaagtcaccagggaatagttaaacagcaaaatgctaggtagctgtattctaggggaaaatgaaaagggaggtaaaggtaactgaaacaggaaatattatagaagttataatttctacacaacatggaattctttagattcaattaagaagtcctctgctgctttataaagcaccagaagtttcakcactggtgggtggaggtaagataaatgctccaaattgaggagaaagcaccgtagtcttcggaggcaaatattccaggaaacaaatctcctgaaatgcgtgggtaagatgtgacctttgggcagctatgcccaggaaggctgacaattctctgaatacagagaagaaaccatccaggcagatgaatatggagtgggacttagcggtgtgaggcagagctaggcaggaagaaatggaacgcccagtccagcctgggtcagaaatcactcagaagacacccacgctgcaagttgcatcaagcctctggtgaatgggcatttgacatttat

SEQ ID NO: 885594 - DNA, 557 bp, Homo sapiens
ggcttcatgagagaaagatcttcaccagtgggcctagatagtgattctgggggtctttaaagcttttctatgtgtgtgcctattccacttttcttgttcattcttatgggggaatcttaagagattgtgttccttttctcattcccataaagccaggcctcacaaagttgtgagtctgctatttattttctctagggcagtaccctgaagtgttcttcagggaacaaaactgcgttccttctcctaaaccagcagatttgagctggatgctaagagccacacctctgttgatacccagcakgctgtctgtgggagcttacatggggtgttcacagagcacatggggtgctgtgcacaggggactgccactttatggagtccatgagctggttaacaggatctgtggccagctgttgagaaatgtaccggttgctatatgctgctccctgccaccttgtttctagctgcccccagacgattcagccatgccagtcccctcagtgttctgggtggaggagacagaaatgagcatgctgggtgcatcctgcaaggcttgg

SEQ ID NO: 885595 - DNA, 611 bp, Homo sapiens
aacactggcatctctttaactagtaattattgtgttttattgttgtggacctataatgcattaacaaggcaggactcagctttattagaatgcacgtggctcctcaattccatgcatatttattaggcgagagaatgggattcttcttctctagccttcactaatttaaaagaagatatcctcaatgaaatgtattcaaatattttgacattttgcttcacctctcttacagagcagaaattgtttctgacagttattatacagtgctggaatcctgctgcttccactgttgaagaacaggttgaaaagacacagcgcttgcattttgttcaaagagtaattctgtggcttagaaatagcagcactgtcagctgtgattcactgagagtttagataatatccagtctgtagtcactgctaacatgggcttctgggcttggagtggaaggaaatgaawggaagttggtgccctgaggttacccaggaggataagtacaaaatatgttgcccgtatttggccactgaaaattttggtagaaatctctctcctctttctccacatcttgagtctcccattataacagccttaaatttcaaatgcacttatttac

SEQ ID NO: 885596 - DNA, 600 bp, Homo sapiens
cattatttattcagtttatctaccattccacaatcaactcaaagttgtatctagaagcagagcaatcacttagggttaaaactgaccagctgtgctttcagagaggccaagagggctcagccaatcacagtataggtatagagatgtagttgactctattgggcataagttaaagcaaatagacagccwacacgggtagtgaacctgtacttgcaggttaacaaatatctcacagattgaggacacactgatattaaaaagggaaacacacagtgtagtggctctccctgcagcagactgaagcatctagaaatctggctggtgcagatatgccatctgggggactgaggatattttggatttggcatctagattggttgaggctgaggcagctcagctaaggagtcagcaaagaaccctgagaagggctttagtggcagaaaaagatcctgcagcaggtcagagaatttgtttgctggtgatgtctccagggacctgtgagtaaatctggagggcactgaggggtgacaaggcccattattcactggaatgagacatggccaattcagccctcatcaggggtctctgccaggtgatgag

SEQ ID NO: 885597 - DNA, 667 bp, Homo sapiens
agagtatggacagaccacctcgatccagtctaagtggagtttcaagccttgttagagctgtatttctggtttagtcttgcttttagggtgtatttactcttggggtctagccctgattgcagtctcaactgagagcctggattgtttaccagtctccctcmatctggtgggttctgaaccctaagatttgtttccctagacccaggagattacccacatctctgctcagctctttagcttcccagatgctgctttttgactaggtctcggaatctctccttacatcttcataacgtagaattcagcaaatacctcaaggagaaaaacgcatgaggaatttccagatcatttctctgtggttgcctcttctctggcttctcaaatcttagctaccttggcaactgtaaaccacaactttgatgttttaagcccagtgaaactgcagaaagcttcggggtcaccacattctgtatagcctcttttctccatttcttggaccagcaaatgcttaaaggtaaaaagtggatgcaagactgaggctcattgagtatgccttccttctctcttggatcttgatcctgcaaatcctggcttccttggtggctctctgaagcattcaatactctgcattttttttctttttctatccagttgttcaggcctcaga

SEQ ID NO: 885598 - DNA, 517 bp, Homo sapiens
tggtataatagccaaatacagaggagttatttggtccagaccaggactcaaactttagagactgcaaaggaatctttctcaagtttcagtcactgaagaggaaactgtggttgggttccaccatccactccaccattagcaaatgtgtagcagctctgtggttttgagggcttagctaaaactccaagggaaggttcttagactcataaggcaagtgtgggattgtggtaattttctgacctctcttgccagtaactggtttaaaatccaggcttgggcaatcagcacaaggcctttgtctgatggcaggaaatgaattgttcaggaaccaactcttccacaacaacmcttgagcccgtctactacatcacccttgctcattcaagttcagccacactggcctcctggttgtttcttgaatatagcctgaagatctttgcattattgactgtttcctctgcctgtagttatcctcccctctcactgcaatcctaaccccttcacctccttcaagtct

SEQ ID NO: 885599 - DNA, 520 bp, Homo sapiens
caccgtgggcccacatcctggattgtgaacctgacaagacataaactgtttctgagccagagatccaggcactgcaccttcctgctgtggtgtagagcccgtgtgcgtagatggtgattcttagctcagagaacaatggraaggagaatgcagtggcaggagccctggatcaggcaggcagagagggccagagaggggacagctctcggaggtgctgtggacccggagctcatcccccatctgggaactagtgtttgtgatattaccttttggtttattctgaaaacacacaatcaaaagtgaacctcaaactatctaaactaggaaaacctactgagggtcttgcagaaacttctacacattgacagtggcagggtgtgataaccttcagccaagacagagcaagaaggactggatttgccttcctcccaaaagcaactaacagaccagacagaccaaatgtagaaaatgatggttttagacatcgtagaccagggagtgaagcgatcttggagggtta

SEQ ID NO: 885600 - DNA, 723 bp, Homo sapiens
tgctgctggattcagtttgctagtattttgctgaggattttcacatctatgttcatcagggatattggcccaaagttttcttttgtattgtatttctgccaggttttggtattagaatgatgctggcttcatagaatgagatcagaaggagtccttcctgcttgattttttggaataatttcagtagcattggtactagctcttcttacatgcctggtagaattttgctgygaatccatctggtccagggcttttgttggttggtaggtttgtttattactgattcaattttggaactcgttattggtctgttcagggtttcagtttcttgcttcaattttgggaggttgtgtgtttccaggaatgtatcagtttcttctaggttttctagtttgtgtgcataaaggtgttcataatagtctcagaggactttttgtatttctgtggggtcagttgtaacgtcacctttgtcatttctgattgtgcttatttggatcttctctcttttttcctttgttaatctagctaatgttctatcaatcttgtttattctttcaaagaactatcttttggtgtcattgaccttttttgtatggaatatcacatctcaatttctttcagttttgctctgatttttattatttcttttttctgataactttgggattggttggcttttgtttttctagttcttccagatgcaatgttaggttgttaatttaa

SEQ ID NO: 885601 - DNA, 601 bp, Homo sapiens
tccagatgagaaagttgaggttttaaagaagacagctgagtcaggttctagtccaaggtctgtctccacctcagtgccacagggaaaaccatgggtttaatctccctgggcctcagtttcctgatttggaaaacataatccccagtgaccttttccatctggattcttgaatgctttttgcatgtatggagactctccatctgctatggaattgagttccaaatccctgccacttataaatatctttggaataccctcaccataataaaaacaattgcgaagtgctattcctttgtcattgaggccatttagttcaacctagtaatagattgatttgggggttttaaaaatgctycacaggaataattctaaagcatgaaaagatgattaaacagcagcctggtgtttgcaggcattgattacctgaactctggcacttgacctgctcaggagggtcaacagagagcaatccttttatgtgtgtgtcacttcccagtcctcgaactccttgcacatgcattatctcacctcatttgcagagctactctgggagctaggtattatgatgatgatccccactttaaaacagaacaggctcttc

SEQ ID NO: 885602 - DNA, 546 bp, Homo sapiens
tgtgtctgaggactagaaagtctctggggccagactataggcggtatgaaagggacagtggtaaggagatgatgctactgctggtaggggccagatcccataggcctcctcctacagcgcctcataggcccagggaagaagtccagattttccaggtgcaacctttttcaggaagattttatagttaaaatgacctagaaaagtaaaggcattaagtayatacatttattaaattagtaaatatgagtctattctgaacattctagtaattggatgaaaaaaaaccccagaacctttataatgttattcatgggatccaaccccactgttttatgctatatgaataatgtcacaaatagcatctgtgaagtcaaacaccacaggacacagtagaaaatccttagggggatcctttatttcattcacttcctccttacaaggtgaaatttcaatctgtacaggttgtgtctgccagttcagtccacagctcagagtatcaccttgtcctcattccatggtataagctgttgcggggggacaggtctg

SEQ ID NO: 885603 - DNA, 528 bp, Homo sapiens
aaggggaaaccccttttgcttggctctcattctctctcttgcctgctgccatgtgagatgtgcctttcgccttccaccatgattgtgaggcctccccagccatgtggaactgtaagcccattaaacctctttttccttataagttacccagtcttgggtatgtctttatcagcagtatgaaaacggactaatacagtttcctatgtatattgtaagctatgctaagggttttttttttttttttttttttkttgttgttgttgttgttgttgttgttttgcttttaccccaaaaccaatgaaaagtcatgagagagttttaaacagaggacataattcacatttgcactcatgccgctgtgtggagagcaggttctagggggcaagagtggatgaagggagacctgttagcagacctttccttcaggaagagaatatggagtatctgccttgggccccacacttgaggtgagaggctgcaaaatgaatatctttttaatgaaccatcattaaaattcaattttgagtg

SEQ ID NO: 885604 - DNA, 661 bp, Homo sapiens
atctttttcaaatttggggagttttggcagctattattttaaacatttttctgttctactctctgctcctttgctacgaagcttatcatgcatacaccagtatgtctgatgttgttgcataggtgtctgaggctctgttcatttttgtccactcccattttttcctgtttctcaggttaagtaataaaaacgacctatctgtaagttcacttactcttttttctgttaactcaaacccacagttaagcccctctagtaaatgttttctctgagttattgtactttcaattacaaattcttatctctcttttataaattatttccctttattgatattatctattgagtgaaacattgtcctcataatttacttctttagacacagttttgtttagttcrtcgaagatatttgaattgtcttatttaaagtcattgcctaataaattcaacatctggattcctcagggacagtttctagttaatgcttttattattgcagagaagcatctttttctgtttctttgcatatctcaagttattgttgaaagatgggcattttaaaaaatattatttggcatgtctggaaatcagattccaactctttcctagagtttgttattattatttgttgttattttcagtggtgctccttgttgagtaa

SEQ ID NO: 885605 - DNA, 584 bp, Homo sapiens
aaaaaaagaggaaagaaagagaaaaaaagagaaaagaaggaaaatctgctatttgcaacaacataaatgaacctgggggacattatgctgagtgaaataagcagatgcagaaagacaaacactgcacagactctctttaggtggaatctcaaatgcatagatggaggcagagatgcaggcgatgcggccaggagcccaggaatggtagcaggcacagagrctgtgagatgtgaggcacagatcctcctggaggctccggaaggagccagcactgccgatgcctggatttcagccccataggactaattttgggtttctctcttccagaactgtaagagaatacattttctgaggttttaagccaccacatctggagtaatttgttgtaacagccagaaactgacctccagggcatcagggcgctgtctggcctctccttcctccttccctcacttctcctgccaaagtcaatgccgtatgtatttgttttgttgttgcttttctgtttttctttatttgcacagcagccctgaacttcaaggtcataatctctataatcagagtaagcacccggatccatcagc

SEQ ID NO: 885606 - DNA, 552 bp, Homo sapiens
acacatattatagacaatattctccaccacatgctcatacattgctacttggtgcagattacttttgtagatagtgaatcttgtctattttatgttggttcttattgatgttactttgagtatactgttattttctaatctcaaagggggactatctcactgttacgatactaaccagtatactttgtcctttttttcattctttcttcttttttggaccaatatactttgtccttttctttttttgagatggagtcacactgtgtcatccaggctggatgcagtaagccatctcagcttactgcaacttctacctcctgggttcaagtgattctcctgcctctgyctcgcaagtagctgggactacaggtgcacaccaccacgcctggctaatttttgtattttcagtagagacagggtttcaccatgttggccaggctgtttttgaactcctgacctcaggtaatccacccctctcagactcccaaagtgttgggattacagatgtgagccatggaacccagccctctttttctttgataatgaaaactt

SEQ ID NO: 885607 - DNA, 552 bp, Homo sapiens
acacatattatagacaatattctccaccacatgctcatacattgctacttggtgcagattacttttgtagatagtgaatcttgtctattttatgttggttcttattgatgttactttgagtatactgttattttctaatctcaaagggggactatctcactgttacgatactaaccagtatactttgtcctttttttcattctttcttcttttttggaccaatatactttgtccttttctttttttgagatggagtcacactgtgtcatccaggctggatgcagtaagccatctcagcttactgcaacttctacctcctgggttcaagtgattctcctgcctctgtctsgcaagtagctgggactacaggtgcacaccaccacgcctggctaatttttgtattttcagtagagacagggtttcaccatgttggccaggctgtttttgaactcctgacctcaggtaatccacccctctcagactcccaaagtgttgggattacagatgtgagccatggaacccagccctctttttctttgataatgaaaactt

SEQ ID NO: 885608 - DNA, 668 bp, Homo sapiens
cacagcaatacacttcaattcatctggggaatctagaattaagtgtcgaagaaaatcacttaattaaattttaatttgaaaatactcacttcaggtgtaagcatttccatttataactacattatggtcttaacatgtggcaacataaagacattaaaattactatttcagcartacagaactatctaccttaaaatatgactctgtgcctaataaaatttcataggtgacacaatgtcttttctcaaagtaaatcatctctcacctctatcttttatttcctagaaatgaggcatgtttctaagccgatatagtaaacacatttttcctttttttattaaaacagctttgttgaaatataatttacatactatagaatgtatctgttttaacttaaagttaaaagatttttagtacatttactgagttgtgcagccatctctacaatccaactttagagcatttccatcactgtaagattcctcatgcccattagcagtcactaccagcttccagccccagccccttgcaaacatgaatctactttttgtccctatacatttatcttttctggatgcttcatgtaaatggaattatacagtatggtaaacacacttgtaatctagatttttatattcaactaagttcaacatgtatccagaaccaaa

SEQ ID NO: 885609 - DNA, 583 bp, Homo sapiens
tcttccttgatacttactactccttctgttttctctctctcatactgaaagagactttcttttaaatgatcacattcattcgttagcttcttacttttctcttctagcacgaggtctttctttccactctcaataaagcctctttggatattagttactrtctctttatgatcctctttctgatgaacgtcatctagttgctgtacaagccacgcattttcacgttggaggtgacatatcctctcttctacacagttccactttccagtggaattattcactttagcttctgcattttgatacatctctttcatttcctgtgtttgctgctgtgtttgggttaggtcgttttgtacagtttctaaagccaatgacttttttctgagactatctcttgtcttacggaacttatcttttaaggtattgaatttaatttgtgtttcagaaagttgttcagtaagaaactcattctcagcttttactttggaaatagcagaactcatttctacttgtacagaaacatctcgtgttctctctaaagcaagttttaggtttctttctgttttcacactttcactgtgtt

SEQ ID NO: 885610 - DNA, 591 bp, Homo sapiens
cccttccaggaacacttggtctaggatccagctctagatctgcaagaagttgtgttccagctcttaaatcattagtaggaccagattttactcaaaaaactattctagcatttgaaattatttccactgctttgttgcttacactgaaatcrtccctcaaaaaatataagaaatagaatatgaaccctgcttattctttaggacaaaatttaggatggtgtatctaataaatggattgtaattatgaagatggttttacatttgtccctagattcttctgttttcctcaggcctctatgaatctttctctctgagagatcccgacttgctgagagcaagaactattgaaaggaaatgaagtaaataactgatggttgcccatggcaattaggaaaataaagagcaaacttccctctttgaatattacttagtgtcaagacttaattatactcattgactatacaagtctaaatatttgggcacttatatttttgtatttgggcatatgatattacaaaataattttgagagctaagagacatacgtatgtattttagaactccaatagcagtaactttctcagtagcatat

SEQ ID NO: 885611 - DNA, 484 bp, Homo sapiens
ttcataatttataaaaattccttgtacattctttgtagattctgacaattccataagtgtcatgaatttcagtagggaagtgacttttcaaagtgagctctggacaggtagccataagtaagactacggtggcacggatatgctgtgctttgatcagttgtgtggtatgcaatttttattataaatatcactgaactccatatgacaaaaattactcatcaacttttctttttttttttttgagacggagtctcgctctgttgcccrggctggagtgcagtggcgcgatctcggctcactgaaacctccgtctcccgggttcacgccattctcctgtctcagcctctccgagtagctgggactacaggggcccgccaccacgcccggctaatttttttgtatttttagtagagacggggtttcaccgtgttagccaggatggtctcgatctcctgacctcgtgatctgcccgcctccgcctccc

SEQ ID NO: 885612 - DNA, 620 bp, Homo sapiens
agattctaatggccctgaaaaatttctatcatccagtgatattgtaagccacctaacattgtagcaaaatgtattgctagtgtttgtggtgatgatggtgtaaacaaatttgcttttctttcagtgatactaaagtacacatgcaattgtgtgcagtacatagtattagataatgataaactctgttactggtttatgtgttttatataytacaatttttatcattagaattaccccttctacttatggaaaaacagttaaatctgtacaatagcctcaagcaaatctttcaggaagtattacagaaagaagcatcattaccataggacataacaactccatgagtgtaattatctctgaagccttttcagtgggacaagatgtggaggttcagacagtaatattgattatcctgacctcatgttgacatagtctaatgtgtttgtttgtcttttttttgttttttgtttatttttacaagaaaggtttacaacataaaagaaaaaaaaagaaataccgaagtggttccccaagacaccaatttaaagtgtatatgtgcagtgcagggttactggaccaaggcacagtgtaaacagcgaaattttattttttgttttctt

SEQ ID NO: 885613 - DNA, 620 bp, Homo sapiens
agattctaatggccctgaaaaatttctatcatccagtgatattgtaagccacctaacattgtagcaaaatgtattgctagtgtttgtggtgatgatggtgtaaacaaatttgcttttctttcagtgatactaaagtacacatgcaattgtgtgcagtacatagtattagataatgataaactctgttactggtttatgtgttttatatactacaatttttatcattagaattaccccttctacttatggaaaaacagttaaatctgtacaatagcctcaagcaaatctttcaggaagtattacagaaagaagcatcattaccataggamataacaactccatgagtgtaattatctctgaagccttttcagtgggacaagatgtggaggttcagacagtaatattgattatcctgacctcatgttgacatagtctaatgtgtttgtttgtcttttttttgttttttgtttatttttacaagaaaggtttacaacataaaagaaaaaaaaagaaataccgaagtggttccccaagacaccaatttaaagtgtatatgtgcagtgcagggttactggaccaaggcacagtgtaaacagcgaaattttattttttgttttctt

SEQ ID NO: 885614 - DNA, 633 bp, Homo sapiens
tggactggtcattacataggtgtaagttttattctctaaaaggggtgagtgagagtttatactaaggttgtaaggatccctcagggcagactctggatgtatattacagaactgctgaacttgtggaatgtgcatgtttaatactgaaaatatttaatgccacatgtgtaagacttttgccaactggaatctgaacatcaacaaytttgaagggcttattctaccttctcagcacaaaaatactttctacgaatgcacatatttatgtgcaaatgtatagaaaattaactttaaagtgtacaacaaatttattttagcaattgggcctgggggacctagaaggagaatgagattggagtggtaggggtggaacattagctaataatgatttattttattaaagtaattactgaaaaacaatgcaataaaatattaacatgttaattgaaggggttgggagtatagtgcttatattcttctttacatgttttaatatctttaaaattcctttttttgcttttgctaaggaagtcacagtttaattggcagtatatctctaatggtacatgaaataatgtctgatttctaaacattgacattctacattagatgaaatatattaactattaagct

SEQ ID NO: 885615 - DNA, 666 bp, Homo sapiens
gcattctcacttggaaaggttatggagtatattgtataattaaatatttgtagaaatgacccctgtcaagccttcctttaaagctatgatgtagttgatcttcagcaaaaatctggaattgaagaggtttgatcctgaaaataatagctgacttcaacatggtcatagtttcttccagtctttcacctagatacattttctcaacaggctgtattttcagactacacctgtcccacctgcggggatgcgcagcgggacaagcgctgctcgcgcctctcaccgcaccgcatccgcctcccgccagccaggaagccactgcggcctgcrgcttcccgccaccaccgcccgctccttcctccggggacacggggagctggctgaaggcgtaaaggagcgagcagaagcctcaggccagacacagcgccaccacgcgcggtagcgccgcatggccccagcggcgttcctcggtctccgtctccgccgcgcccgcctggcgaactggagcacagggaccatagttctggaaatttatcctttttctctccatggattcagcagcagcgtctaaaagaaaaaaattcatcaatcaatcatttatatatgttttaatataaagatataaaacagtggaaccagtggaactggatagaaagtaattcagtttta

SEQ ID NO: 885616 - DNA, 666 bp, Homo sapiens
gcattctcacttggaaaggttatggagtatattgtataattaaatatttgtagaaatgacccctgtcaagccttcctttaaagctatgatgtagttgatcttcagcaaaaatctggaattgaagaggtttgatcctgaaaataatagctgacttcaacatggtcatagtttcttccagtctttcacctagatacattttctcaacaggctgtattttcagactacacctgtcccacctgcggggatgcgcagcgggacaagcgctgctcgcgcctctcaccgcaccgcatccgcctcccgccagccaggaagccactgcggcctgcggcttcccgccaccaccgcccgctccttcctccggggacayggggagctggctgaaggcgtaaaggagcgagcagaagcctcaggccagacacagcgccaccacgcgcggtagcgccgcatggccccagcggcgttcctcggtctccgtctccgccgcgcccgcctggcgaactggagcacagggaccatagttctggaaatttatcctttttctctccatggattcagcagcagcgtctaaaagaaaaaaattcatcaatcaatcatttatatatgttttaatataaagatataaaacagtggaaccagtggaactggatagaaagtaattcagtttta

SEQ ID NO: 885617 - DNA, 666 bp, Homo sapiens
gcattctcacttggaaaggttatggagtatattgtataattaaatatttgtagaaatgacccctgtcaagccttcctttaaagctatgatgtagttgatcttcagcaaaaatctggaattgaagaggtttgatcctgaaaataatagctgacttcaacatggtcatagtttcttccagtctttcacctagatacattttctcaacaggctgtattttcagactacacctgtcccacctgcggggatgcgcagcgggacaagcgctgctcgcgcctctcaccgcaccgcatccgcctcccgccagccaggaagccactgcggcctgcggcttcccgccaccaccgcccgctccttcctccggggacacggggagctggctgaaggcgtaaaggagcgagcagaagcctcaggccagacacagcgccaccacgcgcggtagcgccgcatggccccagcsgcgttcctcggtctccgtctccgccgcgcccgcctggcgaactggagcacagggaccatagttctggaaatttatcctttttctctccatggattcagcagcagcgtctaaaagaaaaaaattcatcaatcaatcatttatatatgttttaatataaagatataaaacagtggaaccagtggaactggatagaaagtaattcagtttta

SEQ ID NO: 885618 - DNA, 649 bp, Homo sapiens
agaattcattatcagcgaattagtgtaacgaggctgttttgttagaggctgtggttgctttcaaaaattagaataggaacaacgacttgtaaaaattcaacacttttatttttgagacagtctcactgtgttgtccaggctggagtgcagtggcttgatctcagctcactgcaacctccccctccaggrttcaagacattctcctgcctcagcctcccgagtagctgggattacagatttgtgccaccatacctggctaatttttgtatttttagtagagaaggggtttcaccatgttggccaggctggtcttgaactgccaacctcaggcgatcctcccccctcagcctcccaaagtgctgggagtacaggcgtgatttaacattttaacattttaaactaccacttactacattcactgtgtctgtgatttaatatacctttttcagtggccacaaaattataaaatggatacagaatagtctcttcaaaaaattaaggaagttctttcttttttctttttcttttttttttttttttggtttgagatggagtcttgctctgtcgcccaggctagagtgcagtggcacaatcttggctcactgcaacctccgcctcccgggtttaaggaattctctgcttcagcctc

SEQ ID NO: 885619 - DNA, 610 bp, Homo sapiens
tttgttagaggctgtggttgctttcaaaaattagaataggaacaacgacttgtaaaaattcaacacttttatttttgagacagtctcactgtgttgtccaggctggagtgcagtggcttgatctcagctcactgcaacctccccctccagggttcaagmcattctcctgcctcagcctcccgagtagctgggattacagatttgtgccaccatacctggctaatttttgtatttttagtagagaaggggtttcaccatgttggccaggctggtcttgaactgccaacctcaggcgatcctcccccctcagcctcccaaagtgctgggagtacaggcgtgatttaacattttaacattttaaactaccacttactacattcactgtgtctgtgatttaatatacctttttcagtggccacaaaattataaaatggatacagaatagtctcttcaaaaaattaaggaagttctttcttttttctttttcttttttttttttttttggtttgagatggagtcttgctctgtcgcccaggctagagtgcagtggcacaatcttggctcactgcaacctccgcctcccgggtttaaggaattctctgcttcagcc

SEQ ID NO: 885620 - DNA, 610 bp, Homo sapiens
tttgttagaggctgtggttgctttcaaaaattagaataggaacaacgacttgtaaaaattcaacacttttatttttgagacagtctcactgtgttgtccaggctggagtgcagtggcttgatctcagctcactgcaacctccccctccagggttcaagacattctcctgcctcagcctcccgagtagctgggattacagatttgtgccaccatacctggctaatttttgtatttttagtagagaaggggtttcaccatgttggccaggctggtcttgaactgccaacctcaggcgatcctcccccctcagcctcccaaagtgctgggagtacaggcgtgatttaacattttaacattttaaactaccacttactayattcactgtgtctgtgatttaatatacctttttcagtggccacaaaattataaaatggatacagaatagtctcttcaaaaaattaaggaagttctttcttttttctttttcttttttttttttttttggtttgagatggagtcttgctctgtcgcccaggctagagtgcagtggcacaatcttggctcactgcaacctccgcctcccgggtttaaggaattctctgcttcagcc

SEQ ID NO: 885621 - DNA, 718 bp, Homo sapiens
aagaatttctatgctttccaatgaaccaggagttacaaggtcctgaaaaccacaagtgtgttacatcctttaatagaaaaagcaaagctgatattaatgtgaatatactttatatttacttctattcgtgttaatttttctttgcctgtaatatacatttttatataatggggaataagaaacatcttaggaaaaagaaaacaaaaaataaaatttcgctgtttacactgtgccttggtccagtaaccctgcactrcacatatacactttaaattggtgtcttggggaaccacctcggtatttcattttaatagcgcatcctggagaatatatttgagtggatcacatattacaactgatttaaattttgacccatatagaaatgttttcaaaaatatgtctgaagcctggatactgtaaaaatgtttatcatcatagaataataaaaggctagccattagttactcagaaattgttcagtaaatctaagatgacttagacataaatagttatgagtgaatatagttcatcattaatgtttgtaaaaattaatgctgtcttttatggttgagaaaaactagaaatgtaacttaatttgatagagataaatgacataaactttacataaagcaagagaataatagatgtgtaaaaatgttttgtagataagattttaagatgaaattgtgctgaacgacatgaatcaaatgtgttttgc

SEQ ID NO: 885622 - DNA, 640 bp, Homo sapiens
aagcctacaatgtgcagacagctggaacattgggagtaagcaaaataatctacagggaactgcaagagggactgaaaaccagaaagatcacgtgttctcctcgcacttacttatttccacttaagagacagggtctcattctgtcacccaggctatggtgcagtggaataatcattgctcactgcagcctcaaactcctccctcaggtgatcctcctgcttcagcctctccagtacatggaactacaggtgcatgacatcatgcttggctaatttttaatttttttgtgtgtggacacaaaaaccgactaggttkcccaggctggtctagaactcttggcctcaagtgttcttcctgccttgacccccaccctctccaaccaagcactgggattacaggtgtgagtcatcacatctggcctcccctagcatttagatattaaactgttggaaaaatgagtaaaaaataaatataagtagcattttgagtattttcttcccatacacccatggattgtttagtgtatcttactacttcacataggagaccattcctgcatcaaactatataaactaagtatttaaatttgattttttccctacaataagctctatgctaaagctcattacatttgattttg

SEQ ID NO: 885623 - DNA, 610 bp, Homo sapiens
ttctttactcttaaagaattcttacaagataagaaggttgttttctgagtgtgtgtatgtgtatatacgtgagtgtatacattttgcttaaagagtattgtgctataaatctaattttatttctaattttttcacagagcataacatccttcatacattcccacattgctgtaggttatttttggttgtttattcccctgtagctgctgcatrgttttcaataaaatgaatcaaccacattttccctatccagtcttgcagtagaattcacactgatatcctgctactgaaatattcacttccttatggtatccttatgaaaacactttttggtcatgtgttacaatttgtcaggggctgtgttagtctctttatattgctatgaagacatacccaatgctgggtaatttatttatttattttttaataaaagaggtttatcttggttcggggttctgcagactgcacaggaagcaatgctatctgctctgggtgaggcctcaagaagcttacaatcatggcagaaggtgaaggggagccagtgtgtcacatggtcagagagggagtaagagagagaagggggcagtcccaggctgtttctaacaatcag

SEQ ID NO: 885624 - DNA, 610 bp, Homo sapiens
ttctttactcttaaagaattcttacaagataagaaggttgttttctgagtgtgtgtatgtgtatatacgtgagtgtatacattttgcttaaagagtattgtgctataaatctaattttatttctaattttttcacagagcataacatccttcatacattcccacattgctgtaggttatttttggttgtttattcccctgtagctgctgcatggttttcaataaaatgaatcaaccacattttccctatccagtcttgcagtagaattcacactgatatcctgctactgaaatattcacttccttatggtatccttatgaaaacactttttggtcatgtgtyacaatttgtcaggggctgtgttagtctctttatattgctatgaagacatacccaatgctgggtaatttatttatttattttttaataaaagaggtttatcttggttcggggttctgcagactgcacaggaagcaatgctatctgctctgggtgaggcctcaagaagcttacaatcatggcagaaggtgaaggggagccagtgtgtcacatggtcagagagggagtaagagagagaagggggcagtcccaggctgtttctaacaatcag

SEQ ID NO: 885625 - DNA, 430 bp, Homo sapiens
ctcactgagaagaactcactcaagtggattgtgctaaaccaagcttgtccaacccacagcttgtgggctgaatgcaggtcagaacagctttgaatgtggcccaaatttgtcaactttgttaaaacaaaagagagtttgtgtatgtgtgtgagtgtgtgtgtgtgtgtgtgtggtttwtttttatttttatttatttatgtatttatttattttagctcatcagctatttttagtgtattttatgtgtggctcaagaaaattcttcttccaatgctgtccagggaagccaaaaggttggacattcctgtgctaagctattcataaggcatccaccccatgatccaatacctctcactgggccccacctccaacattggggatcatattttagcatgagatttggaggggacacacatccaaactatatcag

SEQ ID NO: 885626 - DNA, 580 bp, Homo sapiens
attcttatattttctaagcaagtggtgaaaatacagatctcattttatttgtgtacatttgcatttgtcagattgttaacaatgtattgaattttttggcccatttttctattgagtttactatcttctttgttcatctgartatcaatcatattcactttgccctaagcagtgtcaacattttctattactctgtcatacatctgataactttgtatgccaacctttactgaaataagcctttatgatttttatacttctagagtttatatatttaattaaatttattggtttagtatatattttattaaactgtaacaacagtcccaaatctatgttttgctgggttcattcagatttagaactcagataactttttggaggataaattctttttatcataatgaagaatggctatcataatgcaatatgattacttctgccaatgcttattgttttatagtctactttgtttctgtggtcaggaggacaagacctgaatggccttgaccaactcagctttctgtacctcctagttctcagaataactttagaatgttccaagaagacaatatcctga

SEQ ID NO: 885627 - DNA, 580 bp, Homo sapiens
attcttatattttctaagcaagtggtgaaaatacagatctcattttatttgtgtacatttgcatttgtcagattgttaacaatgtattgaattttttggcccatttttctattgagtttactatcttctttgttcatctgagtatcaatcatattcactttgccctaagcagtgtcaacattttctattactctgtcatacatctgataactttgtatgccaacctttactgaaatragcctttatgatttttatacttctagagtttatatatttaattaaatttattggtttagtatatattttattaaactgtaacaacagtcccaaatctatgttttgctgggttcattcagatttagaactcagataactttttggaggataaattctttttatcataatgaagaatggctatcataatgcaatatgattacttctgccaatgcttattgttttatagtctactttgtttctgtggtcaggaggacaagacctgaatggccttgaccaactcagctttctgtacctcctagttctcagaataactttagaatgttccaagaagacaatatcctga

SEQ ID NO: 885628 - DNA, 600 bp, Homo sapiens
gtagagtatgcatactttcaaatgggtcctgtcatgttattttctgaaatggttaaaaccatttaatttcccatccattgcccataaaggttgttttcctcatatcctcatcactcaatgttatctaggattcttatattttctaagcaagtggtgaaaatacagatctcattttatttgtgtacatttgcatttgtcagattgttaacaatgtattgaattttttggcccatttttctattgagtttactatcttctttgttcatctgagtatcaatcatattcactttgccctaagcagtgtcaacattttctattactctgtcatacatctgataactttgtatgccaacctttactgaaataagcctttatgatttttatacwtctagagtttatatatttaattaaatttattggtttagtatatattttattaaactgtaacaacagtcccaaatctatgttttgctgggttcattcagatttagaactcagataactttttggaggataaattctttttatcataatgaagaatggctatcataatgcaatatgattacttctgccaatgcttattgttttatagtctacttt

SEQ ID NO: 885629 - DNA, 580 bp, Homo sapiens
attcttatattttctaagcaagtggtgaaaatacagatctcattttatttgtgtacatttgcatttgtcagattgttaacaatgtattgaattttttggcccatttttctattgagtttactatcttctttgttcatctgagtatcaatcatattcactttgccctaagcagtgtcaacattttctattactctgtcatacatctgataactttgtatgccaacctttactgaaataagcctttatgatttttatacttctagagtttatrtatttaattaaatttattggtttagtatatattttattaaactgtaacaacagtcccaaatctatgttttgctgggttcattcagatttagaactcagataactttttggaggataaattctttttatcataatgaagaatggctatcataatgcaatatgattacttctgccaatgcttattgttttatagtctactttgtttctgtggtcaggaggacaagacctgaatggccttgaccaactcagctttctgtacctcctagttctcagaataactttagaatgttccaagaagacaatatcctga

SEQ ID NO: 885630 - DNA, 608 bp, Homo sapiens
agtggcagggaaatcatcattaatttttcaccttactgaacatgtgaggaggacatactggaagggagctcaatgagttaacatgcatgagaacatctttcctgaactctcctatcttacaggagtgtgaaaagaaaccctctgaaggtaaagtctatggaaagcctttcatcttcattcatcgtgagtagatatttgttctcacactggagagaagctatgaaagtaaggaatatgaaaaaagcctcagtgttgtctcagactcatagttcatacaagaactcacacagcagagactgcttatggaagtaaaaaatgcagaaaatacctctttaaacactatccctcctttatayatgattccacaccctggagggagactacaattgaataaatataagaaagctttcagttccagctcttcacttattgggcatgaaagagcacagggtaggactgaagcacagtaaacgttaacaattattgactttatcattgtcttatccctcaattagaactcaaattcataattttgtagtttttcctttcttaaaaaatggtacaagatgacagatatctgtcttagcaacctttccgctctgccacct

SEQ ID NO: 885631 - DNA, 717 bp, Homo sapiens
ttgtctgtttactctgctgacaatttcttttgcagtgcagaaactctttagtttcattagatcccatttgtcagtttttgcttttgttgcgattgcttttagcacgttcatcatggaatctttgccagtttctatatccagaatggcatttcctaggatatcttccagagtttttatagttttgggtttcacatttaagcatttaattcatgatgagttgatttttatatatggtataaagaaggagtccagtttcaatcttcttgcatatgactaatcagatatcccatcamcacttattgaatgggaacttctttctttattgcttgtttttgttggttttgttgaaaattagatggctgtagatgtgtggcattatttctgggctctctattctgttccattgttctatgtgtctgtttttgtactagtgttatgctacttgggttactgtggccctgtagaagagtttgaagtcatataatgtgatggcttcagttttgttctttttgcttaagattgccttggctatccagggtcttttttgagggctaggtgaattttaaaaatagtttttttctagttctgtgaagaatgttgttggtagttctatagcaatagcattgaatctgtaaattgctttgggcagtgtggtcatttgaatgcctaaatttattgaaggttatttaacatgtagcagtgttgaatgcatctatt

SEQ ID NO: 885632 - DNA, 650 bp, Homo sapiens
aattattgactttatcattgtcttatccctcaattagaactcaaattcataattttgtagtttttcctttcttaaaaaatggtacaagatgacagatatctgtcttagcaacctttccgctctgccaccttaatgttgctatgtagtagttttgttacaattcatttacatacacatggtttcattttcagtgggaagcccttctgagctccattcaatttagatttagaattcgtatgctccatgataccttttttgtcagtttgttttttgttggtcacaatttgactgcattatggtcacattatgtggttttaatggtactgatttggggtacctgttatgactttcattttggtctaatgtggccaatgctgtccatttccctgctatatccattattctcatcttcttcactaagggaacatagattcactttttccaaggagcactgtttaaatgtcttyatttatttatttatgcatattttattattttataattttttttttgaaaaatggtctcactctgtctcccaggctggagtgcagtggcatgatcagagctcactgcagccttgaactcctgggctcatgtgatctcccagctcagactcctaagtaggtaggactgcaggcataacaggtgtg

SEQ ID NO: 885633 - DNA, 486 bp, Homo sapiens
ggaacatagattcactttttccaaggagcactgtttaaatgtcttcatttatttatttatgcatattttattattttataattttttttttgaaaaatggtctcactctgtctcccaggctggagtgcagtggcatgatcagagctcactgcagccttgaactcctgggctcatgtgatctcccagctcagactcctaagtaggtaggactgcaggcataacaggtgtgcaccgccacacccagcttttgttttgttttgtttttgtagagactgggtctcgttatgttgcctggactggtttcaaattcctgtgctcaagtgattctcccaccttggcctcccaaatwgctggaattacaggcatgagccaccatgcctggccctggttaacatctttaaatgagtttcccagtttttctcgtaactgtagtgagcgaatcttatagtcctggccaatgtgaaatgcagaattcactgctttgga

SEQ ID NO: 885634 - DNA, 624 bp, Homo sapiens
atgtttttttctttttttttagatggagtcttgctctctcgcccaggctggagtgcagtcgcgccatctcggctcactgcaagttccacctcccgggttcatgccagtctcctgcctcagcctcccaagtagctgggactataggcgccaaccatcatgcccagctaattttttgtgtttttattagagacggggtttcaccaagttagccaggatggtctggatctcctgacctcgtgatctgcccgcctcggcctcccaaagtgctgggattacaggcataagccactgcgcctggctacaaattatgttcttaaaagaagctgctcagtgccatgcctaacacaagatggaactccacgatgagatatgtgtgaagacarggtgccatggttacaaacaaggactccaggtgcagactgtttggttcaaacctggaccagcggtatgaatttttgcaactctctgtattgctctttgcctcagttctttcatataacaactagaagtaaaaacaaggttattgtgaaaattaaatgaattaaagtaagtggagtgcctacaacacccccaggcacacggtcagcactgagcatgtttttcattactactcttaatgaggta

SEQ ID NO: 885635 - DNA, 675 bp, Homo sapiens
tcaaggagccaaaagaaaaatgtgtgtcttagtctgaatttcctggaagtagatcctgaggcaaagattcaaatacaaaaattttgtttggagataacgctaggatattaattcaactgccagttcttccttagggtgctaatcccaggaaacatcagtggaggagtggggaactgagacaggaaaggaatgcagcagttaaacggaccttcatcaagaaagtttccactgtggcagccaggactcagccctgccaggtacctctgagagacagcacagaacatgtgcttcagagtcatcatacccagagcaagggaccaggggtatttatccaccaatacccaccagtcactcctcagggatcctcccaagggcatgattcctccagaatgtcctgcctgcrctgcaagggtcagacctggggttgagggcaggacccctgacagcgcttccagcaatgagcagaaccacagcctgatgtgtacagtttcagtcacccagtaactccaacacacacacacacacacacattcacacaccacactccaacaccaacaaagtatatacgtacatacacatacatgcatacatgactgttacccacttagatcctagtgactccatgggatagacgataaggtgggaatcagaggaaagagcaaaattaaggcgagt

SEQ ID NO: 885636 - DNA, 607 bp, Homo sapiens
gcactgttgtctgagagtgtcgtttgtatgatttcagtgtttttttttaaatttgctgaagattggtttatgtctgattgtgtgttccattttacagtatgtgtcatgtggtaatgagaagaaagtatattttgtcatttttggatagagcgttctgtagaagtctattaggtccatttgatcaagtattgagttcaagttctgaatatcttcattaattttcttccttaatgatctgtctaatactgttagtagggtgttgaagtcttccactattattttgtagaaatctaagtctctttgtaggtctctaagaacttgttttacaaatctatgtgctcctgtgttgggtgcacgtatatttaggataattaggtctttttgtttaattcaaccttttaccattatgtaatgaccttccttgtgtttgttgagttttgttggttcaaagtstgttttgtctgaaattaggattgccacctctgcttttttatgttctcctttcgcatggtagattttttttccatccattcattttgagcctatgggtgtcattgcatgtaggatggggctcttaaattcagtataccattgggtctttttcttt

SEQ ID NO: 885637 - DNA, 627 bp, Homo sapiens
ttatcatggagctggactgggcctgggtgagagggcctgatggggttgtcctgggtaatcacgggggtgatcagaaaagatgcagaatggaattgctgcgaggatgaacgagatgactgtcagcacagaataggcatccggtgagtgttcagggattaccctcagtagctgctcagaggccaaaaccacccaactgatagcgactgtccscaagctaggaggaagagaagagagcaggtcccactcacctgagtctgatcagtcagctgtgttgagatgtgcctctcacctagaaaacggtccttcacgcagagccactcagacaccacagtgtgtctctaactgctccacaacacagaggcgatgggggctcagcaacagtgacattgtggggtgacacaacccaccacaatgggagcctgcatgggtcaacagggcccagagtcagtgtcctctatcccctgaactgacatgtgtggatgcagtgtgtttgtgcatgcgtgtgtgtgtgcacatatgtgtgtgtgtgtttctcttgcttctctggccaggcctagcttctccactcacaggtgcacccaggtcatcaccgagggctcatggccagcattagagcttctacaggtg

SEQ ID NO: 885638 - DNA, 615 bp, Homo sapiens
cagagagggctggcaccccctctaggtggcacacaggtcatgtgtaaagttgtaggtctgccaagtggtgctggattcaacacatcttctcaccttctctttccagccaccctccaaggtgccctgactcaccttccctgcagatggaggcaaggagactccacagacaaaacccctgcctgaggtcacacagtggccagctggccaggttcctactgaccagccgcccaggaccagtttcccactgatgaggcctctaatgaccactcctccatttaccagttcccactgaccaagtccccactgaccatgtcttcctaaccaggctcacacttaataggcctcataggccagacctcactgaccaatttcccactgacctggtccccactgaccaggttcccactgacaagaccacarttgaccaggtcgctgctcacctgacccccactaaacaattttccatggatcagtccccagctgaccgagccccctctgaccaggccctcactgacgaggctccaagccactaaggccccacactgaccaggcccctagtatactgcataggccccaccaaccagtttttcattgtttatgttccagcccatcagg

SEQ ID NO: 885639 - DNA, 588 bp, Homo sapiens
ctttaggtatacccctagtatagtaatgggattgctgcatccaacggtcatccttagttcttaatttccaaactgctctccatagtagctgaattaatttacattgccacaaacggtgtgtgttcccttttctccactgcttccccaacatcttttttttttttttttacttttcaacaaaagttattctgactggtgtgaaatagtatctcactgatgttttgtttggcacttttctgatgattaacaatggtaagcatttgttaatatgtttgttggccacttacatgtgttattttgagaagtgtctgttcaygtcctttgcccatttttaatggtgttatttattttttgcttgttgatttgtttagatctcctatggattctggataataggtgtttgctgtatccatagtttgtgaatattttcttccattctctacgctgtctgtttaatcctgtgatagtttctcatgctgtgcagaagctctttagcttaattagatcatacttgtcaatttttgttattcttgcaattgcttttgaggactttgccataaattaattgagaagtatgaagtccagaag

SEQ ID NO: 885640 - DNA, 588 bp, Homo sapiens
ctttaggtatacccctagtatagtaatgggattgctgcatccaacggtcatccttagttcttaatttccaaactgctctccatagtagctgaattaatttacattgccacaaacggtgtgtgttcccttttctccactgcttccccaacatcttttttttttttttttacttttcaacaaaagttattctgactggtgtgaaatagtatctcactgatgttttgtttggcacttttctgatgattaacaatggtaagcatttgttaatatgtttgttggccacttacatgtgttattttgagaagtgtctgttcatgtcctttgcccatttttaatggtgttatttattttttgcttgttgatttgyttagatctcctatggattctggataataggtgtttgctgtatccatagtttgtgaatattttcttccattctctacgctgtctgtttaatcctgtgatagtttctcatgctgtgcagaagctctttagcttaattagatcatacttgtcaatttttgttattcttgcaattgcttttgaggactttgccataaattaattgagaagtatgaagtccagaag

SEQ ID NO: 885641 - DNA, 588 bp, Homo sapiens
ctttaggtatacccctagtatagtaatgggattgctgcatccaacggtcatccttagttcttaatttccaaactgctctccatagtagctgaattaatttacattgccacaaacggtgtgtgttcccttttctccactgcttccccaacatcttttttttttttttttacttttcaacaaaagttattctgactggtgtgaaatagtatctcactgatgttttgtttggcacttttctgatgattaacaatggtaagcatttgttaatatgtttgttggccacttacatgtgttattttgagaagtgtctgttcatgtcctttgcccatttttaatggtgttatttattttttgcttgttgatttgtttagatctcytatggattctggataataggtgtttgctgtatccatagtttgtgaatattttcttccattctctacgctgtctgtttaatcctgtgatagtttctcatgctgtgcagaagctctttagcttaattagatcatacttgtcaatttttgttattcttgcaattgcttttgaggactttgccataaattaattgagaagtatgaagtccagaag

SEQ ID NO: 885642 - DNA, 655 bp, Homo sapiens
acaagaattatattagagaaatgaaacccaaaagagaaatggtcatgtaactaaccacagtctaggagttcttgcagttatttgaagtctgtgggcttgaaataggaattcttatgggtgtttggggaatatattttctgttgagtcctatactagtaagattttcaacacaaggtgactctgggtctcgccttgtaggaagagcactgagaaaatatttcatctgctctttctccatgaggagcttcatgctgatcactgctattttcttatttgatctgtaaagatagcaaaracacacgcttagtatttcatttttcctctaatgattcttaatgacttgcagtttttaaaaacttgccctgagagcaaaccaaattatccactaaacagtgttttcacactgaagatgtgtgagagcatatctgttgtaagcaagtataattttaaaatcattctaaagaagcacctgtgtttctaaggtgatttatactgaacaagcagtacaaacaaagtagacagggaagagaaatggctatcagtgatatatggctcgacaggtaacacttgctgccttctaaaagggctctacttgtgagattctgaagattccattagaaatactcatatttaaagggtaacaatgtgagaaaag

SEQ ID NO: 885643 - DNA, 655 bp, Homo sapiens
acaagaattatattagagaaatgaaacccaaaagagaaatggtcatgtaactaaccacagtctaggagttcttgcagttatttgaagtctgtgggcttgaaataggaattcttatgggtgtttggggaatatattttctgttgagtcctatactagtaagattttcaacacaaggtgactctgggtctcgccttgtaggaagagcactgagaaaatatttcatctgctctttctccatgaggagcttcatgctgatcactgctattttcttatttgatctgtaaagatagcaaaaacacacgcttagtatttcatttttcctctaatgattcttaatgacttgcagtttttaaaaacttgccctgagagcaaaccaaattatccactaaacagtgttttcacactgaagatgtgtgagagcatayctgttgtaagcaagtataattttaaaatcattctaaagaagcacctgtgtttctaaggtgatttatactgaacaagcagtacaaacaaagtagacagggaagagaaatggctatcagtgatatatggctcgacaggtaacacttgctgccttctaaaagggctctacttgtgagattctgaagattccattagaaatactcatatttaaagggtaacaatgtgagaaaag

SEQ ID NO: 885644 - DNA, 679 bp, Homo sapiens
aatatgttagtaaaagaggctgaagcttaaaatatttatcagcaagatcaaaactaataactgaattcagaattgtctgatttataaaaatttgaaatcataattatgttagtattaatgtaatctggtcatataaaaagtaataraatccattcataattttaaaaagtgattaatgagcaatgtagcttaagaccaattcaaaagtatcacataattttgaaatcacaattgtttcttatgccaactgatcttaatcatcaaatgactccacagtgagaatcattactctgaaagattgattttgttataataataatggaaatgtaaatatttaaaagaaaaaacagatgccattttttttctagaactctacaaagcaaattgctacaagagaggcagaggaaacataatatatacatatccaaaatataatttgcggtgaaataaatgaaagcacattacagataaacttacctgatttaaaaaactaacctgtaaatggatttcttctaatttttctactgcctgcattgccttttcatctagctccaatttatattcttgtagtttactaagttctaccctattgttttccatatgtgtcttaagatttaatatttcttctttcaacatctttttatcctcctcaagtttttcacattgctgttgtactttt

SEQ ID NO: 885645 - DNA, 679 bp, Homo sapiens
aatatgttagtaaaagaggctgaagcttaaaatatttatcagcaagatcaaaactaataactgaattcagaattgtctgatttataaaaatttgaaatcataattatgttagtattaatgtaatctggtcatataaaaagtaataaaatccattcataattttaaaaagtgattaatgarcaatgtagcttaagaccaattcaaaagtatcacataattttgaaatcacaattgtttcttatgccaactgatcttaatcatcaaatgactccacagtgagaatcattactctgaaagattgattttgttataataataatggaaatgtaaatatttaaaagaaaaaacagatgccattttttttctagaactctacaaagcaaattgctacaagagaggcagaggaaacataatatatacatatccaaaatataatttgcggtgaaataaatgaaagcacattacagataaacttacctgatttaaaaaactaacctgtaaatggatttcttctaatttttctactgcctgcattgccttttcatctagctccaatttatattcttgtagtttactaagttctaccctattgttttccatatgtgtcttaagatttaatatttcttctttcaacatctttttatcctcctcaagtttttcacattgctgttgtactttt

SEQ ID NO: 885646 - DNA, 669 bp, Homo sapiens
tccctatctcagactgctttccctttgaactcagcccccagattgtgagtgagatcaggccagagagacagcctgggagtgtcagtgtcaatattcacgctgcctgctccaaccaaggttccagccaatggccagcatcaaccatcaaacacatgggtgagcaaagcttcagaggattccatttccccaactgatcagctattcctagggaagctgaggggagcagagatgacctgtcctggctaagcttttttcaaaccayaggtttatgaacaaaataaatgtttttcttttaagccacaaaaccctggataattgttagaaaaataagttttaaaaagagacaacaggaaacataacttatgcagagaaaagagtctcctttaaagtaggatctaataaatgttgagattaatttattgatggcaaacattattgagaagcagtagataaccaggagagagacataagctgctgaggaggaacatttcctaaaacccccttcaattatgaactctgataacaaggcaagggtgtctccttacaatttcccctcaagttaggaaataagactgcaaagaaagaagaagtatgatttgaaaaacaactagaaatacttggttagataaccaaaatcagacatttgcctatttcagttaatgaaaattc

SEQ ID NO: 885647 - DNA, 633 bp, Homo sapiens
gtaaatgtgctagttagctcgatcattacacactatatacatgtatcaaaatatcactctattggccaaaattatgtatatacatgtcaattaaaacaaaagagaagctatatttatcccattaaaaaaacagaatatgggcaatccttactgacttccttctaatgaatagaatgcagtaaaagggatatcatgtggcttccctatctcagactgctttccctttgaactcagcccccagattgtgagtgagatcaggccagagagacagcctgggagtgtcagtgtcaatattcacgctgcctgctccaaccaaggttccagccaatggccagcatcaaccatcaaacacatgggtgagcaaagcttcagaggattccatttccccaactgatcagctattcctagggaagctgaggggagcagagatgacctgtcctggctaagcttttttcaaaccataggttyatgaacaaaataaatgtttttcttttaagccacaaaaccctggataattgttagaaaaataagttttaaaaagagacaacaggaaacataacttatgcagagaaaagagtctcctttaaagtaggatctaataaatgttgagattaatttattgatggcaaacat

SEQ ID NO: 885648 - DNA, 669 bp, Homo sapiens
tccctatctcagactgctttccctttgaactcagcccccagattgtgagtgagatcaggccagagagacagcctgggagtgtcagtgtcaatattcacgctgcctgctccaaccaaggttccagccaatggccagcatcaaccatcaaacacatgggtgagcaaagcttcagaggattccatttccccaactgatcagctattcctagggaagctgaggggagcagagatgacctgtcctggctaagcttttttcaaaccataggtttatgaacaaaataaatgtttttcttttaagccacaaaaccctggataattgttagaaaaataagttttaaaaagagacaacaggaaacataacttatgcagagaaaagagtctcctttaaagtaggatctaataaatgttgagattaatttattgatggcaaacattattgagaagcagtagataaccaggagagagacataagctgctgaggaggaacatttcctaaaacccccttcaattatgaactctsataacaaggcaagggtgtctccttacaatttcccctcaagttaggaaataagactgcaaagaaagaagaagtatgatttgaaaaacaactagaaatacttggttagataaccaaaatcagacatttgcctatttcagttaatgaaaattc

SEQ ID NO: 885649 - DNA, 577 bp, Homo sapiens
aatgaacttcaaaattgaaaactgctgtgcttaagaagacagtatcaagaagtgaaaaggtaagatactgagtagaagaaagtatttgaaaagcatgtatctgataagggacttacatatgtaggatatataaagaacctttgcaattcataaataacaagataacccaatttaaaaaatgggcaaagattttgaatagatatatttgcaaagaagatataaagatggataataagcacattaatagatgcttaatgtaattagtcattaggaaaaagtaaatcaaaaccacgtgtggtatcacttcacaccacaggatgaaacctttattcaataaaaaagagaaaataagtgttaggaaaaatgtaaagaaattaaagcccttatccaatgctgcaggggatgtaaagtggtgcagccactttggaaaacaaactggcagctcctcaaaaggttaagcatgaagttaccayacgacccagaaattccagtcatgagtatatactccagaaaatcaaaaacatatgcaagcacaaaaactcatacataaatgtttacagcagcattattagtaaga

SEQ ID NO: 885650 - DNA, 577 bp, Homo sapiens
aatgaacttcaaaattgaaaactgctgtgcttaagaagacagtatcaagaagtgaaaaggtaagatactgagtagaagaaagtatttgaaaagcatgtatctgataagggacttacatatgtaggatatataaagaacctttgcaattcataaataacaagataacccaatttaaaaaatgggcaaagattttgaatagatatatttgcaaagaagatataaagatggataataagcacattaatagatgcttaatgtaattagtcattaggaaaaagtaaatcaaaaccacgtgtggtatcacttcacaccacaggatgaaacctttattcaataaaaaagagaaaataagtgttaggaaaaatgtaaagaaattaaagcccttatccaatgctgcaggggatgtaaagtggtgcagccactttggaaaacaaactggcagctcctcaaaaggttaagcatgaagttaccacaygacccagaaattccagtcatgagtatatactccagaaaatcaaaaacatatgcaagcacaaaaactcatacataaatgtttacagcagcattattagtaaga

SEQ ID NO: 885651 - DNA, 635 bp, Homo sapiens
actaagcctttagcctggtacaccatatacaaagtatagccctgaaacaaagtacagccgttggatcctgacacaaaccctagctgccatcctcaaaaattctggcttagacacaaaactggctcactctcaccagtatatcccttggtatttgctttctcaagttccttttggagtccacttaaaacctctgcgaccagtttcaaaaactcatctagggagcactttctaggaaaataaactttaattctagttttctgttgtatccacatccatgcaaacatcgattctttcaaaaattatttatagtttaatatcttcatgatttgttcatttattctttggacccaaagaaatgtatctccccgcatttgcctgggagcttctgcaatgaagttaccacaatttaaatcatctctacagtgactttatttaaaatgttgattgaataaatccaaamtcaattaatgtgccagaaaaaaaggaagccaccccactagctaaagagtaaagccctttctgcattcatctttcttactctcacccactctcccaccgcccagccctacgccaggcgagggagcagtgcggtgggcggtaccccaagtccgctgggggcgtggccctggagccat

SEQ ID NO: 885652 - DNA, 523 bp, Homo sapiens
taaaagggacaaacatacagctcaggccattgcttcagaggctgcaagacccaaggcctggcagcttccatgtgttgttgagcgtgtgggtgcacagaagtcaagaattgaggtgtggggacctcctcctagatttcagaggatgtrtggaaacacctggatgtccaggcagaagtttactgcaggggcagagccctcatggagaatctctgctagggcactgcagaagggaaatgtggggttggagccccacaaaagtcttcactgggaccttgcctagtggaactatggaagagggctactgtccttcaaaccccagaatggtaggtccaccgacagcttgcaccatgcacctgaaaagctgcagacactcaacaccagcctgtgaaagcagccaggaggggggctgtatcctgaaaagccacaggggcagagctgcccaaggccatgggagcccacctcttgcatcagcatgacttggatgtgagacttggagtcaaagcagatcattttggaactttaa

SEQ ID NO: 885653 - DNA, 527 bp, Homo sapiens
ttgaggtcagaccacttctctgctcttgaaccctgttttctgttgttatgatgtttatcaagacaatacattcacagctgaacatagaccctcatcagtaattctaattttgccctttgctttgtgatcttgtttttaccctttgccttgtgatctttgctggacccttatcaggagttcctgattttgtccttgccctatttcctcrgaagcatgtgatctttgctctgccttttgccctttgaagcatgtgatctttgtgacctactccctgttcgtacactccctccccttttggaatccctaataaaaacttgctggtgttgcggctcaggtggccatcacagacctaccaatgtgtgatgtcacccctggtggcccagctgtaaaattcctctctctgtactgtttctctttatttctcaggccagctgacacttaggggaaatagaaagaacctatgttgaaatattgggggcaggttcccctatagatggcttgctgtttcccacagctgaactcattgg

SEQ ID NO: 885654 - DNA, 608 bp, Homo sapiens
gtatctatatttttataggaatcttctttaatgaaggttaatcactttggtagtctttgaagaatttaaagacttttccgacttctctctctgttcactaatgtgcaattttgaaagccaaattaatgaaactcttccttgcatagctcatccttatcccataaattcatctagttaawgtaaataggaagataatgactacattcttgtgtcataaccaccacctttgctttaatatataaagatcgatggtgagtcgaagtatgagaacattgaccaaggaggaggctggaaatgaggttgaaattgtgaactaacctgttgtgaccttttttttaaacctttacagtacacatgattttattgtgtctacttctatacttaaaagatattagctttaatttgaaatgattttttaaatgataagactcctttgtcaatcgtcatccttgactgaattccatctgctgttcctaatacgataattcgttggatctaagatgtcaatgattgtgagccttatcattatttcctgaactactaagaaaaaaatctacaaattaaactataaccaacaatgctttcttgtctatgagatgtgttatttt

SEQ ID NO: 885655 - DNA, 608 bp, Homo sapiens
gtatctatatttttataggaatcttctttaatgaaggttaatcactttggtagtctttgaagaatttaaagacttttccgacttctctctctgttcactaatgtgcaattttgaaagccaaattaatgaaactcttccttgcatagctcatccttatcccataaattcatctagttaaagtwaataggaagataatgactacattcttgtgtcataaccaccacctttgctttaatatataaagatcgatggtgagtcgaagtatgagaacattgaccaaggaggaggctggaaatgaggttgaaattgtgaactaacctgttgtgaccttttttttaaacctttacagtacacatgattttattgtgtctacttctatacttaaaagatattagctttaatttgaaatgattttttaaatgataagactcctttgtcaatcgtcatccttgactgaattccatctgctgttcctaatacgataattcgttggatctaagatgtcaatgattgtgagccttatcattatttcctgaactactaagaaaaaaatctacaaattaaactataaccaacaatgctttcttgtctatgagatgtgttatttt

SEQ ID NO: 885656 - DNA, 608 bp, Homo sapiens
gtatctatatttttataggaatcttctttaatgaaggttaatcactttggtagtctttgaagaatttaaagacttttccgacttctctctctgttcactaatgtgcaattttgaaagccaaattaatgaaactcttccttgcatagctcatccttatcccataaattcatctagttaaagtaaataggaagataatgactacattcttgtgtcawaaccaccacctttgctttaatatataaagatcgatggtgagtcgaagtatgagaacattgaccaaggaggaggctggaaatgaggttgaaattgtgaactaacctgttgtgaccttttttttaaacctttacagtacacatgattttattgtgtctacttctatacttaaaagatattagctttaatttgaaatgattttttaaatgataagactcctttgtcaatcgtcatccttgactgaattccatctgctgttcctaatacgataattcgttggatctaagatgtcaatgattgtgagccttatcattatttcctgaactactaagaaaaaaatctacaaattaaactataaccaacaatgctttcttgtctatgagatgtgttatttt

SEQ ID NO: 885657 - DNA, 605 bp, Homo sapiens
cgttgtgtgggaagtgtggggagtcaggattcccactcctccccagccttccggaaaaatgctcggaaatttccttccacattgacacctgattacagtctacatagtaaccttattctgatcgttaatgtaaccttctcgtaatytctacaaaaatactttagtttttctagctgtgttttcatgtaatcactgaaattatttttaattggttttaagcattcattgattccatatacaccacctgcaaaaaagttacataggtgatcgctaacaatactagaattcgccccatccaaaggaaacattagagtagaaaaagaaaaaggatttgagaatccagtatgaaattcagttaatcattacttccctgttactcaactaccttaacattgtcaggtttacctgaacataaacttcattttcttaattgttcttagaacgaagggatatgtttattgaaatcagtaattaagaatattttgggacagttatgatttacttagccagtgaagcagtttctattcccaaatccaggcaaagagaacaataagattaaacgtagcctaagagatttcctttttgtcaaataatgtgattttgct

SEQ ID NO: 885658 - DNA, 583 bp, Homo sapiens
gtcattttgttaatcattctggatgcctgagaacttgtaatccaatgagtagaaagtttggtaccccatttatggctgtcaacctgccagttctcaggagtttgtataagcctaaatcygaaaggatctcatcccattaggacccttgtctccttttctgttgcctttgcccactggctatggcaacaggggtctttctttctccttggctatctttggatatgggggctccgtcttctgtgccaccttagggaatgccttttgcaggcatggctaagtcattaaaaagcctacagtttcagtaacattttgagtgagcactctctgaagctgcgttggaatctcaggcttctttgtctggaagataactcttgggctacaagtttcttatcctagctttggttttgaggcctctctgttctcctcttgggttggaagttattcctggctttttgtttcaaggggtctctgtgatcttgatcttgctgctttcatgggaacttctcagttcactgaattctcccttctcaaacctctgctgactatgtgttccaccaatatggaactaattctacttcttttc

SEQ ID NO: 885659 - DNA, 647 bp, Homo sapiens
tttggcttcggctttaggaggagcaggagcttccttcgctttcggtgccatcttgtgaaaagcgaaaaacattatttcaaaaataatttgtttacagtaaatctgcctaagaatagtttccaaagtacttttggtaatttttaaccttaaagttaatttaattaaaagawttgcattaaatatctagaccatttataaataagatacaatactaaaacattaattactgaacataaataattcaagtttatatacttttggcttcctatttttacagagagactaaagatattttggcccgttaataaacatgtttttttctgccacactgaggaattgtattatgaggaaacacatccctctagatgttgggagatggtatattcatacattttctaacctactatagaatgctaatatatgacagtttataactgtctacttcctagttttctctggaaaataaaagattactaagtattaaaattataatcaatatatgtaaataaaactactagaaataatagaataactagaaacaactctatgcaaagcatgcaagaaaagtagggcatgtttcgcaagtaaagtaggttgcattttttataaggaaaaccatacagaagatacaaataaaaagagatacc

SEQ ID NO: 885660 - DNA, 573 bp, Homo sapiens
ttgatcttgaccctgaccatgaccccatctctaaccatacttccggccccgactctgacccagatcctaatcctatgcctaaccctattattatctttacaatctatctctactcttaccctctagtgctaaatagctgtacccaaaagcacttttaaattatttcttttcttgaattctctatggacatcctaaaggagatgtcaatatgtattgcattccctctgagtggtatggcttcagatatgaagttctaatactttgcaagacataaaaagtttggagggtaacagcactgggttgttagggatgtatgttggcattcatgatagtcattggtgytgttctccaaatattttcagttcattttttatgaatgcattctgactgttccatcccacctacttaaattttcccatggccacatgactttttttttttttttttttttttttttttttttttttgccaatggaggtgagaagaaataacgtgactttttcaggagaaatctccaagaaacagcgttctattccgcatgcttttttctcttttctatagcaatggggatct

SEQ ID NO: 885661 - DNA, 613 bp, Homo sapiens
acctgctcatttttctttcggacattctcttacccggccctgtagattccaaggcggctcccagttttccatattgttcccaacgcgttcactgcccacagtccccacacaaacttctttcgcaggctcacaacatagtccctctgccccgtgccctttttgcaatagtctgccagtcccctaagtcttagctctgcctatttaacagtagtggtgtctcagaacacacacacacacacacacacacacgatccctgacatatttggcaagagtaggccctgaaggtttttawtattttggttctttaacccagtggaattactgaatgatttatttaattagggtggggatggagtggatccatttgtttgatgctaaacagcctgagctcgcagttcccagggggcatatctctaaatggtctgaaatgagatttgcagtggttttcttaatgcaattcccaacttctctccaaatgccttttgacatctggcaacatttcatgcctcttcccctttcggttttcatccttgttttctctcccttctcccacgacctcggtagtcttctgcaatccagattctcagacttcaggtttttctccctctgccc

SEQ ID NO: 885662 - DNA, 613 bp, Homo sapiens
acctgctcatttttctttcggacattctcttacccggccctgtagattccaaggcggctcccagttttccatattgttcccaacgcgttcactgcccacagtccccacacaaacttctttcgcaggctcacaacatagtccctctgccccgtgccctttttgcaatagtctgccagtcccctaagtcttagctctgcctatttaacagtagtggtgtctcagaacacacacacacacacacacacacacgatccctgacatatttggcaagagtaggccctgaaggtttttaatattttggttctttaacccagtggaattactgaatgatttatttaattagggtrgggatggagtggatccatttgtttgatgctaaacagcctgagctcgcagttcccagggggcatatctctaaatggtctgaaatgagatttgcagtggttttcttaatgcaattcccaacttctctccaaatgccttttgacatctggcaacatttcatgcctcttcccctttcggttttcatccttgttttctctcccttctcccacgacctcggtagtcttctgcaatccagattctcagacttcaggtttttctccctctgccc

SEQ ID NO: 885663 - DNA, 557 bp, Homo sapiens
ccttttggcatagacccatatcccagtttcctctttcccaggtccagcagcatctcaaggacatctacaagagggatacctaatttcaggggtctctgaattatatgtgggaaacatcgtctaaaaaagtaattttatccttattcatgcaaccagacccacactcatagaacttttctttaaggggagtgtcttgcagatgtataaatgagtgttaacatctttaaaagcgaaactgaacaattctctggcatttgaattccctccttccttcccaaccctctccttttcattttctcatttattattaaaaacayttttaaaggatctccatgcttcatatttatctactataattcctccttctcggtgttgcagggatggggaaagaggattttttaaaaacacaataaaaagcaattgggagaaacagggccagtggtgttggggtgggtagtggaattgtgatttttgactccagtagacaatgatgctgcatatatggggtttgatttctctctggctcctcagttgggattgatgaagtttggctagaa

SEQ ID NO: 885664 - DNA, 576 bp, Homo sapiens
tgtgtcagttcattctggatgcttttagtctgtggtcttcattcactctttttatggggaagtaaaaggagtgggacagattatgagaacagctgggtcctcccagttgctggggtggttattttaagctttgtttaatgtgtccagagacccagatggcatttttaactaagctgctttattaaatcttgtgataaagcatagtgatgtttattgaaaaggcagacacacatcagcaacattatgcgtgaaacttgctctaagaattttctataaaacatctgttctctttctctttgagccttttgtgaactctggaagtttgctagtttctatacagacttgaggacaagaagttggwacccacttttggagatgtccaagcataggtattggaatcattaatcctaaccctctcagttttaaggccccggatacccttctgttagacaacagtaacatgagcaagcactgtaataacatttaaacaagattatttggaaataatggacaagaaaaattagtataaattgtttggggattttaaaattaaagataaaaagctagggcttcaat

SEQ ID NO: 885665 - DNA, 625 bp, Homo sapiens
tgatttcttatctgtgtgtctgacgtgccatctttaatgttaaaattaaggtgttaaaattaagcctagttatatagacgaaataaaatgctaagtcactacactacatcgttattttctattacgtctcattcttccctttctaaatggaactttttaaaacctacattattttccctcaaacaatttattttcacaattcatatttattatagatagcagaagtaatccattttaatatggcctttaaaaattccaaatatttgaggttgaaaatgtcctggcttttaaaataggaaatttactatttatgagacttctaaaagaaaagaataggagggcatgtaaatatattctccatttatttttcctcaccccccaacaagctggaaaaccrtttgagatcaatttggaatgtagtggccaacatgtactcagggaaaataaaaggctataaatgtacatatatatatatatatatatatacattttttaagcactagaattttcaaaacttatttcttaaaaaaaaaaaaactctgaaaagactttgcaactagaaaggtttaagtgttactcggcgtcaggggacggagtggggggaaaccagacaagaacgcccatc

SEQ ID NO: 885666 - DNA, 625 bp, Homo sapiens
tgatttcttatctgtgtgtctgacgtgccatctttaatgttaaaattaaggtgttaaaattaagcctagttatatagacgaaataaaatgctaagtcactacactacatcgttattttctattacgtctcattcttccctttctaaatggaactttttaaaacctacattattttccctcaaacaatttattttcacaattcatatttattatagatagcagaagtaatccattttaatatggcctttaaaaattccaaatatttgaggttgaaaatgtcctggcttttaaaataggaaatttactatttatgagacttctaaaagaaaagaataggagggcatgtaaatatattctccatttatttttcctcaccccccaacaagctggaaaaccgtttgagatcaatttggaatgtagtggccaacatgtactcagggaaaataaaaggctataaatrtacatatatatatatatatatatatacattttttaagcactagaattttcaaaacttatttcttaaaaaaaaaaaaactctgaaaagactttgcaactagaaaggtttaagtgttactcggcgtcaggggacggagtggggggaaaccagacaagaacgcccatc

SEQ ID NO: 885667 - DNA, 606 bp, Homo sapiens
gcacagatctgagactttttcatcattgcaagtatttttattgagcagcactgagctagaaatttgggattgtgatttgggagagacctcggacttctcagacctgaggtcagtaacaaattcggggttcatccagatagatatggtagtaaaagttaattaaaacctaaggccatcaagggagaaagtaaagagagatgaaaagcaaatgacaacccattcctggagggctgcctgcattaaagaagcaagtaacaaaaagaagatttaaagtgagagatcagatacttgctacaagaattgaggtcatatcccagtagctcagagaaagtagtccaacaggagaaaaggtcagccacgtcacaagcctcagatgtttacatagaatgtgaccaatgtgtaacttttgagtttggcagctggatgaccagagaaagtctgcaagtgkttgttgtgctcttttgcagacctgagacagtgatttgggtgaaagaggtatactatggatgcaattccaggaagtacagcaaaagagaagtatagagaaatagggaaagagagaacgcgaatacaggatgattaatgaggaggttaccactctgggaa

SEQ ID NO: 885668 - DNA, 519 bp, Homo sapiens
agagaacatcaaaaacaagtcaagaggtaaaaattagaataagtgaggaaagatcaaaaacattattaaactcagactaggctgcgtacagtggttcacacccataatcctagcactttgggaggctgagatgggcagataatctgagrtcaggagtttgagaccagcctggccaacatggtgaaaaccctgtctctactaaaaacaaaaacaaacaaacaaaaagaaacctcaaaccaaatggatctcagacaaaggatttatatcagtcatagtttggtgcaggaaacgaaaccactttaggtatcttaagcggaaagatatttaatacagggaactaggtgctcacacaataattaggagggttggaggagtgagtactagtctggactttcaggacttactctcagaactttacagaatgggttcttctttagggagccattggagccagaatcttgaaactgtttctgcttcaactgcctttcaaatcccaagatctccctagagcatcctggc

SEQ ID NO: 885669 - DNA, 564 bp, Homo sapiens
atccaaggttctaaagggttctctgagctgtaactcagctctaactggacaaagaggcaacaattcccctcatttcctgtgcgctgtcaccacaggaggctacacttaaggaggtcaactcaagttgtttggaccaagcttccgcagttgttcccattatcctgtttgaatccattcactcttacactggccatgcaaatagacactccccaaggaaagaaggaccttagaaaataagtgatctcagttttcatctgactttcttctggggtgtggggctggtcatgggtctatattccctgctgtggtcagggccctgtgggacatgtkgctgtgtcccagccctctagcacaatctgccgtcactcctgggcttttgtatgcctgctcccatttgctcttatctcctcaacaaccacgtcaggtagataatacataccatcagtcccagtttacagatgaaaaaagtgaggcacagggagcttcagtaacttgatcaagactagaattcagagaaatagccaaaccatgactcatgatcctcttgctccaaagtgcgttgtc

SEQ ID NO: 885670 - DNA, 650 bp, Homo sapiens
tggggaggaggtggctttatttattcttattaaatgccgtatacaagcttctttttaaagagttcactttttgttttaaaagtaaaatgtagggcgggcgcagtggctcacgcctgtaatcccagcattttgggaggccgaggcgggcagatcacgaggtcaggaattcgagaccagcctgaccaacwtggtgaaaccctgtttctactaaaaatacaaaaattagccgggcgtcgtggcacgcgcctgtaatctcagctactcaggaggctgaggcaggaaaattgcttgaacccggaaggcagaggttgcagtgagctgagatcacaccattgcatttcagcctgggcgtcagagcgagactctgtctcaaaaaaaaagaaaagagaagagaagaaaagaaaagaaaagaaaaaaagagtaaaatgtagcaaagtagtccaattaactgggggttgttggtcaagttgttaactgaaatacgctgcaaagataacatccacaggcatgaaaaggctcaattttccaaaggagcaaaaaatgaaaatgtctatccagtcctgaaattctccttttctttgctgaaacaggttgccacactctaaagattaatattgtttaacactgacaatagtgcaactactggtgta

SEQ ID NO: 885671 - DNA, 643 bp, Homo sapiens
gaaagtagcagttcagatgaggccacagaaaatgccagttgaaagatgatttgcaaataatcttggcaatgctttttctcactgatgggagatggcgaacaacagtttgctttatttcacactgtcccttcggcattgctggcaaaatgggcagtgtgctcctccctgtctctcagctctcatcagtcccaggtaatcaacttaatttaacctcactgcatctttgtagggaacttctaatctatctttacagtaaatagactgaatatattggttacatcttacctaaagaaagctttcccaggggcactttgttttgcaaaagtttattggaaaatttttgtgtaagttggattatggttaaaattattgagtggagcttattaaaaggttttgtgctgaatatcttgaaaaaccaccaattgyacctgatatatattttttaatatgtagggctcttagcttgattagtgtagggtacactcttgggatttctatgagagaggaaggtcaaaatcttcaagtaagtgactttcctattggcaaagtgaggattattaattcacggttaatttgagctttgctcttagatttgtacattgaatccagggtactcaaaagcggacagaaacacttttatttt

SEQ ID NO: 885672 - DNA, 575 bp, Homo sapiens
tcttgtttctgaaataatttttaccatattctatatgtatatgtttgatattgcaaagtcaatgacccccaagacttagtggcttaagcattaagcattttgatatctcaagagtctctgtcacctagctggttccaggtgagctgtgtcagctacagtgttggtttgtctaggcttttctcagagagaatggctcatctctgctccatgacacacctcagtctccaataggtttacctggcgttattcccagtgtgacttggctgggttctgagagagagttgaggacatgcaagtctttatgctacattctgttggtcaaaccaagtcctctgcattcaagaggtgaggaaataaatgtcacctcttgataacaatkactttatagtcatattacagggagaaatatatcaggaaaaaaaaataatttttgcaattaatctacctcatctctgttttggcaactggatccccgtttgatttactagtaaatgatttttgccttgataattattcccaaaaccataggttgaaaaaaattaagaaatattattataaaattttgtaacttggaa

SEQ ID NO: 885673 - DNA, 602 bp, Homo sapiens
tttttagttccatgtgaatttttggattatcttttctatttatgttcaaaatgatattggtactttgataagaattgcattgaatctgatgattatttgggcagtatggtcattttaacaatattatttcttccaattcatgagcatggcatgcctttccaagttytgtgttttctccaatttatttcatcagtgttttgtagtttttcttatagaggtctttcacctccttagtaaaatttatttctagatattgtattatttttatagctattgtaattgaggttgccttcttgacttctttctcagctagtccattatttggtgatagaaatgctactgatttttgcatgttgattttttattctattctttactaaatttatttattatatctaagaatttattgatggagtctttaggttttcctaggtataagatcacatcatctgcaaagaggcacagtttgatttcctttttttcaaagtacatggcttttatttctcttgactgatttgtctggctaggacttccagaactatgttgaatacaagtaggagcactacattctaatgagtttcatccctagttagagtggtatc

SEQ ID NO: 885674 - DNA, 609 bp, Homo sapiens
attcctgaagaatagaggagaaaaaaaatatccccccaaggggcagaaatgtgagcaatctacctggttgttcacgttgtttggaaggagaaatggccttatgtatgactgtacgtcaattcatgggacgtggccagtggtttccctggatggtcacagacttgggagaaacataactagaaatttgaggaaaaggtatgtgaatagatatctctgagtaatcacataatgtggagatatttgtgtcctatatggatgctcaccaatggattacctcagcagagtagaattttaacgatcaagtgaataagatgacttattctctgcatatgtgtcagcctctttccccgtccactcctgtcattgcctaatgagctcataaacaaagtagccatggtagtaggaatggaggttatgcatgggttcaacracatgcgcttcaactcaccgaggccaacctggctatgaccactgctgagtgtccaatctgtcagcaacagagaccaacaatgagcccccaatatggcaccattccctttgttgatcagccagctacctggtgacatgatgattacattggactctttccatcacagaaagggcactatt

SEQ ID NO: 885675 - DNA, 652 bp, Homo sapiens
taagttataagatgtcaaagagaagagtaaaaatcactcaacactttacctgctctttaggggaagagattagtgtggttttagttatgtgcagaatagctctatcatgttttatgaaattatggccgtgctatgttctttatttggagattaagtatgtgtactagtccattctcaggctgctaagaagaaatacccaggactgcgtaatttataaagaaagaggtttaattgactcacagttctgcattgctggggaggcctcaggaaatttacagtcttgccagaaagcaaaggagaagcagacaccttcttcacagggtggcaggatggagtgagtgcaagcaggggaaatgccagacacttrtaaaaccagcagatcccagtctgtccaacatggtgaaaccccatctctactaaaaatacaaaaattagtcaggtgttgtggcaggcacctgtaatctcagctgctcaggaggctgaggcatgagaatcacttgaacccaggaggcagaggttgcagtgagccaagatggcaccactgcactccagtctgggtgacagagtgagacccggtctcaaaaacaaaaacaaacaaaaaaacccctgaaaacaaaaaaatcagcagatctcacatgatgagactcactca

SEQ ID NO: 885676 - DNA, 566 bp, Homo sapiens
tcccaaatctcaattcttgacttctgtgcacctgcaggctcaatgccacatggaagttgccaatgcttggggcttccaccctctgaagcaacaggccaagctgtaccttggcctcttttagtcatggctggagcggctgcgacatagggcaccaagtccctagactgcacccagcaaagggaccttgggcccagcccatgaaaccattttttcctccaggcctgcgatgggaggggttgctgcaaatgtctctgacatgycctggagacattttccccattgtcttggtgattaacattcggctccttgttacttatgcaaatttctgcagcctgcttgaatttctccccagaaaatggtattttcttttccattgtattgccagggtgcaaattttttaacttttatgatctgtttcccttttaaaactgaatgcctttaacagcacccaagtcacatcttgaatggtttcctgcttagaaatttcttccatcagataccctaaatcatctctctcaagttcaatgttccacaaatctctagggcagagcaaaatgcccccagtc

SEQ ID NO: 885677 - DNA, 558 bp, Homo sapiens
agctaaatgatgagaaactgctttgtataattataatggaaaacatgcaccaacttgtagaggatgtgaggtttccacataaaaggacagaagaatacaattacaaattttatttaggggtcatattatagataatagtcagggtaacaatgctgctagcaataatatagtgtcaccaagtgctatttagcacattttcaaatgcctgtgttaatttggctaactagttcattctcctatttgcttgagattttctattttgaaatatcttgtttgcctrtatgaagcctatttattttataaatgtacagagtagtatttagcaatgtaaactcacttatctggttcttggtgatgaagcaaggtgcatctaagtttgtaaaagtggtatatctactatagctttttatttgtatttatattttgagttgtttcagaacccaaagagaaatttcctaaaccataagacgggaagattagtgatggaaatagaaatcagagaagtataattgacctaggcatgactacctccaggggtataaacggaaggtaccagag

SEQ ID NO: 885678 - DNA, 511 bp, Homo sapiens
tttcccaactttgtcattctctgtcctattctggaacatctgtactcagtttggctaggcaactttatacaacatggcatcgctactcattccaaaactgtatgtattctcaacaaagaaaagttgtagcttcctccatcttgcctttcttacaacccagagtttgttggttgtttgtttgtataatagcccatatgtttcaaggttgagagaaaatcttgatggcatctttgcttcccttcgctgcatctagttcattaacccttctccccaayaacaacagctatatcaatcagaccataaaatgcagctcttgcatcctgtgttgtttggttatattatatttccctttccccacacttatctgctgaactcctggttactgcctctcgcacatccagcactagacttagatttttcatcgtttcatttattaccaaaatgactcaacactctcctcttccctgactgcatttcctttgccttccccttttactagctttacctcagc

SEQ ID NO: 885679 - DNA, 567 bp, Homo sapiens
aaattaacaagtgccagtctgacaattcatcattaatttgttataaattaattaattaatagaatacagggtagttattgcattgcatatttctgaaaggaatatattatgtctatatcaggatatattcccacagcaaataattagagaaagcatcttagttcatttgagctactataacaaaaatatcatacagtgggtagcttaaatgacaaacatttattgcttatagttctggagctgcgaagtccaaagtcaaggcactggaagttttggcaacttgtttgggccacatttctggttcatagatggtgccttgttgttgtgtcctacatggcagaaagggraaatataactttctgggagctctccttttttatttttcccaaagtccaaaactttattttttgctaagaagtcttcaaatattgtggagaatcaagttatctgagttcagttgaatattaatgtatatatctgaggttttagtcatgtttcaaaatttcactttttctctttcttagtacagtgtcttactgatcaagagaatcagaagcgcagaacatc

SEQ ID NO: 885680 - DNA, 542 bp, Homo sapiens
gtattttttgggcactaaagtttaaggtcaccttctttcttccatcctttttattctgccttattctccttttccaggttaaatattcatcatttacgattctcatttaaacctctaaaattgagagtaaatacaaattttcacaatgttttcttaaagataggtaataaccttgtaacttcctatttttctattattatctggattagtagagtattgaagaatctwttgagcaaaactttttttccccaataatatttcacgtttcatgtttcatggactacaatactacaatagcactgtaggttatatgtctttctagtcccttaaatatgctagctgatttctctaaattgtcctcagaccaacatggtttataaaataagaggtttattgtacatatatcattatctagtgctaagtattcaatggtgaatggatcagacattgtacttatccattaaacttatgcttgctctactaagggtgtgtttggttttacaaggagaaaccaattcttcaactctttaacaccaactgag

SEQ ID NO: 885681 - DNA, 614 bp, Homo sapiens
aggtctctctcccgatcataatccacaatgtactcaaacctgcccatcttagtgtgccttcctataacatgcgagacactgagcttgacttgtgttctgctgattctttgccctacaaatttccccagtaaagctccactgatgactacatcttatgactagtggtgtttgtctcaatcctcaggattgtcagaggcatacatctgaaaattaaatcatgtggggttttcccctcaaatcctattgtagttacgactcataggcacttccctattctatctaaatccatgaaacatttttcttctgaatttcaaaggcagatgtcttagtttatttatgttgctataaaggaatacctgaractgggtaatgtataaagaaaagaggtttatttggctcacagttctgcaggctgtatagcatggtaccagcatctgcatctggtgagggcctcagactattttcactcaaggtggaagtgaaggggagctggctggcctcatcatgagaaagggaacaagggagagaggacattcccactcagaagtgttatcagttcctctcatgtaacccatctcaagctgaacttacaatatttcatgtcaaacctgctc

SEQ ID NO: 885682 - DNA, 435 bp, Homo sapiens
tgctcaggctggagtgcagtggcctgatcttggctcactgcaagctctgcctcccgggttcacgccattctcctgcctcagcctcccgagtagctgggactacaggcgcccgccaccacgcccggctaattttttttttttttttgtatttttagtagagacggggtttcaccgtgttagccaggatggtcttgatctcctgacctkgtgatccacccgcctcagcctctcaaagtgctgggattacaggcgtgagctactgtgcccagccgtacaatacactgttattagctatggccactctactatgtaatagaagatagaacttattctgcctaactctaactttgtaccccttggatgacccctcctgatcttccccgtccttctcccaccaagagagacaagaccatcaagtagaccagcacactccaa

SEQ ID NO: 885683 - DNA, 435 bp, Homo sapiens
tgctcaggctggagtgcagtggcctgatcttggctcactgcaagctctgcctcccgggttcacgccattctcctgcctcagcctcccgagtagctgggactacaggcgcccgccaccacgcccggctaattttttttttttttttgtatttttagtagagacggggtttcaccgtgttagccaggatggtcttgatctcctgacctggtgatccacccgcctcagcctctcaaagtgctgggattacaggcgtgagctactgygcccagccgtacaatacactgttattagctatggccactctactatgtaatagaagatagaacttattctgcctaactctaactttgtaccccttggatgacccctcctgatcttccccgtccttctcccaccaagagagacaagaccatcaagtagaccagcacactccaa

SEQ ID NO: 885684 - DNA, 655 bp, Homo sapiens
ccctgctggaatgcttggcagcagccatgttcccattggagcacttttgcagacacaccctagctggcagacacctgcctgcagcctcccccagctgccctaccagtgcgcagtcccattgagaccaccaccatcctggcagtgtgcatrtgtgtggactgctgccacctcaccactgtgcccatgcccataccctccctctgtcataccatcctgctgctgcttactcccccatggcctctgcactgcagcacactcttctggactcccccaccccctgctgccccatcagaggcttttgctggcagtccttgtgggcctattgttgccagtggactggaacactttggcccttccagcacagcagtgcttaatctcaagaagccagagaacaaagccacgggccgagtctcagccccacagggttagaacatgcagcccaggagtgttgagctgacccctgggcccctaaaagtatccagaaaggaagccaattgagtaaacccaacttataccaaagtcaaaccctcaagggcatcaaaaaatataaaagcaaaaagccacattcaaggacagcaacttcaaagattaaaagaacatcagcccacacagatgagaaagaaccagcacaagagttctggcaactgtaacagtc

SEQ ID NO: 885685 - DNA, 631 bp, Homo sapiens
tggctagccagccagggttgttaatgacatgttaaagcctatcttctgtctaaattggtggggattctgtcttgatttaaaaaatggcctgtgtttagaataatgctgctttgaaagtcatgtagccagtagcttttccatttcattggaaaaacatattggaaaagtagtaatagtttgtccactaccttcaatttagttgtgttccctggagggataagaaaatgaagactgaatgtcactgggctgttcagagtatgtctgcactagtctgtggcttggcagacgggagaggacagtgggcaagtgcaagggcatctcctccctaggagaaaccttcactacacagtgggcaaggggccatctgggtctttcagaaggttctgcttaggtccaaaaatgttaccctcttccccatcctacagacaaaatcatagaatccacttgtgatacataaagaaatatatatatatatatatatatatatatatatayacacacatgccatatatatatagacatgtatatattcacctatatatatttatatcagtgttctgtgtatttaaataattagaaactcaccattagcaattaagttcacaatttagttcagttaaagtttattaat

SEQ ID NO: 885686 - DNA, 659 bp, Homo sapiens
aaatggaggacagtggaaccagaggctctatttcttaatctgggtggtaattacatgaatgttcaattgttattttgcaaaaaaaatgtacaaataacattatatgtcttctgtgtgttaggtacatcacaattggaaagttaaaaagaaaagaaaaaaattaacttgaagaaaaagattatatcacgtgaggatctatwgagtgcctaatacattttcccacttacagtagaaacttgaaaatatgattgttgattaccaacagatgactatcccgaaatgtttcatttaaaaggtcattgcatgttcaaaagttaaaaaacaataatgagtagttttctagattgttctagaactgactctaaccttaatgataaaatatattttgtatgactttgaagccgtcctctccttcaaagaggctgtgttatcccagcggctacaaatctctattagtgtttcacctaaatggagacaaatttcctgagagtaccgatgacactggtacatttgacacaggcaccccaacccaaaataaatttgactattacatatgtgtattgatagccccataaatcaaaatcataagcagaagaaggtatgttatctctggttcttccagaaaattgtgacaaaaattacctaactcataatcactt

SEQ ID NO: 885687 - DNA, 591 bp, Homo sapiens
tctaatcactgtagaggctctaatttttctgggctgttcttacagtttcttcttctgtgtgctctgcttcttagctgtctccttcctcagtcctctcctagtcttgctttatactaggcattcttggcctgtgggttcagagatgagcttcgaaggatctgtcattcctctgaaatatatagcgctttgtctgcatatgcaaatgtgcattttttagttgttaggttaatgctttttaccagccttccaagtgtccatgattcaagaatgttacagacagccttagtgcacactgtcctgaataatcacgtttcatggctttttcttctctctgcatgcgtgatatcacatgtctggtccacaactctgtcctgtgcttcagccctattcattcgtctactctttatmtccacctaacaactcaaagatagtatgtttgggtgtcagttttactatttacctaattgctcttcatgtcaaatgtctctgaattggcctggatttcactttcttccttacctaaacatctacatctaaatattcatcaaactcttggaattttacctcttaaatgataccttttctgtcttc

SEQ ID NO: 885688 - DNA, 593 bp, Homo sapiens
accacagtacagttgttaggggttctcattgcctttgagctggtcattgtttttaggccttttcagtggacagagttcagaaaaatatgtatgtgtacatatgtgtccactcagatatatatgtgtgtgtgtttgtatgtatgtgtakgtatgatatatatgtatatatgcatgtttacatattgtttccctatttcttccctcttagcaaaaaggttgcctactgtagttctgcaccttgcattttgtacttaacagtatatttccgagatcactctgtaccatgggtagaaatttctcattgcattttacaactgcagaaattctaccgtacagatataccataattattcatttggctgtatggttgtttctaatcttttgctcttacattttagtggggaattttttgttgttgttgttgttgttgttgttgatgggggtttatttgtaagtcaaacaaagccagaattgaaacttcatttaattaactagatggacagtggaatgaacagtggtgcaataaacagctttgtgaatatttacattcatattcttgctgatttatctttaaaatagattcctagaagtgg

SEQ ID NO: 885689 - DNA, 593 bp, Homo sapiens
accacagtacagttgttaggggttctcattgcctttgagctggtcattgtttttaggccttttcagtggacagagttcagaaaaatatgtatgtgtacatatgtgtccactcagatatatatgtgtgtgtgtttgtatgtatgtgtaggtatgatatatatgtatatatgcatgtttacatattgtttccctatttcttccctcttagcaaaaaggttgcctactgtagttctgcaccttgcattttgtacttaacagtatatttccgagatcactctgtaccatgggtagaaatttctcattgcatkttacaactgcagaaattctaccgtacagatataccataattattcatttggctgtatggttgtttctaatcttttgctcttacattttagtggggaattttttgttgttgttgttgttgttgttgttgatgggggtttatttgtaagtcaaacaaagccagaattgaaacttcatttaattaactagatggacagtggaatgaacagtggtgcaataaacagctttgtgaatatttacattcatattcttgctgatttatctttaaaatagattcctagaagtgg

SEQ ID NO: 885690 - DNA, 593 bp, Homo sapiens
accacagtacagttgttaggggttctcattgcctttgagctggtcattgtttttaggccttttcagtggacagagttcagaaaaatatgtatgtgtacatatgtgtccactcagatatatatgtgtgtgtgtttgtatgtatgtgtaggtatgatatatatgtatatatgcatgtttacatattgtttccctatttcttccctcttagcaaaaaggttgcctactgtagttctgcaccttgcattttgtacttaacagtatatttccgagatcactctgtaccatgggtagaaatttctcattgcattttacaactgcagaaattctaccgtacagatataccataattattcatttggctgtatggttgtttctaatcttttgctcttacattttagtggggaattttttkttgttgttgttgttgttgttgttgatgggggtttatttgtaagtcaaacaaagccagaattgaaacttcatttaattaactagatggacagtggaatgaacagtggtgcaataaacagctttgtgaatatttacattcatattcttgctgatttatctttaaaatagattcctagaagtgg

SEQ ID NO: 885691 - DNA, 613 bp, Homo sapiens
ttgacctttttatatagcctgtaataattataaattttcagctgcacttttggttaaagcttttatttttttactaatttccgtaggtttctcatcttacacacttttgctttctaaccaacatgtcaggtgagaaatgtttattaatcttctactttgtgcaaagaattggatagaatcaaagacatcaaaaccatgacttgccttaaaaatttataaatgacaatgcatacaagttaacaatatagaacaacagtgaagatgtcccaaggctgtgtatagaattatttcctaaaatagaggtaaatgctaacttcaraaggaagaggactccctgtgggccaggttggactgagatggaaaaataactgcagacaattatgacatgtagcaacatggataggtgaggaatggctcacatagacacatatagatgacgttagagaaggggaagatctgagtgcctggagcaagatttcttagaggtgataagacttgttctggaccttgaaggttgggtagaatttgaataacagatggagattaatggggagggctttctatttaagaggaagactaagcagagaacaggaaagtacatagtgggattagt

SEQ ID NO: 885692 - DNA, 694 bp, Homo sapiens
ttaaaaaaagttcaaatatctctgctttttcttaaaaacagattttgctttttttattccttcccaattttataaaagtaggattttttttaatgaaaccttgtttctagttaaaaaaaactaaggtaatgaaaagaattattataatctttccttataaaaggacaaggtatttcatgtgtgtaatatgtgatatgtattcatacaaaagtaatggacctacttgcctggggagaactttctcatgttgtcacatgaagtattctggaacagtagtttcccttctgatatctgaagcaccttgaggtacggtgtaaggagaggaagaataaacatgcacggttatacatttttaaaaatatttcaactgggcttacaaatttgctgattattttatcaaaagtgggaaaaatgtcctgtaaagatggcattcaattaggctagctcatggtatcgtggattgcacttctaattatataaggcaagayaatgtagacatacaaccatttggggaggggtttacacaaagccatggggcagttaattggacctcatgtttttagaggtgcttgatgatcctatgacaaagatcatttagattaaagaaaagtcatcctcagtgggacttagttttagaagattccatcaaatgtcaaagggatgcttcgatttaattctcacactgtgatctgtg

SEQ ID NO: 885693 - DNA, 649 bp, Homo sapiens
gccctttgccccaggagacccagtgctaggaatttatcttaggaacgtaattggacaagtgtgcaaacctgtgtgttcaagggtctttctcactgatgaaacatgcatggaatagagccattagagatcaaggtattctatatttattgatatggcaaaaggtttgtgacagattattaagtgaaattagtaaagggattttatgcagcatatcttgtttgtaaattttacttgtttaaaatatatgtaaaattctgtgtgagtgcataaaagaagtgtttgaaaggccattcaccaaaacttttacgatggcagtctctttattgtgaagtttcaggtgattcttaatttcttctttgtatttttctgtgtgtcttgaatcktttatgtttaacatttatcattcactacaactgtttattttgataaatataattcaaatgtttccatctccagaaggcctttagttgtgttttcagggcaatggtgaaatctatcccagaggagaaagcactatcactggaaatagccccagggcaacagggatctgactgatagaaatgttagcccaggcatacagatggagtctgatgactggcacttgttggtttcatttaaaacctagcatttcacttcatcctaagaagca

SEQ ID NO: 885694 - DNA, 604 bp, Homo sapiens
accaaggagaaaatcattttaggacatttcctgtatgtgtgtttgggaggagagagacaggcaggggctgggaagctttggaacagggtgggcacgatgagatgtcagctaatgaaggaggccctgccttctccatggacaaatccccagctttcaggacagtgtctgggacgtggtaagtactcaagaaatatttattaaataaacaaatgaaggaaagaggtacttctccctgtagtctcaactctttgaktgtttcatccaatctccagaaccccagcttcctttcctccatactactcaattgaaatttaccttactgaagtcactgaagacctccaaatcatggccaaatttaatggacattttatgtcttctttgatttgtctgtggtatttggcattccctcctttgggaaactctcactcttaacttaaaatgataccagtctttcttaactttcctctttccctgttcaccctcttctccatcgtactcttcttcctcctctaccatcctctcaattgttgttgttacttgcaaggtgtcatcctcagatctctttttactgcacaccagaggttcttaacccaaagtgcatggt

SEQ ID NO: 885695 - DNA, 556 bp, Homo sapiens
acacctctgcccaactccagcctagaataataactccaacctcactcctaccacagattgtttggctttgatgctgtcaacatttgaatcttggcccttcctagcccatcatttttccatgatttaaaaattgatgctgaaaaacaaaaaaaatcagtggtcagaacatttaagaaaatactggattaaacaaattaaaagaggtctcttcaatacaggacttctcagagcctttaaaataagaggcaattgagacagcagtgttttcaaaactaatttgagcatggaacttttcttctctgtgtggggatcatctcatggggcttargatccatgaaacattatttgatatgatgaatatttgttgtttctgtctgtccagattccatctttctcttacccccttcttctggtgacagtataactctcttgagtcagagaccttttccatctggtatgggtgggactgaccttcctgccatcatcttcaacaacagagttgtgatgtcatccagttgtgtccccagtgattgaggatgggaaggtatctaaattg

SEQ ID NO: 885696 - DNA, 630 bp, Homo sapiens
ctttatcttctgccatgagtggaagcagcttgaggcccttaccagaggcagatgccagtgccatgctttttgtacagcctgcagagccaggagccaaataaatctctttcctttataaattacccagccttaggtattgctttatggcaacacaaacagactaagacacttatactaaaatattattcattgcttgtctgaaattcaaatttatctggacatcttatttttatttgctaaatctggcaaccctagctggggcttggtggaaatttaacgtaggggctgaagacctgtggcctgcaggtgggaatgttttagtttgaccagcacagcgcttaaaaataagaacatttcacataaaattcagacttccaccttcccttgatatctagtcacacttccccctttttgctagcagttcattcccatctccacccctactgrcccacatggccagtaaataaagagatgcataaaaataaatgctcatttattgttacctgctaggcctatgaatcatttgagttttagacccattggcttgcctcggggtacacagggagagaccctggtttactcacggcaatgacaaaccctccagatcaagagtcattgtgtggagacccc

SEQ ID NO: 885697 - DNA, 636 bp, Homo sapiens
tttttctaaaggatcttctgctccataaatgtttttcctctgattaagttgtacagtggcactaaggaggattatctgttctaatttctggagccaatgcttgtaaaaagtaatcccagcttcttttcttgtgtcacttccaagaaatgtgtgcaccaaagcccccgcccgctgtatgacagagtaagaactctgctacaaaactgccaaagaaacacaggacagcyaagtgtaagtttaacagcctagtgagctgttaaacttacactagtgagaggagccacattttgagtctttcttttggagttatgttttagttctgaattaccgcagaaccatagccaagctgtgatccatccgatctgctgggctgtacctaaagcaaagtttcgagaaaagtggcaacagtgccttttgccagctgcatctttcttaactctggcaaaatctccattttaggcaagaacagtactgttcagttgggattttccctgagtgggactcctcctgctgttgataaaacaacagtgtgaaacagcagtgatctgtttcaaaatttatgccagaaataaaagtgggatagtgacctattataaacccaaatactgaatgagatcagtttgaagatgcctagaa

SEQ ID NO: 885698 - DNA, 581 bp, Homo sapiens
cctgggccactcagcctaattcatcacaatgtaaattagcaaagatagagcggacttctcttgaggctgcaacccgagcttgctccagcaatgctggtgttctagtgacaggaaacagccagaagaagacacttaccctacttcttgaaccagggttctcagtcagctatcctagtggttcctcctagagggtaggctgtatctcttgccttcacactacagaagtggattagttatctatgttgtgtaaaaractaccctgaatcttagtggtttagaaaaagaaaagttactatcttaggtttctcattatcaggagtcctagcacagcttagctggatgtcccacttaagatctctcacaaggctgcagtcatctcaatgctcaacccggggaagatccacttccaaactggctctcctgtctgttgccaggtctcacatcctccctggctgtggactggagacatcactccttgccacgtggacttctccaaagggcagctcacaatatgcggctgccttccttcagaacaaacccgtgagaaagcgtgtctttttgtaacccaatctctatagtga

SEQ ID NO: 885699 - DNA, 581 bp, Homo sapiens
cctgggccactcagcctaattcatcacaatgtaaattagcaaagatagagcggacttctcttgaggctgcaacccgagcttgctccagcaatgctggtgttctagtgacaggaaacagccagaagaagacacttaccctacttcttgaaccagggttctcagtcagctatcctagtggttcctcctagagggtaggctgtatctcttgccttcacactacagaagtggattagttatctatgttgtgtaaaagactaccctgaatcttagtggtttagaaaaagaaaagttactatcttaggtttctcattatcaggagtcctagcacagcttagctggatgtcccacttaagatctctcacaaggctgcagtcatctcaatgctcaacccggggaagatccacttccaaactggctytcctgtctgttgccaggtctcacatcctccctggctgtggactggagacatcactccttgccacgtggacttctccaaagggcagctcacaatatgcggctgccttccttcagaacaaacccgtgagaaagcgtgtctttttgtaacccaatctctatagtga

SEQ ID NO: 885700 - DNA, 613 bp, Homo sapiens
acaacaactgctgggccttgtctacttaagaggttagaattaggcatacgaaggagaaaactctgcttctgcctcaaggggggtagtgggcaatgataggaaactggttgatgtgatataaatgggaggaagatgtaatatatgaacacaccaacacccaccatggctacccagagagacatgaatatacttggggacgtgggaaaaagaaaggacttgagcctgtacagtggaataaggcaggggacagacaagggagcagtataattggttgtgtagtagaaaccaaactacayttgaagtcagaaaatctggggtctagtataggcttttcatcttagtcatgtgacttggacttagtttcctcatcttcaaagttgagacagtcactcctaccttgaatggttgctgaagagaccaaatgagctaagaggctttgcaagttgtgaagtaacatgcatgtctgccttatcagagtaggtgaagttgtgtagagagttagacatagatggagctggaggccattatccttagcaaactaacacaggaacagaaaaccaaatactgcatgttctcacttataagtgggaggtaaatgaggagaacacatgga

SEQ ID NO: 885701 - DNA, 613 bp, Homo sapiens
acaacaactgctgggccttgtctacttaagaggttagaattaggcatacgaaggagaaaactctgcttctgcctcaaggggggtagtgggcaatgataggaaactggttgatgtgatataaatgggaggaagatgtaatatatgaacacaccaacacccaccatggctacccagagagacatgaatatacttggggacgtgggaaaaagaaaggacttgagcctgtacagtggaataaggcaggggacagacaagggagcagtataattggttgtgtagtagaaaccaaactacacttgaagtcagaaaatctggggtctagtataggcttttcatcttagtcatgtgactyggacttagtttcctcatcttcaaagttgagacagtcactcctaccttgaatggttgctgaagagaccaaatgagctaagaggctttgcaagttgtgaagtaacatgcatgtctgccttatcagagtaggtgaagttgtgtagagagttagacatagatggagctggaggccattatccttagcaaactaacacaggaacagaaaaccaaatactgcatgttctcacttataagtgggaggtaaatgaggagaacacatgga

SEQ ID NO: 885702 - DNA, 665 bp, Homo sapiens
ccaatggttatttagaaaaacatttcaccaaaagtaatcaataaatgtgtaggtcactaagtgcctctatgaaatatccctgtaatgaaggttagatgccaagaagaagcaggagatccttcattagattgcacagtttacacctttgggtttatggactatagcattaaaagtatgtaagtagtcttcactgtaagtccttggttttgaagtgatttaagccttctttgaaaattaagcaattatgttcagactgaatattattatttaaatcatcatcatttcaccctgcatctcaaaagggaagatgttatctatttcaaattatttctgactttatatcaggatttagtaaggttagatgccaagaggaggcaagagatccttcattagattgcacactttgcacctttgggtttatggacaatagcattaaaagtatgtaagtagtcttcactgtaagtccttgcttttgaagtgatttargccttattcaaaaattaagcagttatgttcagattgaatattattatttaaatcatcatcatttcaccctacatctcaaaagacaagatgttatctatttcaaattatttctgactttatatcatgatttagtaattattatatgcaaatcaccttgcaaattaagtttgagaaaaaat

SEQ ID NO: 885703 - DNA, 683 bp, Homo sapiens
aatcatacttatttctagagttttcccattcatgtaaaacctgaaaaaatatttttttcaaattttcagccctcagtatggagcaggtttgacattttaaaggcaatttaaatgattattatttgcctagtaaattctcaagattccttgtatgctcacacagtttgcaatgagatgaaatcatgtgaaaagcaatgcacctggcatttatatccattatatccaaaagaggtgtcgaatttaactaaaatatactttaaaaaatttcctcactggtttaagcttgattttaatactatttaactccttatttaaacaaaaaaaaaacaccataagaaattcartttatgaggtctgaagaagttttgctgggcacagctaaggattccagcctatctttgtgttcgctgacttattaagtgtcgtttagaattggattaattttggtctcaactcttagtcctcatcacaatcagagttggtattcacataagcctttctttgaataggcttcagaaacaaagactacttattctactcagctctgattaagaattttatagcacacagggacaaataattggggtcagacttttcaactgcagcacaggatgaagagcagcaaaaccaacatgtgtccgtctactttgaagctgccataattatattcagtttttaactcc

SEQ ID NO: 885704 - DNA, 619 bp, Homo sapiens
tcataaaaactttgatactggtttaaaaatagtatctgtaatgaaatgggaaaatagaaattaagttagaaaatctgtttcaaatatatagaagccaagttataagcatacatataaacagtctctgtgattgacattcagatttgtacttcagcttctaggaaactggagttggggttaaggaggaagcaaacatgatgtaattatgtaatttataacactgataaaggaatatatataatagttcttcagaggaagcccagatttctttagcactgaattccaaaatgcatcatgtgggtttttgtgtgctaaatataaattgataggaaatgtcytaaattatatttttacataatatcagtattaaattttatgtatattttatgtgaccttcaaaattagaagcacaatattaaattgtcttttagtaaagttgattctgtgagggacaaaatttatgtaattgaaattcaaatccttacagtagctgatcttgatctctgataaaatttaaagtaccaagggaaagggtggctcacacacatgttccctaaacattacttcttgtccttcatggatagtagatggcaaaacatccaaagttttattttctaat

SEQ ID NO: 885705 - DNA, 672 bp, Homo sapiens
cttctataggagtgagtcaagcctagggagatgggcaaccatggccatgctccactacagatgctcctgtaccaaactctctgggctccactccagctggagttctgcccctgccagttctctgagtagctctcactgccaattcaagtgtccatggtggtcaagggstcttctcctgcagggattccagaggcccgtggcgagagtgggttgctccttgcctgttcaaccccttccccaggagtcactggggaccaggaatgacctggtgtatggtagccctgagcagcgttcccagcttcctcctgcttccacccagtatctgtatctcccttctgtctgctctcaatgccttccctcaagatctgctaggagtgtgctagtcttcctgatgccctgtccctttgtgggagacattccccctggctgtatctagtcggccatcttgcgcccttttttatttctctgcgtatctttgattggacatttattttcatttttcatatgcatgtaccggtcctcggcctaagaatagaatttctgagtcatagggtatgtgtatgttcagctcagcatatacagctaagcagttttcaaagtggttattctaatttatatttgtatcagcagtgtcatagtttcactgctctacatcctcgctgacacttggta

SEQ ID NO: 885706 - DNA, 613 bp, Homo sapiens
agagtgggccccaccaaggacccaccccacaggcagcagggccctgggccttgcttcacagaggggccttcgtcacccctgcaccccgagggcattcatccaaagccacatttcctcagtggcagatacctcgctgcctacctgtgcccagtggcaggcaggggtcattacttccaatcacagtaactcacactcattgcctaatcttaagggtgacgtcttcccaagtgcgtggaattgcatttgatggagacktgaaaacaggcaccacgagaggccagccttccacactgtctgcaccaaaacttccagcttgaaataatggaaccatttcacccagaccccagcaagcctggacgcagcccctattcagggaggtggtgatggtgacagcaggaacctgtccttccaggccaggcctctctcttcctgtagccatttcctcaaattataccagggtccctggcctatttccatttctcctgaagtgacgcccatagcaacattcaccaggagcttctaattagaccattagtgcaagctgctggatggaagaacggcccatttatcaaatgacttgtccaagaaatgacaggaaaaacaaatctacacg

SEQ ID NO: 885707 - DNA, 615 bp, Homo sapiens
gccagacagcaggcaggactggaaacaagtccacagggtcatggtaagatacagctggctttccacacccgcgggttctgcacccgcagattcaaccaactgaggaccgaaatatttaaaaaaatatgaagtgacaatgtaataataaaagacacagtctaactatttacatagcactttgattatattaggcattataagtaatctagagttgatttaaagtatacaaaggatgtgtgtaggttacttgcatatactatgccttcttatacaagggacttaaggatmctcggattttaatacccctgggggcgggcctggaatgaatcccctgagggacaatagttgtgaagacagcagtggctggctgagtgcttcctgggctgaggcactgcgcagggtgagttgcgggcattcatttctgaattagattctcaccgctgtcccgccacctgagcaccactatggctcccgttgcagagatggctcaggctcagccactagagtgactccctcaaggccccagagccaggaccccgaaggaccctgccaggcaccgaagcctgtgtcctcaatcacaacatgcctgtgcctcgcaggagatgagctgcagag

SEQ ID NO: 885708 - DNA, 615 bp, Homo sapiens
gccagacagcaggcaggactggaaacaagtccacagggtcatggtaagatacagctggctttccacacccgcgggttctgcacccgcagattcaaccaactgaggaccgaaatatttaaaaaaatatgaagtgacaatgtaataataaaagacacagtctaactatttacatagcactttgattatattaggcattataagtaatctagagttgatttaaagtatacaaaggatgtgtgtaggttacttgcatatactatgccttcttatacaagggacttaaggatcctcggattttaatacccctgggggcgggcctggaatgaatcccctgagggacaatagttgtgaagacagcagtggctggctgagtgcttcctgggctgaggcactgcgcagggygagttgcgggcattcatttctgaattagattctcaccgctgtcccgccacctgagcaccactatggctcccgttgcagagatggctcaggctcagccactagagtgactccctcaaggccccagagccaggaccccgaaggaccctgccaggcaccgaagcctgtgtcctcaatcacaacatgcctgtgcctcgcaggagatgagctgcagag

SEQ ID NO: 885709 - DNA, 615 bp, Homo sapiens
gccagacagcaggcaggactggaaacaagtccacagggtcatggtaagatacagctggctttccacacccgcgggttctgcacccgcagattcaaccaactgaggaccgaaatatttaaaaaaatatgaagtgacaatgtaataataaaagacacagtctaactatttacatagcactttgattatattaggcattataagtaatctagagttgatttaaagtatacaaaggatgtgtgtaggttacttgcatatactatgccttcttatacaagggacttaaggatcctcggattttaatacccctgggggcgggcctggaatgaatcccctgagggacaatagttgtgaagacagcagtggctggctgagtgcttcctgggctgaggcactgcgcagggtgagttgcgggcattcatttctgaattagattctcaccgcwgtcccgccacctgagcaccactatggctcccgttgcagagatggctcaggctcagccactagagtgactccctcaaggccccagagccaggaccccgaaggaccctgccaggcaccgaagcctgtgtcctcaatcacaacatgcctgtgcctcgcaggagatgagctgcagag

SEQ ID NO: 885710 - DNA, 626 bp, Homo sapiens
taccaaagatgcatccacctaaattgtcttgggtttcactgtaactttattttcattttttatcctctagcttattaccttcaatagttttttttaaatatttctttgagcttccatattagatgaagacagagacagagagagaggactctcaagcaacttcagtttctcagggaaagcccatgaattgatgtaatctaaagaaagcaataatgctgtttactgcccagcaaggaagctgtttaccacaaggaagtgaagacgactagagtgggaaacaggaaactgaaaagaggaaatggtttacaagtccccagaaaatacacacagatggaaattgatgaacagtgacaatggagaaggatgccccaggcaactctgcttccaaaagttaaagcttccatccagtcagtacttagttctctctgttgtttmtacattcttagtgtgatcttgctaatatttaaaaggtaaatctaaacacttcagaatcttcacaattctactgatgatcagcaactgaatgactcatgtgaatttcaattctgctaaaagatgcaatcaacagaaactctgagaaacatgcaaggaagaaaactctaaggacttgttagagattttacaag

SEQ ID NO: 885711 - DNA, 627 bp, Homo sapiens
atgtttgatggttagaattcaggagatgctactggcatctagtgggtagagcccagggatgcagctgaacaatctacaatgcaccggacaggccctctagcaaaaaattatctggtccaaaatgtcaatagcgccaaggtggaggccctttagaggggacctaggggagagaaacctcttggaggagctgacatcccatccaggacatgcaaacggcccatcagggattagaagtatcttctaaagggcagcttctccggagctctgtctgcagagaacacctgcccaatccactcttatgagtggcctgccatatgtgggagcctgggggcaagagatggctctttcagcctgaattggtcaccaagagctcaggagctggtgttcaagggcaatccaggaccctaacaggggcatatgtgggcacgctccagccttggcgtcctcacccatttgattactaattttgcaaatgtgagtttggcccrcgctggagccatagcttacccttcaggttcatttaacattatcatgtgtacagccccacaggctgtccccattcccaggtgggcttggctgggttctctgtgcagggtctcaccaggctgatgtgaatgtattggccgg

SEQ ID NO: 885712 - DNA, 632 bp, Homo sapiens
accttgggagtttcaatagaataaagctaatatagggaaatagaaccttgaaagtgaaaccctctaaattcagtattttgtttaagtaccttcaattcttccctagtatggaaatatttttgttcatttttttaaaatagaaatcttatcagtggtcaggttcaggtgcccaaagatcatttctaagtaaagccattgggagttcacatctttgttaatgtattcattcattcaacaagtattaatgagtacctactatctgccatgccctgtcttaggccctgggatatagtggtgaacaaaacaagcttgggttttggaaagtggtgcctkttatattgaatcccattccccttctgtaggaatatttacagtgcctatttgcacattaaaggctcagagaaggcctgcaggaaagaaacctatttaccctttctggacatatttcccaaacttattgaggacagaatgcttttatcatgagacaccttttacatcctcaagggattttttaaaaaaatatactatggaaaatctaggttaagatgaaatgtgctgcctagaaggacagaacgacattgaatagcaaggttaatgtaacactgctttaattcatactcactgattgcagg

SEQ ID NO: 885713 - DNA, 668 bp, Homo sapiens
gtgaggctgggaagagcgggactttgatctgtaacacttccacaccctaccccttctccactgttcagggctgctatcattttcgttaccatttcaagttgctatttgatttctccatcactccagagctgcctcatgtcctagatgtgatttgtttcttagtattakaggaagcaggtgctagagctggaagggacttcaagacattatctcgtctaaccctcccattttgcagatgagagaaactgagttccagagaagtaaatcatcccagctcacagagctggataataagtccccaatgaattgttctttttcgtgtgtaatggtggtgttttttgagaaaacatgaaaggggcccccagaattccccaaagcctgagataaccactggtggttctcaagatgatttaggtgatgttcaacagcatttaacttctctgtcaatcctccttgtgtgggtcaaagaggtaatctccatttggccctgtttttcacacttaacacttggtaatctctctttttaacaaagttcaggctcatatcctctgacagtcagcaaagcagccagagtctaataacatttttttcttttcattgtttttattattgtgcctctatttatggtaaattatactggctttcaatgtatagtactgatacaaagt

SEQ ID NO: 885714 - DNA, 668 bp, Homo sapiens
gtgaggctgggaagagcgggactttgatctgtaacacttccacaccctaccccttctccactgttcagggctgctatcattttcgttaccatttcaagttgctatttgatttctccatcactccagagctgcctcatgtcctagatgtgatttgtttcttagtattagaggaagcaggtgctagagctggaagggacttcaagacattatctcgtctaaccctcccattttgcagatgagagaaactgagttccagagaagtaaatcatcccagctcacagagctggataataagtccccaatgaattgttctttttcgtgtgtaatggtggtgttttttgagaaaacatgaaaggggcccccagaattccccaaagcctgagataaccactggtggttctcaagatgatttaggtgatgttcaacagcatttaacttctctgtcaatcctcctwgtgtgggtcaaagaggtaatctccatttggccctgtttttcacacttaacacttggtaatctctctttttaacaaagttcaggctcatatcctctgacagtcagcaaagcagccagagtctaataacatttttttcttttcattgtttttattattgtgcctctatttatggtaaattatactggctttcaatgtatagtactgatacaaagt

SEQ ID NO: 885715 - DNA, 607 bp, Homo sapiens
catggtgttttttgtttgtttgtttgtttgtttgtttgactatgtctggttgggatatgtagttgagaagctgagaacaaggtcgacatgtgggtcgcttttctaccctttcatctacatccagggctaactccacaaatgttgctcctccccaggaaggaggtagatgatttgtagctaactcttcaaagcaattcaaagcacatactctaaaaacaatgggccagtagctcctctttgtgtgtaaaatatctatttgggcacttcctggtatagggctctggtaggatgaagttcctgagccccagagaatcaatgtcctttgcagtccctttccattgaacaatcttcagcctctgtggtgctgccgaggtggttcaggggagaagggaagaacttaggattccattaggctgcagggagagtttcctttttaccaagctaggagctactaytgtggtcttggggatggagtagaaggtgttcaaggaggcaataacaaatcccaacttgctgctcaaccagtgggaagttgctggtggggacagaggtttgtttttgccatcttgaattcagattcatgagctatttttctacaggatccacg

SEQ ID NO: 885716 - DNA, 608 bp, Homo sapiens
ccaccacgcctggcctgtaatttctcattgtgtttatttagtcttctctgttttttctttgttagtctagctatcaatctatcagtcttatttattcctttaaaaagctaacttctgattttgttaatcttttatatggttttttacatctcaatttcagttcagctctgattttggttatttcttatcttctgctacctttggagttgtgagtgcttagtgctataaattttcctcttaacactgctttagctgtgtcccagctgtatatctgttatatctttagaacctgttcgtttaatccttaygctgtatgttgcctcttttggacatgcggttctgggtcatgaactgcaaatctcctttgtcatctctttgaaagacatcaggaaagatttaacttaattctcagtgctttctctttgaaattttttcatttatttttaaataccagccatatattttctttaggggcaaaccatcatttatttaacattgttttctctactgttttatattttgtttctttacagcttttttgtttttaaaatatgcttccatgagcatctttgccaatataaaaccttttattatttcattagaataag

SEQ ID NO: 885717 - DNA, 535 bp, Homo sapiens
tttatgagatagaatctcgctcttgtcccccaggctggagtgcaatggcacaatctcagcccactgcaacttccacctcctgggttcaagggattcttctgcctcagcctcccaagtagctaggattacaggcgcccgccacaatgctcagctaatttttgaatttttagtagagatggggtttcaccgtcttggccaagctagtctggaactcctgacctcrgcctcccaaagtgctgggattacaggcataagccactgtgcccggctaataatggggatttttaaatgttacacatgttccttcttatctttgagtaggggcgtgtctttcttaagaacaatttatgaaggttacagcctattaatgacatcagctttctttgagaaggaaagtccatggttccctgccggcttcagggaatttcagaccctgtaaggtgctttcctatagctcctctgggatagaacctgacctagtttgggaggtgagggattacttcactgaggaagtgatatctcagttgaaacctaa

SEQ ID NO: 885718 - DNA, 535 bp, Homo sapiens
tttatgagatagaatctcgctcttgtcccccaggctggagtgcaatggcacaatctcagcccactgcaacttccacctcctgggttcaagggattcttctgcctcagcctcccaagtagctaggattacaggcgcccgccacaatgctcagctaatttttgaatttttagtagagatggggtttcaccgtcttggccaagctagtctggaactcctgacctcggcctcccaaagtgctgggattacaggcataagccactgtgccsggctaataatggggatttttaaatgttacacatgttccttcttatctttgagtaggggcgtgtctttcttaagaacaatttatgaaggttacagcctattaatgacatcagctttctttgagaaggaaagtccatggttccctgccggcttcagggaatttcagaccctgtaaggtgctttcctatagctcctctgggatagaacctgacctagtttgggaggtgagggattacttcactgaggaagtgatatctcagttgaaacctaa

SEQ ID NO: 885719 - DNA, 535 bp, Homo sapiens
tttatgagatagaatctcgctcttgtcccccaggctggagtgcaatggcacaatctcagcccactgcaacttccacctcctgggttcaagggattcttctgcctcagcctcccaagtagctaggattacaggcgcccgccacaatgctcagctaatttttgaatttttagtagagatggggtttcaccgtcttggccaagctagtctggaactcctgacctcggcctcccaaagtgctgggattacaggcataagccactgtgcccggctaayaatggggatttttaaatgttacacatgttccttcttatctttgagtaggggcgtgtctttcttaagaacaatttatgaaggttacagcctattaatgacatcagctttctttgagaaggaaagtccatggttccctgccggcttcagggaatttcagaccctgtaaggtgctttcctatagctcctctgggatagaacctgacctagtttgggaggtgagggattacttcactgaggaagtgatatctcagttgaaacctaa

SEQ ID NO: 885720 - DNA, 719 bp, Homo sapiens
tatggtgcatgtctcttcccaattgcatgttcagtgaggtcatggtgggagtaaatcaaggaaactggcaaaatctacaaattagggcattcttgcttctctctagagagttattaaacatttaccagctcaccatagcccctaggcctttgcatttatggcccttcccctaccctaacttggcccagcttaaatgtcccttcctcctgggaactgtgttttgactcttcaggattgggatagatacccttcactgtgattctttggtaacttgggcagcggccccactatttttcccgtattctatactggccaagtaaagtccttgaggtcagggcccttgtcttgttcattgttgttcttgtctacctaggatagtgtttggcacatagcaaggtgctaaactatatttttaagtgaaycaatacatgaataattaaagtaagccctccctactaataataggctttttatggttcaagaatgtgccttaatctttgtatctcctgaaattcctcacacagagaaagtttagtagatgtttgaatagattgaatggactagacttgaatgtgctttatatgagcctaaaactagggcccaatttaagatatccattctagaagtgagtcaatgatatttgagattatgattctatagaaccaaaacctggagtattgaaatatgtcaccagaaacttaagattttccctggccatt

SEQ ID NO: 885721 - DNA, 719 bp, Homo sapiens
tatggtgcatgtctcttcccaattgcatgttcagtgaggtcatggtgggagtaaatcaaggaaactggcaaaatctacaaattagggcattcttgcttctctctagagagttattaaacatttaccagctcaccatagcccctaggcctttgcatttatggcccttcccctaccctaacttggcccagcttaaatgtcccttcctcctgggaactgtgttttgactcttcaggattgggatagatacccttcactgtgattctttggtaacttgggcagcggccccactatttttcccgtattctatactggccaagtaaagtccttgaggtcagggcccttgtcttgttcattgttgttcttgtctacctaggatagtgtttggcacatagcaaggtgctaaactatatttttaagtgaaccaatacatgaataattaaagtaagccctccctactaataataggctttttatggttcaagaatgtgccttaatctytgtatctcctgaaattcctcacacagagaaagtttagtagatgtttgaatagattgaatggactagacttgaatgtgctttatatgagcctaaaactagggcccaatttaagatatccattctagaagtgagtcaatgatatttgagattatgattctatagaaccaaaacctggagtattgaaatatgtcaccagaaacttaagattttccctggccatt

SEQ ID NO: 885722 - DNA, 489 bp, Homo sapiens
caaagccagagtcctgcaagtgtgcttcccagctcacagattgaatcccaggttccactcaggaagaggaggggccaggctcttcccccctgcaaatggtgcaaacttcccgaggctccaccccagtgtacacttctcccagtgcacaggccagctggagtttctccagggacccctttatacttggctgtacattgcgagggaggagctacctgtgctctgagaatgggcaggtcccctttcccgggctggggtgaggaatggggaccagggaacacctgcctgtccaggaagagtatccgtacmccctagaaagaagctgagcagcctctggaggtgacactccagaatgagtgggagggagctgccatttagcaggtgtttagcggtctgtgctctaaagaagtccatctaactgccattaggataagcatgatgaccaatcttaactgcttcctgctgttaaggggggcgatgtttggggaaaca

SEQ ID NO: 885723 - DNA, 590 bp, Homo sapiens
aaaaaaaccaaacctatgcttgattggtgtatctgaaagtgatcgggagaatggaaccaagttggaaaacactctgcaggatattatccaggagaacttccccaacccagcaaggcaggccaacatccaaaatcaggaaataccaagaacaccaccaagatactccttgagaagagcaacccaaacacatataatcatcagatacaccaaggttgaaatgaaggaaaaaatgttaagggcagccagagagaaaggtcaggttacccacaaagggaagaccatcagactaacagtggatctctctgcagaaactctacaagctaaatgagagtgagggccaatattcagcattcttaaagaagagaattttcaacccagaatttaatatccacccaaactaagyttcataagtgaaggagaaataaaatcctttacagagaagcaaatgctgagagattttgtcaccaccaggcctgccttacaagagctcctgagggaagcactgaatatggaaaggaaaaaccagtaacagccactgcaaaaacatatcaaattgtaaagaccatcaacgctatgatgaaaccacatca

SEQ ID NO: 885724 - DNA, 613 bp, Homo sapiens
ttctcctcagcctcaccaacatgttgtttgttgaatttttaataatttttaataatctggtgagatggtatctcattgtggttttggtttgcatttatctgaagattagtgatgttcagcatttctccatatgttcattggatgcttgtatgtctccttctgagaagtgtctgtttatatccttttcccatttttaattggattttttgttttttttgcttattratttgtttaattttcttgtagattctggatattagacattcgtcagatgcatagcttgggcatattttctcccattctgtagactgtctgttttactctgttggtagtttcttttgctgtgcagatattctttagtttcattagatcccacttgtctattttctgtttttgctgcaattgcttttgggacttagccataaattacgtgcccaagcttatgttcagaagagtattttcctagattttcttctaggatttttatagtttgtggtcttactttaaatctttgactcatcttgagttaattttcatatatgacaagaggtaggggtccagtctctttctgcatatggctaaacagttatcccagcaccatttattaaatata

SEQ ID NO: 885725 - DNA, 630 bp, Homo sapiens
cttgctattgcctatttaatctatcaggaattaaattttattctattcactttggttattgcctagatatgcatatattcttggttagaatatcataattacagtgaagttccttcttatgcttagtatgaaagccatctttttggctgaattgttgtagtggaaagtatagggaaggaataacttcattctacaaatctagtgaatatgtttatacctttgtacagcttagaatacattgccacagtckctctcgtttgactcccaataatggtggaaattggttggagtctcagtctctgttttgagtgggagggaatccggagctctaatgtattacaatacttaagacagcagcctttgcagtcacgaagacctgagtttgaaattactacaatgtttataactgcgtaactttgggtaaatttctaatatctttaaacctaaactacctcataaaatggggacagtaataactacacgacatactgcatgtaattgacacagcatgcaaagtggattgtttgccacgtggtaagtaagcccttaataaatggcaagacgttaagggatttgcccaagatacacttgtaaaacagcctacaaggaccagaaaccaaggaagatttc

SEQ ID NO: 885726 - DNA, 700 bp, Homo sapiens
atttatagttctgaggcatgttatttgtatagagcaagaatatctgttggaaaaaaatggaaagctggaatgcgttgaataaaattttgtgtgtgtggtgacgtaacctgatcaaatgtgagttgaaatgttggataaaagaagtctatactttaccggtaacaggtggaaaccaatcacacagtatgggatcaattttaaggataaaataaagcctcgtagtttataagaagcttaaagaattctgaacagtttgtattaaaatacaattttaactggattattasctgtttggacagataatctctttgcttcagatagacattaattttaatagtctttctcttcgcacttgaccacaagtcttcagaataattttaagatcccggtattcttcaacatagcctctgagcgcttttcagtttctcttactcagatgtacgtaagggacacttaccttgtacatctcagatgagctaaattataaactgtgatcatatcatcaagttataaagaatttcttagaggattaatgaaatcatttggaagcccgtttttgtgtctttcatacatatatgaagttcttaaagctatatatatgtatatttatgactgtcataatctactggaacaaatatgcctaatgtttatttcatgaagccccttttctgtttctcatttggtaagagcatatttgggg

SEQ ID NO: 885727 - DNA, 636 bp, Homo sapiens
ttgtgaataggaaggaaatcctcatgtccttggagaaatgggaccctactttgtagctccatattcacatttcttaatgcaattcctggcacaacacaaaagcttacgttagataatttttaattaataagagatttaatatgagccaacaaatatatattgcattttcatagaacagtgtttagcaagggagtcaacaatatccctgtatcttgcattgataagactatatttggagcactgtgtctgcttcagatattaatatcaattaggtggaacactgatggggtgtagtggttccagaactaacaggagggtgaaaaacaggactcctgtatttttcatggttctccagagcaaaagaatcagtaggatatgtgtgtgtatgtctctgtgtgggtgtctgcgtgtatgtgtgactgtgygtatatatggtatatatgtgcgtatatacatatatatgtgagtcaattccttcaaatttctctctaccctagagagagagagagaggagagagggagatttgaaagaaccgactcacacaattatggaaactggagatccagagaagagaagatgttgaaattctagtccaaaggcagtctgttggaagaattccctcttctttgggaaag

SEQ ID NO: 885728 - DNA, 636 bp, Homo sapiens
ttgtgaataggaaggaaatcctcatgtccttggagaaatgggaccctactttgtagctccatattcacatttcttaatgcaattcctggcacaacacaaaagcttacgttagataatttttaattaataagagatttaatatgagccaacaaatatatattgcattttcatagaacagtgtttagcaagggagtcaacaatatccctgtatcttgcattgataagactatatttggagcactgtgtctgcttcagatattaatatcaattaggtggaacactgatggggtgtagtggttccagaactaacaggagggtgaaaaacaggactcctgtatttttcatggttctccagagcaaaagaatcagtaggatatgtgtgtgtatgtctctgtgtgggtgtctgcgtgtatgtgtgactgtgtgtatatatggtatatrtgtgcgtatatacatatatatgtgagtcaattccttcaaatttctctctaccctagagagagagagagaggagagagggagatttgaaagaaccgactcacacaattatggaaactggagatccagagaagagaagatgttgaaattctagtccaaaggcagtctgttggaagaattccctcttctttgggaaag

SEQ ID NO: 885729 - DNA, 594 bp, Homo sapiens
gggcattgctaaaagatacctggatatgtggaagcgactttggaactggataacatgtagaggttggaacagtttggagggctcagaagaagataggaaaatgtgggaaagtttggaacttcctagagacttgttgaatggctttgacaaaaatgctgatagtgatatcaacaataaggtccaggctgaggtcgtctcatgtggagatgaggagcttgttggaaactggagcaaaggtgacccttgttatgttatagcaaaaggactggtggcaattttgccccagccctygagatttgtggaacttggaacttgagagaggtgattgagggtatctggcagaagaaatttctgaggaggaaagcattcaagaggtgacttgggtgctgttaaaggcattcagttttataagggaagcagagcataaaagtttggaaaatttgcaacctgacaatgtgatagaaaagaaaaccccattttctgaggataaatttaagccagctgcagaaatttgcataagtaatggggagcctaatgttaatcctgaagacaatggagaaaaagtctccagggcatgtcagaggtcttcatggc

SEQ ID NO: 885730 - DNA, 633 bp, Homo sapiens
ctcatggagaacctctgctagggcagtgtggaagggaaatgtggggttgaagccaccccatagagtccctactggggcactgcctagtggagttgtgagaagagggccactgtcctccagaccccagaatggtagatcccctgacagcttgcaccgtgtgcctggaaaagccacagtcattcaatgccagcccrtgaaagcagccgggagggaggccataccctgcaaagccacagggatggagctgcccaagaccacagcaacccacttcttgcattagcgtgacctggatgtgagacatgaagtcaaaggagttcattttggagctttaaaatttgactgccccacttgatttcaaacttaaatggagcctgtagcccctttgctttggccaatttctcccatttggaacagctgtacttatccaatgcctgtacccccattgtatctaggaagtaagtaacttgcttttgatttggacagaatcataggtggaagggacttgccttgtctcagatgagactttggactgtggacttttgagttattgctggaatgagttaagactttgggagactgttgtgaagacccgattggttttgaaacatgaggacatgagatttggaggggcca

SEQ ID NO: 885731 - DNA, 633 bp, Homo sapiens
ctcatggagaacctctgctagggcagtgtggaagggaaatgtggggttgaagccaccccatagagtccctactggggcactgcctagtggagttgtgagaagagggccactgtcctccagaccccagaatggtagatcccctgacagcttgcaccgtgtgcctggaaaagccacagtcattcaatgccagcccgtgaaagcagccgggagggaggccrtaccctgcaaagccacagggatggagctgcccaagaccacagcaacccacttcttgcattagcgtgacctggatgtgagacatgaagtcaaaggagttcattttggagctttaaaatttgactgccccacttgatttcaaacttaaatggagcctgtagcccctttgctttggccaatttctcccatttggaacagctgtacttatccaatgcctgtacccccattgtatctaggaagtaagtaacttgcttttgatttggacagaatcataggtggaagggacttgccttgtctcagatgagactttggactgtggacttttgagttattgctggaatgagttaagactttgggagactgttgtgaagacccgattggttttgaaacatgaggacatgagatttggaggggcca

SEQ ID NO: 885732 - DNA, 610 bp, Homo sapiens
tgcattagcgtgacctggatgtgagacatgaagtcaaaggagttcattttggagctttaaaatttgactgccccacttgatttcaaacttaaatggagcctgtagcccctttgctttggccaatttctcccatttggaacagctgtacttatccaatgcctgtacccccattgtatctaggaagtaagtaacttgcttttgatttggacagaatcataggtggaagggacttgccttgtctcagatgagactttggactgtggacttttgagttattgctggaatgagttaagactttgggagactgttgtgaagrcccgattggttttgaaacatgaggacatgagatttggaggggccaggggtggaatgacatggtttgactgtgtccccaaccaaatctcaccttgaattcccatgtgttgtgggagggacctagtgggaagtagttgaatcatggcggcaggtctttcccatgctgttctcatgatagtgaatatgtctcataagatctgatggttttaaacatgggagttttactgcacaagctctctctctccctttgcctgttgccatccacgaaagatgtaacttgctcctccttgccttc

SEQ ID NO: 885733 - DNA, 594 bp, Homo sapiens
aagaaataaataatattgaaataagaagagaggaagtcaaactgtctttatttgcagatgacatgatcctacatctagaaaaacccatcctttcagcccaaaactttcttaagctgataagcaccttcagcaaagtctcaggatacaaaatctacagcattcatatacaccaacaacatgcaagcagaaagccaaattgtgaatgaagttccatttacaattgccacaaaaagaataaaatacctaggaatacagctaacagggcaagtgaaggacgtcttcaaagagaactacaaaccactgctcaaagaaatctgagaggacacaaactaatggaaaaacattccatgctcaggaggttcaacatcatggaagaatcaacatcatgaaaatggccatactgcccaaagcaatttatagatttgatgctattcccattaaattaccattakcattcttcacagaattagaaaaaaaaatttttaattcatatggaaccaaaaatgagcccaaatagccaagacaatcctaagcgaaaagaacaaagctggaggcatcaagctaccagacttcagactatactacaaggcaata

SEQ ID NO: 885734 - DNA, 649 bp, Homo sapiens
aaacagagacaatttgacttcctctcttcctatttgaatacgctttatttctttcttttgctgattatcctggtcagaacttccaatagtatgttaaatatgagtggtgagagaggacatccttgtcttgttctggttttaaaagggaatgcttccagcttttgcccactcagaatgatattggctgtaggtttgtcataaatagctcttattttgacatacattccgtcaatacctagtttattgagagtttttagcaagagggtgttgaattttatcgaaggccttttctgcatctattgagataatcatgtggtttttgccattgattctttttatgtaatggattacatttattgatttgcatatgttgaatcagccttgcatcccagggatgaagccaacttgattgttktggataagctttttaatgtgctgctggattctctttgccagtattttattgaggattttcgcatctatgttcatcagggatattggcctaaaattttctttttttgttgtgtctttgccaggttttggtatcaggatgatgctggcctcataaaatgagttatggaggattccctctttttctattgcttggaatagtttcagaaggaatggtaccagctcttctttgtacctc

SEQ ID NO: 885735 - DNA, 592 bp, Homo sapiens
gaattaaactaaagagcttctgcacagcaaaagatactatcatcagagtgaacaggcaacctacagaataagagaaagtttttgcaatctatccatctgacaaagggctaatatccagaatctacaaggaacttaaacaaatttacaagaaaaaaactcgcctacttcaaaagtaggtgaaggatatgaacagacagttcccaaaagaagacatttatgcagacaaaaaaaygtatgaaaaaaagttcatcatcactggtcattagagaaatgcaaatcaaaaccacaatgagataccatctcatgccagttagaatggcaattattaaaaagtcaggaaagaacagatgctggagaggatgtggagaaataggaattcttttacactgttggtgggagtgtaaatcagttcaacctttgtggaaaacagtgtggtgattcctcaaggatctagaactagaaataccatttgacccagcaatcacattactgggtatatacccaaaggattataaatcattctactataaatacacatgcacacatatgtttattgtggcactgttcacaatagcaaagagttggaaccaac

SEQ ID NO: 885736 - DNA, 555 bp, Homo sapiens
gagaggatgtggatccagcaattctacagctgggtatatacctcaaagaaagaaaatgagtatattgaagagatagctgcactgctatgtttgttgcagcactgttcacaatagccaagatttaaaagcaacctgtgtccatcaacagatgaatggatgaagaaaatgtggtacttatacataatggagtactattcagccataaaaaaggataacagcctgtcatttgcaacaacaggagtggaactggaggccrttatgttaagtaaaataagccaggcacagaaagacaaatatcccacgttcccatttatttgtgggatgtaaaaatgaaaacagttgaactcactgaaatagagaatagaaggatggttacagaggcttggaagggtagtggggtgtggcaagaggatgtgaggattgttaatggatacaaaaaaaatagttagaaagaaggtataagacctagtatttgatagcacaatggggcagctatagtccataataatttattttttaaattactaaaattgtaattggattgtttataacaca

SEQ ID NO: 885737 - DNA, 611 bp, Homo sapiens
tatcaccctctttaaaatattgtattctgtgctccaaatgcaaactagaacattgtatggggaactagtcaacattccttttaaagcttaatgcccacagttaaacacagcactgcacatgtgatcttagattgccatctctattgaacagaagccatgcacagcatgctgtatcccatcttccaccctttctaatccaaagactctccctttaccctgctcctcaaacatgaccaaccttcctaaggaaaactcctaaatatgtcttgggagctctgacttarattctttggcttctctttcattttaaatcctggaaaagttcaaattggatcacttaggtaaccataatgagatctctacattttcaagaatctattctcatgtaataataccttaaaaagaaaaaaagaaacgtccttcatttaaaactagaccgatgatgtgtcaatatagggtcataggttgcaacaaatgtgccactctggtgcagtattttgatggcgggggtaggggtgtgcatatgtggggcaggaggtatctcctgcattttccatacattctgctttgctgtgtatgaaatctccatacattctgctttgctgtgaacc

SEQ ID NO: 885738 - DNA, 501 bp, Homo sapiens
agggtttcattaagtgtttattgaataaaattgaaatacagagataaaaattgtgtcacccaggccatcttctcttcaggccaaatattccccagttcctttaagacttctttagttgtgactttaacttcctaatcatcctggcaccttctcattgaatgactcttgtcatctctttctaaatatgttgtctccagaataaaatagaatattggaagtttgtttttataagtatagagcatagtatactgaaaactccatagaactagggactacttttcaaccaacacagcccagaattagagtatctcatgtcagcagcgacctcccacagaakgacattgagattaaaccactctaccaagggttgctactgcaaaatcacactttctttatatatatatatataaagaactttgctgcagaggaagagccctcatggacaacctctgctagggcagtgtggaaaggaaatatggggttggaacactcacacaaagt

SEQ ID NO: 885739 - DNA, 615 bp, Homo sapiens
agtggcttaagtattgacttcaaagagagcttgctgagagatttgtagatgatgtggtgaggtgccagttcaagcgggcttttatagtcagttccaaagatttttctatttatcttaaaatcaatgaaaattctttgaaatatttttttctgaaacctgacttttgttatattgctaattcatcatgaacgccctagttctttctagataacatttatattcaggtcttccttttcagttatctataatctctctttaatgacatatgaaaatggatggctcgctggttttctctaygcctttattttcattcagcacatattgggcacctactgtgtaccaggaactcattgttctaggcacttaggatgcaccagtgaacaaaataagaatctgtatcctcctagggcttaaattcaaacaacacttgcatccgttttataagcatactgctacataattataccataataacttacacaattcgagaatagaaaaccctaaaataactttaaatgttttctaattgtattccatagaacttttgttgtagataactaagttctgttttagctggataagaaaaggagaaaagatttattgtaaggattttgg

SEQ ID NO: 885740 - DNA, 662 bp, Homo sapiens
aatatgcaagagtaaacgtaacttttatagtgtttattggttgcattgtataatagatcagttctttctcaacgatacctactggtatatcttcatctcactggcaacctatctacaaataatatcgcaagacatatagttccagtgaacttgtgtrtacagtgcacacgttttagactcaaatacttctggctccagtttgcattggctgtgtgaccttgggagagttatcaaatctttctagcattgctgagacagagaaaatacatttatttcttttttcaatgattatttaaggaccaactatgcagcagatacttctaaatcctagggatggtgcagttaacgaaaacaggacaaaggtctctaaatttatgttttttgcacataacctgattcgtaatacaatctcaacaaaaaaagctgtcttactcccttccagaaagattgtctgtagctatattatctcatttgttaatatttcttaagaacaaaacttttacaagccttggtgtcttgatctttttctgatctttattgccttttttttttgtatttcaggtatacatcaactcaattcacattcacaaaatgtcatccagttgtcatacatcttgccacatattgttgtatttattttcttatgattaacttttatttca

SEQ ID NO: 885741 - DNA, 615 bp, Homo sapiens
attgtcataaaatatgacaaatggtttttctagggttcacaaaatatataaattttagtgtttacacaagacctcatatgaatggataataatgtaattaatcagtgtattgttcaataattagatggtttactacttttaattatttgarttattctgataattgtgtacatccattttttccacatatttacttattttctttatattgctagatgactactaaatcaaagaatatgacttcttttaatggccttaatgaatactgtcacaataatttccagaaatgtataacaatttacaattcaaatgcccatcagtaatgcactgtcttaccgtaactcagcatgtgtgtgtctcttcactaacaataggattctataccacaaaattgctaaagattctgccaaaagtcccctagacctaataaatgactttggtaaagtttcaggttacaaaagcaatgtacaaaaattagcagcatttagtttttttctttttttttaaattttactttaagttttgggatacatatgcagaacatgcaggtttgttacacagatatatgtgtgccatggtgctgctgcacctattgacccgtcttctaagttccct

SEQ ID NO: 885742 - DNA, 373 bp, Homo sapiens
atgcttttcttgcatttattgaaatgaccatatggttttcatatttcattgtgttaatgtggtatatcacatttatagatttgcatatattgaccccttcttgaataccaggagttaattcctcttggtcatggtgtatawttcttttactgtgctgttgaattttttctgctaatgttataatggaattttaaacatagtatttctttaattaaaatatgttattgttataaaaaaataaaataataacagtgaaactgaagtctttctcttatctgtgacaagaagagtccctgagggtcaaagacaagtgggataagaaagctgaaagaaaactcaaacagataagggtgatggttcttactcaacaatt

SEQ ID NO: 885743 - DNA, 603 bp, Homo sapiens
acccaaaacatgtttctttgccgtgttttgaaatgggcctgcaagaccatccattgtgggggaaaatttgcaactgtagaaattctctattgatatagctagatctttttcttccaggctctcccaatcctgaagacattaattgagagtttagcaccttttaaaggtctgaatagaaaaaacatttgtcatctattgtctctaagggcaaccactatgagacttcaaaagaaccttggtctccacaatcttttatcttaacctgaacatttcctttccattaattccagrcaaactcaaccatttataaaccagaaaatgtttaaatttacctattgcctggaaccccctccccaccactccgctcgaattgtcccacctttctggaccaaacccatgtatttttcaaatgtatttgattgatgtctcagaatcactttagggaatgatgtttcatgcctccctaaaatgtgtaaaaccaagctgcaccccaattcctttgagcagatattcttgggacctcctgtgggctgtgtcacaggccatggtcactcatatttggcctaggataaatctcttcaaatattttacagagtttgactc

SEQ ID NO: 885744 - DNA, 668 bp, Homo sapiens
ggaccttgcttgaagcctacaactaaaagttttgtggggagcactagaaaagcgccccaagatatacaaagaggacattttggaaattgtagcttaattgccagcagtcaggctgatagaggtttgagcttccatgctttggtcatgaatagtaaatgtaatctttcaggctggtgaagtctgggatatcggtgttacaatggtatctttaaataggactcattaaaataatagtgttgtttcttggcaagtgtggtcacacttaaataatatcaaagatgagaagrctgttataaagtacactgtagtttagtaatataaaatttattttatttttaagttccagggtacatgtgcaggatatgcaggtttgttacataggcaaatgtgtgccatggtggtttgctgcaactatcagcctatcacctagatattaagcctagcatgcatcagttatttttcctaatgccttctctccctccacacccccacccccaacaggccccagtgtgtattgttcccctcactgctgtgtccatgtattctcattgttcagctcccgcttataagtgagaacatgaggtgtttggtttgcattagtttgctgaggataatggcttccagctccatccacgtccctgcaaagcacatgatctaattccttttta

SEQ ID NO: 885745 - DNA, 579 bp, Homo sapiens
agatttttatagctttttgatgtgggcattttgtgctataaattttcctcttaacactgctttagctgcatcccagagatccttgcacattgtctctttgttctcgttagtttcaaagaacttcttgatttctgccttaatttcattatttacccaggagccattcaaaatcaggctgttcaatttccatatagttgtgtggctttgagtgagtttattaattttacgttctaatttgattgaactgtggtctgagagactgttatgatttcagttcttttgcatttgctgaggcgtgttttactttcaattatgtgatcaatgttagagtaagtgccatgtggcactgaggagaatgtatattctgttatttcagggggaagagttctatagatatctatcaggtccacttgattcagagctgagttcaattcctaaacatctatgttcattttctgtcatctaatattgataatctgtctaatattgacagyggggtgttaaagtctcccactattattgtgtggcagtttaagtccctttgtagtttcctgtgaacttgctttatgaatctgggta

SEQ ID NO: 885746 - DNA, 610 bp, Homo sapiens
ttctccttcctatagtttttgcttttaaaatgttatataaatggaatcctacagtagatggttttttttgagactgtcttttttcactcatcatctttctctgataatcattcaagttgcttgtattagtattttttaaaatatttaatgctgagtattattccattatatagatgtatcacattgtggttatcaattctccaattgagggcatttatgttgtttacagtttatggtgattttgaataaakatgctactaaacactcatgaacagttattttgtgaatataattcacttaggtaaattcctagggtaaatataatagggataggattgctggtctatagagtgaatataacttaacttctagaaactgcaaaactgttatcaagagggtgtaccattttgcatccccatgagcaatgcatgaggaacccagctgttctgcctccttgccagcacctggtgttctctggttgttgttatttttgttctttgttcatcataacagaagtgttggggtatcacttcgaggatttcatttgcattttcttaatgacttacttttatatgttcatttgccatccacatatcttctttgttcgtgt

SEQ ID NO: 885747 - DNA, 611 bp, Homo sapiens
ttgtcctgtgtgatatttaacttggctagtaatagcagctggtgttggggtcctactgaccacttagaagtgagctgcccctatttgaccagagggctacttaaaggatggagctgattctcattggttggacagttctctcttcagacaggggkataggaatctgaactaaagaaggatttaggaggagaagttttgttggaactgctggtagtaagccatgaggaattgaatatacactaacatcacagtgtataaattgcttgggttttttttttttttttgagcatatagatctgtcagggaaaattgacttcctaaatttctttatgcagagaggtactttcaaatgagttgattaacttcatttatcaaaaataactctttctgcctccctctattccatatgcccctgcttactttccactgaacaaatgccttgttccctccatctcagcagcatctccctctacctcctggctcctcatggaggactagtgttccctcccagctcctcatggaggactagtgttccctccccaacatctcacagtgccttagggggctccttccagcaggattcagtctgctccatccctgaagcacctggc

SEQ ID NO: 885748 - DNA, 611 bp, Homo sapiens
ttgtcctgtgtgatatttaacttggctagtaatagcagctggtgttggggtcctactgaccacttagaagtgagctgcccctatttgaccagagggctacttaaaggatggagctgattctcattggttggacagttctctcttcagacaggggtataggaatctgaactaaagaaggatttaggaggagaagttttgttggaactgctggtagtaagccatgaggaattgaatatacactaacatcacagtgtataaattgcttgggttttttttttttttttgagcatatagatctgtcagggaaaattgacttcctaaatttctttatgcagagaggtactttcaaatgagttgattaacttcatttatcaaaaataactctttctgcctccctctattccatrtgcccctgcttactttccactgaacaaatgccttgttccctccatctcagcagcatctccctctacctcctggctcctcatggaggactagtgttccctcccagctcctcatggaggactagtgttccctccccaacatctcacagtgccttagggggctccttccagcaggattcagtctgctccatccctgaagcacctggc

SEQ ID NO: 885749 - DNA, 611 bp, Homo sapiens
ttgtcctgtgtgatatttaacttggctagtaatagcagctggtgttggggtcctactgaccacttagaagtgagctgcccctatttgaccagagggctacttaaaggatggagctgattctcattggttggacagttctctcttcagacaggggtataggaatctgaactaaagaaggatttaggaggagaagttttgttggaactgctggtagtaagccatgaggaattgaatatacactaacatcacagtgtataaattgcttgggttttttttttttttttgagcatatagatctgtcagggaaaattgacttcctaaatttctttatgcagagaggtactttcaaatgagttgattaacttcatttatcaaaaataactctttctgcctccctctattccatatgcccctgcttactttccactgaacaaatgccttkttccctccatctcagcagcatctccctctacctcctggctcctcatggaggactagtgttccctcccagctcctcatggaggactagtgttccctccccaacatctcacagtgccttagggggctccttccagcaggattcagtctgctccatccctgaagcacctggc

SEQ ID NO: 885750 - DNA, 610 bp, Homo sapiens
ctctcttgaaatatggtagctggaactgaatacacaactccagatatgctatgtccaacacaaaacagaagaaaattattaacacttattcattattataaagccatttgtatgaataaagcctgttttcatttgtggcaatgacacccaccactgagtcacattgcgcttgtactcagttaattctgaacatgaatctatatattacagacataagttatcttacaaggtgttaggtaaaagaccagccactaggatcacacagcctccatgtgaccttgagcaaatcacctcaccctctttggacctcaatgtcctcgtctataaaatggagataataaaattgctttttcatagggttgctgtgaggagtaggtagaattatacatggaaatctcytcaaacaaggtctggcagaaggcaaattcaagagttataaagaaccagggacagagagagatcacgtccatagatgaaggttcattaacctagaacaataggtaaaagaatcacaatttacttgaatacggaatcagtatttaaatacgtctagtaatgttttgagaaaaaacattcagtgcagaggccagaaacagagaagaaagtaagc

SEQ ID NO: 885751 - DNA, 605 bp, Homo sapiens
ctagaactagaatctccataagagcaagtactgtttggttcaactaccgaaaccataggggttagcacaattcctggtatgaagtaagtgttcagtgatgacctgttgagtgaatgaagcaaagacatttgtattaacctattaacctcaatattttccccatagtgattatgagaaaaacactttaatcaagaagggtatttgggaggacaacaaaaagagcaactgctaagtcctattttataaccagtcttacagtgaaaaggaccctcaagggctacaaagtattgcagaaatgataaagatgagagaaacacagggtaatatatggaagcctgtatagaggaaaaaagatgaaggtccaaagatcttgtctggaccaaaggcatttaacttgtggaagggcagtgtarctcccctagatttaaccattattaaaattttcatatttacctgttatactgtaatcaactagacatagccttagtttcttactactgcaaataaaaggtgaatgtaatcttggaaattattataaccactttaaaattaaatttaaatatctaagcaaaatcaacctgctgagttctccagattttccacca

SEQ ID NO: 885752 - DNA, 590 bp, Homo sapiens
gaaagattaaccaagggcttattttctctagtagcagtaggattacagtggtctggcttcccatgtgcctattacccagcttcaggtttactagtatattatactacccttccccccttttttgctggagtattttaaagcaaatcctagccatgtcatttcaccagaaatatttcaatgtatatctttcagtaaaaaggatttattttaaaataatgccattgttatagtcaataaagttaatgatttcttaatatcacccatttctcagtctgtacctaaatatgtcttaytctcatttcaaaatgtgtgtttatagttggcttgtttgaatcaggattccaccccccccccaacttatgctatggatttgttggagaaactgggacattccatatcctatatgatttcttttttattaaggtttgagtattttctccggaatttatttattttgtatgttttcttcatttgtataaagttgatagtattgctttatcttttaattttctttttttcttaaccttcttgaagttcgtcttttgttactccaaaaaactaacttctagttttggtaatgctgttacatt

SEQ ID NO: 885753 - DNA, 636 bp, Homo sapiens
tttttttccactcagtattatttgatgcaaaaatgcagaaagatcaattagaggttcttctttgagaactcaggagacagcaaacagggcatccttttcatgaactgctaacagtagacaggcttttagaaaaagtaattttaaattaatgggagcaagtctttgatgcagttaaaacttcaaagacatgccaagtttttatttgtaataataataataataaaaaaaaaaggagttacagtaagaggaggttgcacattaaagcttacaaaatctccctaaagggcttggtgtgacaggagtgtgggcaggggtttccrcttctttctctctctctcactccccctctttaactccctttctctttctcttgttttccctcccttattcccaccttgcttcctcccttccttccttccttctgtcttatcatcacttctcccttttatacttcttgtggttacatccaacttagttaataaccactaacaaaccaacagtgccaactctccaatctcacaagtttaaaaaaccaaaactggctctcacttgggaaagataaaattaccctgataatttgtaaaaaatctttttaagggccagacgtggtggctcatgccagtaatcccagtattt

SEQ ID NO: 885754 - DNA, 619 bp, Homo sapiens
tcaatacccaagtcctgaacatggggcacctttttctcccagactcagttccatgtaatgtagatgcacagatgagctatacatggtctgtgccccagagaataaatctttatggatgtttctcccatcgtacatttctttttcatttttctgactgtaacttgagtaacaagatacactggggactttgtcactattgatgaaatacaggataaaartaattgtcactataggcttatcttcttctctaatcatttatggagcccattatggatgctacttagcattgccaattaaccaacaaatacttgagtttattctttgtcctttcctgtttctgcagccaggaatatataattctataagatacactaacttgtggcggcatttacagacttttagggagacacaattaacatatataaagcaattagagagcagcataatcaagaatatatgtaaatgacaaattgtttggagaagtgagtttacagataacttgaataactgtaaaagaagtcattccagacctagagccaataaaattaggaaattgaaaaaaggatgcatgagatccattttgtgcattgtttaggtcggtgtttcttaaactttactg

SEQ ID NO: 885755 - DNA, 643 bp, Homo sapiens
acatggctattttctctcttgtctgccatgtaaaacatgcctttcaccttccacaatgattgtgaagcctccccagccatgtggaactgtgagttcatcaaacccctttttgttcacaaattacacagtctcaggtgtgtctttatcagcactgtgagaacagactaatacaagaaattggtactggtagagtggtgtgatgctgtaaagatactggaaaatgtggaagcgactttggaactgggtaacaggcagaagttggaacagtttggagggctcagaagaagacagaaaaatgtatgaaagtttggaacttcctagagacttggtgaatggctttgaccaaaatgctgataatgatggacaatgatatccaggctgagtttgtctcagatrgagttgaggaatttgttggaaactggagtaaaagtgacacttgctgtattttagcaaaaagactggtggcattttgcccctgccctaaagatttctggaactttgaacttgaaagagatgatttagggtatctggcagaagaaatttctaagcagcaaagcattcaagaggtgatttgggtgctgtgaaaagcattcagttttaaaagggaaacggtatgaaagtttgaaaaatgtgcagcctgatg

SEQ ID NO: 885756 - DNA, 645 bp, Homo sapiens
agaaattaaagtctagcttccttgagagctcaactatcatcctcaataattacaaaataaaatctcaaaataaaatttaaagatatataataatttatgaattctaggtttaaagactttgataatttaatgtaatttctcaatcccactagaactgaaggtggatgcaaaaattaaaagctgcaaagggaaagtgggcgtgaaaacaaatgaacaccttcctcatatttttcagtaagaaattaaaatacgcagtttaaaaaagacaaacaagaagtatatatgatttcatatgtgtaaaggcaatcctagagaaaactcagaacaggaagtattgaggtgagctgaagacagaaggaaagagcattttaacatttcattttataatgttttgtatgattttatatttatgcatatattttctttttcaaacagatttgamatattttttaaagagagtgaaaagactagggatccatatattaacagtagatatacctggttttaggtaattggtgattaaggtaattttcttcttttttgcatttcccgatttttctacatgaacatgtttttttcatgaagtataaagtttgttttaaattattattactattaattcattctgaaagagtgaagggaaag

SEQ ID NO: 885757 - DNA, 594 bp, Homo sapiens
tttatcagctcaccactgcatataggtcacagtcagcagagtcgggatatgaagcgaatttttctggttttaatcctgagctttcatacaacttctcagccactcaaatacatttttcatgtgcaatagagttgtgtattttcaataaaataaaagcatcgttattaaatggcgataaataactttccagatcaagaaatgtggtaactgtacgctccagcaagtacagaataaaccctataaatgataagatctakagttattctactttaaaattgtaaacttaaaataattacattataactttaaaataatttaattggagaaaatcaaaacctaaatacatttttagataatactatgtaaaagcagagggcagtgtcaaacacactagtactctgaacacaagagagattaaaggaaatatttgttttcaacagaaaagcaggtggcagtgaagaaaagatgtgaaatccagaatgacagcatgagagggtctactgtgcaaaatgatcagacaaagcaaaaaaaaaaatcataaagatattaggaaactttcagggagttttacctcatactaagacataaagaaat

SEQ ID NO: 885758 - DNA, 629 bp, Homo sapiens
tgaactagatgccatgttttatatgttctactcgggtctaatgctatgattgaatgggatttgtgggcagtgttatgtgggttccagctcataactccttttaagagctgatcgtagtcaccttttcccaactggcactcagtgatgccatgtcagtagcttgaaattaggcatggtggtagtatgtataccacaaaaatgagcaaatgctccaaatcygggctctttttttttttttctcgaaaactctttgttatataccactgttttcagggatcttaggaaatggtgtgttttgcatataagaagaatataaataattgtagccaaggagaagactgtgctacatttaaaatggccacacattatttttagcttctctctttgataggtggaatttatttttttaccctttggatctgggctagccttttgacttgtttgaacaacagaatattgtggaacacaggttgtatggcttccaagtgcaggccccaagaggccttgctacttgctcttgtccgatttggacatactgttgccatgtaagcatgcccaagccagctaactggaggtaagatcaggaggaccaaggacatgctgttcagctgaggcaccttagccctact

SEQ ID NO: 885759 - DNA, 503 bp, Homo sapiens
ctacaactctatttgtgtattgattccaacattttctcttaatagttttagaggctgttgaccaggagctgtaagtgtctatagagtgcttgtacatgttatcagtgtatgtgtatgtatgtatatatatatatgtgtacatatrtagtatacgtatacacactctgtgtatacacacacacactctacatgtacatacatatatatctatacatacacacaaactctattgtgtctatatagcacattatgtacctctcacttcacttttttgcctcttgggattagaactcatgatattccaaatgactaagtggtcaaaaattgataaagaaggatgataaacaatggcctcgaaaatattcacctggaatataccaaacctgagtgatagattcccatgcaacaatcatcaatctgaataagcttctatgtatattagctctgtgaactcttttaaaagttgaaaatatctgtaggtttataagctttgtactggcctc

SEQ ID NO: 885760 - DNA, 503 bp, Homo sapiens
ctacaactctatttgtgtattgattccaacattttctcttaatagttttagaggctgttgaccaggagctgtaagtgtctatagagtgcttgtacatgttatcagtgtatgtgtatgtatgtatatatatatatgtgtacatatgtagtatacgtatacacactctgtgtatacacacacacactctacatgtacatacatatatatctatacatacacacaaactctattgtrtctatatagcacattatgtacctctcacttcacttttttgcctcttgggattagaactcatgatattccaaatgactaagtggtcaaaaattgataaagaaggatgataaacaatggcctcgaaaatattcacctggaatataccaaacctgagtgatagattcccatgcaacaatcatcaatctgaataagcttctatgtatattagctctgtgaactcttttaaaagttgaaaatatctgtaggtttataagctttgtactggcctc

SEQ ID NO: 885761 - DNA, 640 bp, Homo sapiens
ctggagcagaagaaaaattagaaaaacagtttcgtgccagcttctggaaagccttgaatgccatactaagaattttggattttattcttcaggtagtgaagagcttcagctttttactaaaataatggctgaccaatgctactggtacaaaaacagatacrtagaccaatggaacagaatagagaactaagaaataagactgcacatctacaaccatctgatcttcaacaaacctaacaaaagcaagcaatgggaaaaggatttcctatttaataaacggtgctggaagaactggctggccatatgcaagaaattgaaactggacctcttccttacaccttatacaaaaattatctcaagttagattcaagacttaaatgtaaaacactaactgtaaaaagcctagaagaaaatgtaggtaatactattcaggacataggcacaagcaaagatttcatgatgaaatcaccaaaagcaattgcaacaaaagcaaaaattgacaaatgagatctaactaaatgaaagcgcttctgcacagcaaaagaaactatcgtcagagcaaatagacaacctacagagtgggagaaagtttttgcaatctatccatctgacaaaggtctaatatccagaatctacaatg

SEQ ID NO: 885762 - DNA, 604 bp, Homo sapiens
aaaattaaatggaactataagaattcagcctgctggctggagaaatttgaaaaacatcattgataccgacagaaggcagccaagcatcccccggtgaaagcctgccttcaagccttaaacagcctgaaggctgaaaaaccagactgccagtcccagatgaagctcgcccttttctcaacttattctttctcaataatgcccacctgcacaccgggacgatggggtggagtcttgggaagtttgtgccatttgcagggaggaggagtctgacctctgctgttcctggatggtgacccgggattcaatctgtgacatgggrgcctgttaacagaaacccttctcactttgctgagctttttggtttttcttttcctttttcacccaataaacaccgttccccctcacccttccaaaagtgtctgtgtgcctaagtcttcctgattgtgtgacaagaacccatttttttctacagcaacatggcattacatttttaaagctctgggtgataagcatctgctgatcataaagcagcagagaaactcattgatgagtttgctaaagtcattactgatgaaaatctgactccagaacacatctataatgc

SEQ ID NO: 885763 - DNA, 632 bp, Homo sapiens
agtgggaaagagctcagctttgtgaggacaggaaagtaggccaagctgtggtggctttagagagaagtaagccgaggccagagcaggcaggaattgccatggtgggaaatttggatgttactataattgtagtgaggaatcattgcagatttttaaacaatgggcagcattatttttaggttttaaaamgattactttggatgttctctctaaagaatatattggagatgacaacagtggaaagagaattttgttaggggattttacagcagtctagaaaattaaaaatggtagcttggtccagggtcatagaggtggtgatataaaacagtgggtgcctccaagataaatctgtagatgaaattaacagaacgtgcattgaatccaagagtgagagagggtggtggccaaggaaacttgaaatttttatttgtttatttttttgctttctggttttgttctttgttctttggttttttgtttgtaagaaactccttaacttatgaagccattttgtcatagatgaatgatgaagtaataaaccaagaaatcgagttttatctttaccttttatgtacctgcaaaacattcaagtggagatcctaaatacacagtttgatatacaggtaaag

SEQ ID NO: 885764 - DNA, 647 bp, Homo sapiens
aggcaaatgttaccccgttttataaaagggacttgagcattcatggattttggtatctgagtgggtctcaaatatgcatatgattgtatgggactgtattcacaatggcaattgacgatctgctgaaagcaactcctctgggttgagcctccactcaacaaattaccccattccaaagacttggcataagggaataggtgggagttgttctccttatcggatcaatcttatttagtagcatcccagcaaaggcttagagaaggaagaaaaagaatgcagaaggaagaaacgaaggagagggaaaaaggagaagggaacggaacgtatggcaagagaagggagataaaacatagaaacctctttctgccagttcctggcctccctgrgatgggttaccagagcaaactcaggacacaacaacttaattgaacaggaacttgggtctctttttgtcatggcccataggcatgctatttgcatgtatactctttcttccctctgcatatagatttacctgctgagacgcaactcaaaatgaagagctataaacacagagaggaatcaatgtatttgtttttatccactgtctctaatgccctgattttgatatttttccactttagaagtcatgaagactcagtgttatg

SEQ ID NO: 885765 - DNA, 748 bp, Homo sapiens
atccaggaatttctaagtataatgcagaacttggggcatgagaaataatctctctctctctgtgcgtgtgtgtgtgtgtgttttctttatctgagcatgtttttttatatactgccttttctggtaacttcattaggtctgtataattatagtttgcttcaaccttagtctgcatcagtattcattattatctatttggtgcattgtagcagcataaatataactaaattactagggtcaaaccataatgggagctgttgtgatggtaattagagcagaaatatagtccttttttggtaaaacttgcagaattgtagcatgaggtgtgttcttatagggtacaattaaagccaggttgtgggttcaaggtggtaaaatgatggataatgaaggtacaccattaatcacagttccraaagatgctctgtatcaattcttttctctctgaaaggtagctcagaggttgatgctaagacaaaaaccaacagagggcttagaggtaagatgccaacttccgtgccttcactaattgtcactagaaagctgaaactgtatcgaactctttaaaaggaaaaaaagaaactagtagaaagcatctcagtgtggttattgaaatcattaaatttgaacttagtggagcaatgctttaattctatgtgtctttgccatgttggactgagtctctcacataacatctttagaatttagaatgtgctataacttggagcggaatcacccttattgtctt

SEQ ID NO: 885766 - DNA, 580 bp, Homo sapiens
tcatctgctaatggtcatatgagcttcccttgacttaatatatgtggaaagagggaggggcaacatagcaagaggagaggtaaaatggagctatctacttcatgccattctagttatactttccaagcctactcagtcacgatctcacaaatatgattcttcttttataatgaagtgcagctgtgcacatytaattttacagttcagtgaatcaaataattctcagttcatgacaggtaattcaggctgcataatcacttgatgttccataatcagggattcagtctgtcggcgcccaataacaagctagaagtttcttttcaactgaagaatatttgttacctgaagatgagatggccttactctaaagccccaaaaatgtatagtgtgattctcctgttggtgcttgccaggggggtcatgaaccatctcttctggccacagacatctaagttctagtgggtcctatggatcataaggcccaagtagctgagtagcttagatgagagccagaacttgatcagtagtggattttttttcttcaacttttaagttctggggtacatgtgcaggatgtgca

SEQ ID NO: 885767 - DNA, 580 bp, Homo sapiens
tcatctgctaatggtcatatgagcttcccttgacttaatatatgtggaaagagggaggggcaacatagcaagaggagaggtaaaatggagctatctacttcatgccattctagttatactttccaagcctactcagtcacgatctcacaaatatgattcttcttttataatgaagtgcagctgtgcacatctaattttacagttcagtgaatcaaataattctcagttcatgacaggtaattcaggctgcataatcacttgatgttccataawcagggattcagtctgtcggcgcccaataacaagctagaagtttcttttcaactgaagaatatttgttacctgaagatgagatggccttactctaaagccccaaaaatgtatagtgtgattctcctgttggtgcttgccaggggggtcatgaaccatctcttctggccacagacatctaagttctagtgggtcctatggatcataaggcccaagtagctgagtagcttagatgagagccagaacttgatcagtagtggattttttttcttcaacttttaagttctggggtacatgtgcaggatgtgca

SEQ ID NO: 885768 - DNA, 580 bp, Homo sapiens
tcatctgctaatggtcatatgagcttcccttgacttaatatatgtggaaagagggaggggcaacatagcaagaggagaggtaaaatggagctatctacttcatgccattctagttatactttccaagcctactcagtcacgatctcacaaatatgattcttcttttataatgaagtgcagctgtgcacatctaattttacagttcagtgaatcaaataattctcagttcatgacaggtaattcaggctgcataatcacttgatgttccataatcagggattcagtctgtcggygcccaataacaagctagaagtttcttttcaactgaagaatatttgttacctgaagatgagatggccttactctaaagccccaaaaatgtatagtgtgattctcctgttggtgcttgccaggggggtcatgaaccatctcttctggccacagacatctaagttctagtgggtcctatggatcataaggcccaagtagctgagtagcttagatgagagccagaacttgatcagtagtggattttttttcttcaacttttaagttctggggtacatgtgcaggatgtgca

SEQ ID NO: 885769 - DNA, 651 bp, Homo sapiens
gcttcagggttcaatcctgttattatcacattcagaaattaatcacagttctgttaaaacatctgttttaaataggaagttcaagaaacttcctctcttgatttggacttgtattcctcttttggattcagcttagctaattaaaaatacttccgctaataggttctgtcatttgctctaggaaatttttgaaccagatgatacaaactctcttgggagttctcaaccacctaataatttatttgcttccttccagcagatttcccactctaccatcagcccawattatctccttacctccccaggatgcagaagtcaccaataatcacagttataactgataaattcttttttggcaagctaattcttatctccagcatagattgctgttttacagatacaagcaaatttgaattagttcccatatataacattaactataaataaaaattaagtaatggaaaaataggtaagtatttgagcaaagcatgctgaggttctactcttttaaacacagatggtaaatacctaggttgttctaagtctatggctagtcacagaatagcatgcaaaataacattatgtgtgaaaactaaggtcactgcgctttttaaatgaggacaacaatattcatcaaaatattgttgtaag

SEQ ID NO: 885770 - DNA, 631 bp, Homo sapiens
cttaaatgacaggttcttataattttaaacaattttattttcactagtttcagggtaagaaaaaaagttcaactatgttcacagtgccaccaaacagaggggaaacaatggcttataacatgcatattaacgcatgcatatcartcctctaaaaaatggtgatccttactcaacatagaacatagtcatgtatttgacagttaacgtaaagtattttaagatatttcagacaatatcaaaattctggatttgtcaatggaatcaacttcccggaagatatagttataatttttcacaaatcaacctgcaggaagtgtgtgtaaaaacaggcccaaatttacacatcgcctcctcaaaaaagcaaccagatgtaggacataaaagtgatgtttatactgaataggcaaaagctggaagcatttcacttgaaaaccagcacaagatgaggttgccctctctcaccactcctattcaacatagtattggaagttctggccagagcaatcaagcaagaaaaaggaataaaaagcatccaaatatgaagaaaggaagtcaaactatccctgtttgcagatgacataatccctctagaaaactgcaatgtctcagcccaaaagcttcttaagctgat

SEQ ID NO: 885771 - DNA, 556 bp, Homo sapiens
gtaaattagttcaaccattgtgaaagacagtgcagcaattcctcaaagaactaagaacagaaacaccatttaacccagcaatcccattactgggtatatacccaaggaatataaatcatcctattataaagataaatgcacacrtatattcactacagcactattcacaatatcaaacacttggaattaacctaaaaccctatcaatgatagactggataaggaaaatgtggtacatatataccatggaatactatacagccatgaaaaagaacaagatcatgtcctttgcagggacaatgatagagctagaggccattatccttagcaaactaacacaggaacagaaaaccaaataccacatgttcttgcttataagtgggggctaaatgatgagaacatatggagacatagagggaaacgacacacacactggggcctattggagggttgaaggtaggaggagggagaggatcaggaaaaataactaatgggtactaggcttactacctgggtgatgaaatgatctgtacaacaagcccccatgaaacaagttt

SEQ ID NO: 885772 - DNA, 643 bp, Homo sapiens
gccagctcttactcgatgagattcttaactcctggtacccaggtgattgcagcatgccaggtgctctcgttctgggaggagtacctaactcaggggtagtaaacgcactgcctgggggccagatctggtccttagatgttttttatttgacttgtatagttaaatacttataaacagcttttgagatttattacatatggtaaagtaataacacagacagaaacaagtacaatactttattaactggctcagtgaactgtcacctagcagacactggggtaaccaccaaccaagcatggctggcccctcaggattcaccctgggcctccttcagtcacttgacactgtgctgtactttttttattttttttgagacagagtcttgctctatcgcccaggctggagtgctgtggtgtgatcatagctcactgcagccttcacctctyggattcaagagatcctcccgcctcagcctcctgagtagctagaactatgggtgtgcaccaccatgcctggctgatttgtaaattttttgtggggacagggtcttgccatgttgcccaggctggtcaactcctggactcaagcaatcatcccaccttggcctcctgaagcactgggattacgagtatgagccactgca

SEQ ID NO: 885773 - DNA, 657 bp, Homo sapiens
agtaaaactacaaaacactgccaaaagtaatcatagatgacacaaacaaatggaaacacctcccatgctcatggaagggtagaatcaatattgtaaaaatggccatattgccaaaagcaatcaaataaatccagttcaattcccatcaaaatatcaccatcattcttcatggaactagaraaagcaattcatatggaattaaaaaagcctcagcatagccatagcaagagtaagcaaaaagaacaaatatggaggcgtcacattaccagacttcaatctatacttacaaagctatagttaccaaaacagcatagtactagtataaaaataggtatgtagaccaacggaacagaatagagaacccagagataaagccaaatacttacagccacctgatctttgacaaagcaaacaaaaacataaagtgcgaaaaggatacacaattcaacaaatgttgctggcaagccacatgtagcagattgaaactgaatcctcatctctcaccttatacaaaaatcaagatggatgaaatacttaaagaactgaaaccataaaaattctagaaggtaacatccaaaaaaactcttctagacattggattatgcagagtttatgaccaggaaacccaaaacaaatgcaacaaaaacaaagataaat

SEQ ID NO: 885774 - DNA, 544 bp, Homo sapiens
atcacacagagatcgtttgatcacaagcctctactgaagtgaagattaacatcattaggataagttcaatcattatagcaggtggacttgactctgaatatcagttctcaaaccgtagagatctggtagaagagtaggtgggaatatatttcatccttaggggttctagctcatgtcaggattcagaaataagcagctgatgagtgtygagtcctgaacagaaccatcattttctcctggatagttcagggagctctgagataactgactcttgtcctgttgtcttccatcagacctagaagaaaacaaaagttccctatcagaattcaagctccacaagggtaggacagtttggtgttgtttatagctgcatccccttttctaaaacagcacctactgttgtaacacagtaagctcctaataaatatttggaaacacagcagtatccttgggatcctgaaaaaaaaaaaaaaaaaaggcagaaggccaggcagtgtttgtccttctaggccagtggtttttgcctctgactgcttattaaaaa

SEQ ID NO: 885775 - DNA, 494 bp, Homo sapiens
agtgggcgtccttgtctttttccagttttcaggggaaatgctttcaacatttccccattcagtataatgttggctgtgggtttgccatagatagcttttattactttaaggtatgtcccttctatgttgattttgctgagggttttaatcataagttgatgctggattttgtcagatgttttttctgcgtctattgaaatgatcatatgatttttctttttcttctgcttatgtggtgyatcacatttattgacttgcataagttaaaccaaccctgcattcctggcatgaaacccacttgatcatgatttatcatctttttgatatgctgtttgattcagttagctagtatttggttgagatttttgcatctatgttcatcagggatattggtctgtagttttctttttttgtgatgtcctttcctggttttggtattagggtgatattggcttaacagaatgatttaaggaggattctcacttcctctgtct

SEQ ID NO: 885776 - DNA, 669 bp, Homo sapiens
tttgttctattcttcctttggtgctgccttcaagctaatatctctgtgtcaaggcccaggagacagatcattcatcacccgccctgccttggcatctggctccgcaacttggcagaggcagaaagcattctgcgtttccttgcctgcccccacgatgcagaagcccccagccctctgtggctaagcaagtgaccactggtcaaaatcaattccaacctaagtttggcccttagctgtcacctgagtggaggccaactgcaagtgccatggctgtggaccctggtaagccagtttgtcatcctgtgacatgagggacrtgcaagtggaggggaaggctacctgccctggggtccccacagcactccatggggcactgcaacagacctgggtttgaatgcaagctccaccacctacttggtccgtcactctgagcaatgacttagattctctaaggctcagtttcctcaggtatgaaatggggctcatggggtaggtgaggagaaaaaagtgaaggcgtaacacagttcctggcacctagtgagcactcattcaatcagaattcccattcttcttctggtttcagagcaactatagcaccaggaaaagtccttacccgaaaggagtctcagtttccccatctatgaaaggaagtagcaatatgagctgaac

SEQ ID NO: 885777 - DNA, 669 bp, Homo sapiens
tttgttctattcttcctttggtgctgccttcaagctaatatctctgtgtcaaggcccaggagacagatcattcatcacccgccctgccttggcatctggctccgcaacttggcagaggcagaaagcattctgcgtttccttgcctgcccccacgatgcagaagcccccagccctctgtggctaagcaagtgaccactggtcaaaatcaattccaacctaagtttggcccttagctgtcacctgagtggaggccaactgcaagtgccatggctgtggaccctggtaagccagtttgtcatcctgtgacatgagggacatgcaagtggaggggaaggctacctgccctggggtccccacagcactccatggggcactgcaacagacctgggtttgaatgcamgctccaccacctacttggtccgtcactctgagcaatgacttagattctctaaggctcagtttcctcaggtatgaaatggggctcatggggtaggtgaggagaaaaaagtgaaggcgtaacacagttcctggcacctagtgagcactcattcaatcagaattcccattcttcttctggtttcagagcaactatagcaccaggaaaagtccttacccgaaaggagtctcagtttccccatctatgaaaggaagtagcaatatgagctgaac

SEQ ID NO: 885778 - DNA, 621 bp, Homo sapiens
ggaggaaggggacacccgtctaaccagtcagatcagccgaatcaaccctggtgatcaatggggtgacagatgccgcagccagattgccctcacatcagatagatgatagatagatagatggatagatagatagatagatgatagatagatagatagatagatagatagatgtaatgatgtaaaatgtaaccactcagaaaaactgagtgaagcctacatgcatgcaacctctctgtgccatctttgtaacctcttgtgaggctataattatttcaaaataaaagggttgaaaaaatactaaggatcttcagccagttcacacagtcaaatctraaagtgaacagcattgcttggacatgattgtaaattttctactcttgttattgaatagaaaggaagtttcccagagggcacattaggaaggtagagcctgctggatcttcagaaattgtcccctcgtaagcagcacctggatcaggaaacagacacttatccttttctgccattgtcccccatccctataagggtcaccactgtccttacttcaaaccacataggtacattttgagtattagtgtgttttatatagatgaaccaatatagtttttaatgagaattcta

SEQ ID NO: 885779 - DNA, 564 bp, Homo sapiens
tgtgagttcaagtggtttatttggaggcaatcccaggaaacattagtaggagagcagcaggaagacagagcaaggaggaaaggcaatcttttgtgtattaataggcagcttatcacatgagcagctagagctccatccaactggggacctttggaagagagtgtagaacacatcttattcagagttgtctcacttgcggggtgaaggttgaagactgctccttggacaatgccttctccatttcctcatacttcacctgcctgtgattgggccaagcctggttcccattgcccaagaaagctctcaggaagatgctcaagtgcttgcagtaagaagcaatcagcttgcaggggatggtgagggccactagcttygcctctgtcctctttgtttttcagtgtagatgataattgcaggagactgatgtagtcctcagcacaggccacgaagagactgttagaaggaaagtggaggaagattgattattctgatgactcttcaccatgtaatcttgtattctgatgactcttcaccatgtaatcttgttgagtataaagtcaaccc

SEQ ID NO: 885780 - DNA, 722 bp, Homo sapiens
agttcccagaataaagtgaaacttgcatgttatttttttaagttgaggatgaagcaaaatatagccaaggaaggaatacatctgcatatttaatggccaaataaataaatataatacaaccactaagattttcaggagtttacagttactgcaatgataaaatttggtttgtttttctttcaggttattcttttctactttttcctctgatagagcagttgaagcagttaaaaggatttcttaaaaaatctgacaacactgcacatttatgctgaatacatacagtatctaatttaaagtaaaaggaactaaactttttcccctcacttttgattcttaatattctttatcagctggttgaagagttcctagctctgactgttcatgcttgcaaatacgagttaaaaatactgtgagagttcatttaatttccacttaaaattcacaggaagtcatacttgttaccaggaaacactgtacttcttttagagaatatctaatccagataggctaaattatatccattacactckatcatggctagttggtaaaagctgccaaggaataccttagctatttttgatgagtacaacacttcagtggtgtctcatttccatactgacataagggctaaacaggctttcttcagaaaaacaccttacagaaatctctgaagtgtgctatgcctagatcttccttgagaaaaagatattatagagatg

SEQ ID NO: 885781 - DNA, 607 bp, Homo sapiens
acagatgagggctaagagttcagttgaaccatttcacttatttatccaacatccattcagtgacagggtagggagagagaaagatattaattagggatgatctttcagcaaagctgacattctgagatctgaacaccttatggaaatctggtggaggagttccagatggtgggaaacacaggaagcaaggaaaaatgtgagtgttcaaggaagagaaatatctgtagggctgagttgggggaggttattgaaaattatagttgaagargtagaatgatctgcagatttgtggggtaggctgggtcaaaagtggagaaatttggtttacatttttaaaagatcattggcaattgtggagaatgaattgcaggaaggtaagtagaagcagagagaatagttagaagtgtttatgacagaagtagagtgtgggaaacccagactagaaggattgtagtggaaatgaaaataactgcataaattcaaggtctgttatttagaagggtaaagtcaacttgctgctaatctactagatctggatatgaagaaaaggagagtaaaaaaacaccctggggtttaagtcttgagtatcgaaggtatacagtgctat

SEQ ID NO: 885782 - DNA, 633 bp, Homo sapiens
gctggcttccatctggagatctttgatgggtacaaatggtagccgactttcttcgatcatctctcgaacgggagttcggtgagcagcaactcggctcgtccgggaatccagactttccggaagacggaccctccccccagtccagcttagcccgcctctctaggatttacgcgcgcgctcygctctccctcctaactcgaccctccccttgacccacgcctctgcgcaggcgccttggcgggctgtggctgcggagttggcgggtcggcgcctgcgcactggagtcccccgcgattttttcctccggggtgggcgaggaggctgtgcggccttccccagcggctgtagcaggagacctgcggctgcatctcccagggccttccggcggggccgagggtaggaccgaggcacttcttccttgcaagcgcgtttatttgtattttcaaccacacttcagacgctactggtttataggaacgttaagtttactgagtgtgcagctacgctcccctgggtttttgttcctttccttaaagggccaggtgtaggagacagtagtcctgctcccaaaaaaagaataaatagaagtgcccgccctcttgggctggacccccgtggccaagggagttttta

SEQ ID NO: 885783 - DNA, 575 bp, Homo sapiens
aagtaggtcactttatatgagaacagattttaaagaggacaggaaggtaaaactagttagaagttggctaagttgtccaagcaagacctgatgggtgctgaaatcgtcatagcagttgagatgtggcctcaaagaagcacaaggtggaatatcacagaagtcataggygaaacaggagaatacattaacagagagtttctccttaaccaaactttactggggctcctctgagtcctcttttggaggaggccccaactttgagctctatcctagacctgcttcgtccagttttagcaaaaatcctgctggtatgtgatcatcctcagtttagccagaatccttttagctttggttttcctcttagtaattttccatccactgacacccatcctgctcttgcttcttggctataaattcccacttttccttatcatatttggagtcccatcactctgtcctgctacaaaaccccattgtagccatccccctgaatagtcagccttagccaattttaacacttgtctttaatgagtggcataaaaacttttttctttaacaacactgtcacagaaacc

SEQ ID NO: 885784 - DNA, 638 bp, Homo sapiens
gccattctcctgcctcagcctcccaagtagctgggactacaggcgcctgccaccacgcctggctaattttttgtattttttagtagagacggggtttcatcgtgttagccaggatggtctcaatctcctgacctcgtgatccgcccgcctcggcctcccaaagtgctgggactacaggtgtgagccaccgcaccyggtccaacgaaaactttttaaaacacaaactgaagaagtacagggacccaggaaggtgagtctatgtttggtgctaatttccccctgagggcactgaatgattgtagaaggagtagctgagagaccaagggactgagcaaagctttggatggtctcttgggaataagtcagcagtgattgaagtccaggatcagatccatgaagtgggatctcttagtgaactcacctcactatggattttgactctaaagggctagaatctaggaataaaggtaaattagtaatggaaataggtctcataagaactgtagcctaactttgaatcttaccagttcctgaaactgtattaaggtgatctctgagagcaagtggttccaaaccttcagagtgttagatctccaggcagaaataaatacaaattctctcaaaaggaagatgtcatc

SEQ ID NO: 885785 - DNA, 603 bp, Homo sapiens
tttgaattcaaagcctggtaccttaacccctgagaactagactgcctgttaagagtcaatgacatgacacaaaccccacagatcctgaggctgcatggcacagaaaagagcctttacaggatcctctaagttaatcccccatggtacagataaggcaactgaggcacagagaagtcaggggactcacctaaggtcacaaagcaggtttgcagcatccagtgctcttggttttctcacactcagagtgatttctccatataccttcccccatcactgcatgcaagcagggcctgggcagttctcaggcctccctgtgccagctctttcagtcagaaggagttggtttctacygtagagcatggaagcatggttaaaagagctaactctgaagacaaccagcctgcgttcacactctagctctgccatcttctgctgtggccttgggcaagttattaacctctctgtgcctcaatttatctcccgcatttaatgataatagctgtgtggattaaatgagtcactatgtataaggggcttaaatcagtacctggagagtagcaaggactcaataatagttagctactttatgatgaccactcccac

SEQ ID NO: 885786 - DNA, 652 bp, Homo sapiens
ctgtctaggttatttcttttgttgctaagcaatgaatattaattgtggaaaatttgaaaaatttaaatacaaggatgaaaacaaaatgcatgcttaatataaaaaaaaggtatagagatatacatatttaatatttgggatawttccctccaataaataatgtttctactcatctccaaacacacacacatacacacacacacacaattgaaaattctgacttccattctgcttttccacttagatcataagtatcttgtcaagtccttaaacattaaaaaaaatggcatacagcattctttatgtccataacgtagaaggcaaaagactactattttttttctttttagtgttgaatccccaacattcaaaacagtgcctgacaaatagtaggtgctcaataaacatctcatgaatggataaatgaaataactagaatgaacaaaggaatgaatgaatggttttccctctgaaaactgtgtcaggtaaagtggacaactcactgcttctccaagaaaccaataaatatgtcagaagcaggctccataacaatcatttctcaagtttatacaggttgagccaaacctgggtatgaaattgtcttaactcattttatcatatactttatcttctatgaatcccaaacaatgca

SEQ ID NO: 885787 - DNA, 652 bp, Homo sapiens
ctgtctaggttatttcttttgttgctaagcaatgaatattaattgtggaaaatttgaaaaatttaaatacaaggatgaaaacaaaatgcatgcttaatataaaaaaaaggtatagagatatacatatttaatatttgggatatttccctccaataaataatgtttctactcatctccaaacacacacacatacacacacacacacaattgaaaattctgacttccattctgcttttccacttagatcataagtatcttgtcaagtccttaaacattaaaaaaaatggcatacagcattctttatgtccataacgtagaaggcaaaagactactattttttttctttttmgtgttgaatccccaacattcaaaacagtgcctgacaaatagtaggtgctcaataaacatctcatgaatggataaatgaaataactagaatgaacaaaggaatgaatgaatggttttccctctgaaaactgtgtcaggtaaagtggacaactcactgcttctccaagaaaccaataaatatgtcagaagcaggctccataacaatcatttctcaagtttatacaggttgagccaaacctgggtatgaaattgtcttaactcattttatcatatactttatcttctatgaatcccaaacaatgca

SEQ ID NO: 885788 - DNA, 493 bp, Homo sapiens
aatttttttcccaaaagtttcaatctctcgtattttaaaatatatatgatgaatgtctactaaagaaagaaataaaatttactcttctgtatatggcattgtacactttgttgaatcaatattgggacatgtcatttcttagaaattgctttcttggttacattagctaggatatagtctgggtagtgctgttatttaccgaattcagataaaatgagaatgtatacaattctctgggaatatattatagtwatggttctgtaaaatacattatcaggtaaattgttgaacagcattctagtaaggcaatgtattcttatcttcaaccataatgtctttttaaacaaaatctttcaactttccaagtattcaactcattctctattattttgataataaacattatagcatcttttattagaaactgaccagagaagagtgtctgcttttagtggacagggaagtgcaagtttaagaggaaagtattcgagtt

SEQ ID NO: 885789 - DNA, 658 bp, Homo sapiens
atatatacctagcctatgttgaggtataatttctttttttgcagaacaaaggtatttataatcctaaacaccccctaaacaaatgcttttggtattttattttttctgggggtatttaaaaataatatacttttttttgtacttgtacaaagtcaagcaaatgcaattatggcccctctgttgtagaagagtgcatttaatttattaggtagcttgttttgtacacatattctcctggagcatctctgactttctcaaatattaggttactatacgttgcaatatttgatataccctccactgtgcatcaatcctcagagagagtgaaatcttttattggattggttgaaaatcaaaggcacatagaagcgatttgtaatctataaaatgctctctctgcaccagtgccacccaccaaaaagcaacacaataggtaacttaatgattagagaaatagtgatgawctaaatcaagttactcttaatctttaacattcaatgtgtgcatgtgtgggcctgcagggaattttggaaaatgagcagagacagatcattttgttagaagatcttaatgctagatgagaaaagacataatctgcatagtcagatatacagggatgccatttccagacattagtgcatacagccagcttgcacct

SEQ ID NO: 885790 - DNA, 612 bp, Homo sapiens
gctatgctgatatgttttattttctcagccttattgccttggtatttagaagtaattaacaggtacttgccaaatgagatatgggatgtgtgaaagactaattgttgaatatgggcaatctctatacatgtttcttcatttcaaactttaaatcaacttggtatgtatttttcttttttttttctttttgagactgagtctcactctgtcacccaggctgaggtgcagcggcacaatcttggatcactgcaacctccgccttcttggttcaagacattctcctgcctcagcctcctggtagctgggattacaggcacccaccatcacgccyggctaattttttttttttctttcagtagagatgggatttcatcctgttagccaggctggacttgaactcctgacctcaggcaatccgcccaccttggcctcccaaagtgctgggattataggcatgagccactgagcctggcctttggtatgtatttttcataaaaggaagctgaggtttaggaggcaaaattgtacacagtaaagaactaagtggatgtaccaccaagactcagtttctctgactccagagatactgtctttttgtccgtatacttcaat

SEQ ID NO: 885791 - DNA, 563 bp, Homo sapiens
acaagatccatgcaaagatccactctggtgaacatcatctaacttttagaaacgtatgccctcactgctaggcttaacatgactaccgctcaggaagcctctgaaacataaacagaggtagagatcccttcatttctgcaaatttgatggaatttatcatgggaaagagaagcttttctgaaacaatgcttaaggtttagaattaaaggcatacaaataaatcttatttttagaaatatgaagccagaaaatataactatttctcaaaragaatttcccttaggcgttaaaagttgatgatatagaaatgacaaagcattataaaaatcttagacattagaagcaggaagagactataaaggttcctgattataaggatgattaaccttcagtaagtactcatcatgggcttgacgtgttgaaagtgctttcatatgaatatctcctttaatatttataagaagggtattaagaaagtagtactattgtccccattgtacagatgaggaaagtaaggcttacagaggataagaaacttgcccaagttcacacagccatcttga

SEQ ID NO: 885792 - DNA, 563 bp, Homo sapiens
acaagatccatgcaaagatccactctggtgaacatcatctaacttttagaaacgtatgccctcactgctaggcttaacatgactaccgctcaggaagcctctgaaacataaacagaggtagagatcccttcatttctgcaaatttgatggaatttatcatgggaaagagaagcttttctgaaacaatgcttaaggtttagaattaaaggcatacaaataaatcttatttttagaaatatgaagccagaaaatataactatttctcaaagaraatttcccttaggcgttaaaagttgatgatatagaaatgacaaagcattataaaaatcttagacattagaagcaggaagagactataaaggttcctgattataaggatgattaaccttcagtaagtactcatcatgggcttgacgtgttgaaagtgctttcatatgaatatctcctttaatatttataagaagggtattaagaaagtagtactattgtccccattgtacagatgaggaaagtaaggcttacagaggataagaaacttgcccaagttcacacagccatcttga

SEQ ID NO: 885793 - DNA, 605 bp, Homo sapiens
ctcaacatcatcaaattttgaagggagaaaaaagaatttatatggactttggtggccatgcctaacagagcaagttttccttgattcaggagacctgagtcctcccatctgatataccaagctgcactgttcaaacaaaactctttcagttacaatcccagtcaagcatgaaacgtttgttctgctgttgtttatatgtgcaacgtactttgagttcattaaattggcatcaccttgttacagtaaagtctctaaagccaaacaaaactaaagaaaataaaatcagagttttcaaatattcttgtgaaaaatggagaaatgtaaagttgaaaattgtttaaagaaaattttaattgctacaaagaaaataaaataccwaggaatacaacttacaagggacatgaaggacctcttcttcaaggagaactacaaaccactgctcaaggaaataagagagaacacaaacaaacggaaaaacattccatgctcatgggtagaaagaatcaatatcatgaaaatggccatattgtccaaagtaatttatagattcaatgctattcccattaagctaccaatgactttcttctcagaactagaaaaaacta

SEQ ID NO: 885794 - DNA, 644 bp, Homo sapiens
atttgactgtatttggagataggatctttaaagatgtaattaaggtaacaggaggtcctatgtttgggccctaatccaatatgactggtgtccttataagaagacaagattaagacacagtcaatacagactgaggaacaaccatgtgaggacccagcaagaaggaggacatctgcaagccaaggagagaaacctctgaagaaaccagacctggacttccagcctctagaactgtgagaatatgcatttcaattgtttaagccacccaacctgyggtattttattatggcacccctagaaaaccaatacagcctctatttccatcttttctcctctttgcttctttttactacacctcatccctgttttttgaatattcagagcagtaggcatgccccagctctctttcctcctcttgtttatttgcatatcttcttatttcttgatcaacacatggaatacacaaaagtgcctattttgctggaatcattgttctttgagtgtttcaactttcctgtaccatagattcgtcatctgtcaaatggagataataaaagtattaatctcatataggcccattgcaatgatttaatttgttaaccaataagatgcctataacagtgtctggcacataataaacccaa

SEQ ID NO: 885795 - DNA, 565 bp, Homo sapiens
aaggtttttgagtgaaagaatgaaggagcctccactcgctgcaggaatcccttctagaatgcctggtcaatgagcctctagcctcttctggattggcatgggtggagtcagactgactggagttgaaatctggcctctctgtcttgtggaacttgcagcaagccacttatccctccaaacctcagttccgaaatctgtaagatgtagayaataacatccaccttaatatgttgtcagtggactcagtgaggtagcatctgaagcacagtgccttggacatatgaggtgcttctgaaaggcagtagagattgtttaatatagtggatcagagctctggctttgaacacagacagccttggttcaaatcccacatcaccacttatgtgctatgggacctttggcaaaatactgttgtccaaattttgagcctcagtttcttcatctgtagactggaggtgatagtatgtctaatagagttgttatgataattaaattagattctgtatgataaactcagcttcaagcatacagtaagagctcataagtagctgactgctactattag

SEQ ID NO: 885796 - DNA, 565 bp, Homo sapiens
aaggtttttgagtgaaagaatgaaggagcctccactcgctgcaggaatcccttctagaatgcctggtcaatgagcctctagcctcttctggattggcatgggtggagtcagactgactggagttgaaatctggcctctctgtcttgtggaacttgcagcaagccacttatccctccaaacctcagttccgaaatctgtaagatgtagataataacatccaccttaatatgttgtcagtggactcagtgaggtagcatctgaagcacagtgccttggacatatgaggtgcttctgaaaggcagtagagattgtttaatatagtggatcagagctctggctttgaacacagacagccttggttcaaatcccacatcaccacttatgtgctatgggacctttggcaaaatactrttgtccaaattttgagcctcagtttcttcatctgtagactggaggtgatagtatgtctaatagagttgttatgataattaaattagattctgtatgataaactcagcttcaagcatacagtaagagctcataagtagctgactgctactattag

SEQ ID NO: 885797 - DNA, 620 bp, Homo sapiens
cagataagaaaaacagattttcacaatcctgctagctctgataggttcactaaatcttgttgatatttgtacacataactcgcagttcattggtacacattagaagcttgtagcctatggaaatgctatttacatgtgggggaaataatatgtaatttaccaaaggatcaacaattatttccagtggtaagtaggctgtgattattttacaagatggaaaacccttataaattcacttattgctggtgctggatgatgaaatgtaaatagttgtaaaagatagcatgctttttttttcctaacttgaattcaccagtgcactgaatgaaaaaaatggtaaaacaaaaccttgaaatgatggartcatggaattacagcataggagaaaaaaaaattctagaaattgatcattcaagtgtgtcctagctatgcaatgctcccgaaagtagagctctgtcctatttttacagatccccacagaaggaaattatgtaatttataccctttagttacattgactaaaataaattgctaacaagtctaataattctattttgacttgcttatgtacttattggtttcagtgtggaataacctatgactcctttaatgagtaatag

SEQ ID NO: 885798 - DNA, 604 bp, Homo sapiens
ccctcttcctcactgaggaagatatatgttctaaacacatatcatatggtggccccttcctgcctaacatcctctattggatctgtattagtccattctcacactgctataaagaaatacctgatattgggtaatttataaagaaaagagttttaattggctcacagttccacaggctrtacaggaagcatgatgctggcatctgcttggcttctggggaggcctcaggaaactcacaaccatggcggaaggctaagaggaagcaggcatgtcctacatggctggagcaggagcaagagaagagagaggagagataccaggcacttttaaacagccagatatcacaggaatatcaccggatatcacctcaatgacagcttaaagggagatggtgttaaaattgcattgaggattcaatcacctcccattaggccttacctcccattaggcattgaggattataatttgacatgagatttgggtgaggacacagatccaaaccgtatcaggatccctaatgccttcatgacaaagttcaaactatttagagtgtaaaccacagtctgtcataatctaatgcttcttcacttttcccaaaatattg

SEQ ID NO: 885799 - DNA, 677 bp, Homo sapiens
ggaggtgaggagaaataggaacacttttacactgttgctgggagtgtaaattagttcaaccattgtggaagacagtgtggtgattccttaaggatctagaaccagaaataccatttgacccagcaatcccattactgggtatatactcaaagkattatgaattattctactataaagacacatgtacacgtatgcatattgcagcactatttacaatagcaaagacttggaaccaacccagatgcccgtcaatgatagactggataaagaaaatgtggcacatatacaccgtggaatactatgcagccataaaaaagaatgagttcttgttctttgcagggacatggatgaagctgaaagccatcattctcagcaaactaacactggaacggaaaatcaaacaccacatgttctcactcataagtgggagttgaacaatgagaatacatggacacagggagaggaacatcacacaccagagcctgttgggggttagggggcaaaagaatggagagcatgaggacaaatacctaattcatgcagggcttaaaacctagatgacgggttgataggtgcagcaaaccatcatggcacatgcatacctatgtaacaaacctgtacgttctgcacatgtatcccagaacgttaagtaaaataaaaatttaaaagagacgcag

SEQ ID NO: 885800 - DNA, 677 bp, Homo sapiens
ggaggtgaggagaaataggaacacttttacactgttgctgggagtgtaaattagttcaaccattgtggaagacagtgtggtgattccttaaggatctagaaccagaaataccatttgacccagcaatcccattactgggtatatactcaaaggattatgaattattctactataaagacacatgtacacgtatgcatattgcagcactatttacaatagcaaagacttggaaccaacccagatgcccgtcaatgatagactggataaagaaaatgtggcacatatacaccgtggaatactatgcagccataaaaaagaatgagttcttgtyctttgcagggacatggatgaagctgaaagccatcattctcagcaaactaacactggaacggaaaatcaaacaccacatgttctcactcataagtgggagttgaacaatgagaatacatggacacagggagaggaacatcacacaccagagcctgttgggggttagggggcaaaagaatggagagcatgaggacaaatacctaattcatgcagggcttaaaacctagatgacgggttgataggtgcagcaaaccatcatggcacatgcatacctatgtaacaaacctgtacgttctgcacatgtatcccagaacgttaagtaaaataaaaatttaaaagagacgcag

SEQ ID NO: 885801 - DNA, 626 bp, Homo sapiens
tttcagttgcttgtagttacttcttgggatcctttttactctcctttaccacctcatttgacaccctcctctcatccttcatgtcataacccaaatatcaccttcttagagaggttttctctaaccatattttcagagtagctcctatccccctaatgttttctatcagaacaactaatttccttcatggcatttattacactgtcaatattatatttactaaccccatcattatatgaaagacagggacaatgtctgtcctgttcagtgctgtaattccagtgtgtagcacagagcctattctcaatacatatttgtgaagaaataaatgaatacttgttgagcacacattttargtgttatcttgccttggaaatatttcctaataatccccaccgaattaaagcttcaggtgagtcctgatgaattaacggtttctcttagattccttccttccattttatactataacaattgtttttctatgttagggttgctgattttcttatcatttttccccaaaagattgtgagttccgtagagcagacttgagctttgttcatctttgcgtctctgccagtcctagcatattatctggcccacggttggtgttcaatagttttttg

SEQ ID NO: 885802 - DNA, 626 bp, Homo sapiens
tttcagttgcttgtagttacttcttgggatcctttttactctcctttaccacctcatttgacaccctcctctcatccttcatgtcataacccaaatatcaccttcttagagaggttttctctaaccatattttcagagtagctcctatccccctaatgttttctatcagaacaactaatttccttcatggcatttattacactgtcaatattatatttactaaccccatcattatatgaaagacagggacaatgtctgtcctgttcagtgctgtaattccagtgtgtagcacagagcctattctcaatacatatttgtgaagaaataaatgaatacttgttgagcacacattttaggtgttatcttgccttggaaatatttcctaataatccccaccgaattaaagcttcargtgagtcctgatgaattaacggtttctcttagattccttccttccattttatactataacaattgtttttctatgttagggttgctgattttcttatcatttttccccaaaagattgtgagttccgtagagcagacttgagctttgttcatctttgcgtctctgccagtcctagcatattatctggcccacggttggtgttcaatagttttttg

SEQ ID NO: 885803 - DNA, 643 bp, Homo sapiens
aattaaatgacagaaaataaacagcattgaagtcctgaaaatttttaattactattttaactagaatgcaaagctgtagatttccttcaaaagccttatttgttcattcttaatttttaaaaaatgatttttaattcatttaaatgttatagagtctatwctgagttacatgttgttctcagtgctgggcacaccagaatggatggtccctgctctcagagttcagctaaaggacttaacaagtaagctaagaagataatagtaagataatatacagtgatgagtactacaatgcagatagactaaattaattggaacatatccgttaggatatttttataataaaggccaaaatacagtagcttaaacaaataggagtttattctctcactgaacaagacactctgaggctgttaataactgctccacagtgtgggtgactcaggctctttgagtcctactgctttgccagcctcatctgttgcttctatttttgtggtctgagatggctgttcagctccctctacaatgactataattcggtgagcaagaggggaggtggggaaggggaggagtacagccacccttcaaatgacctgaaagtggtgtacagcacctgtgatcacgtaccactggcaagaac

SEQ ID NO: 885804 - DNA, 643 bp, Homo sapiens
aattaaatgacagaaaataaacagcattgaagtcctgaaaatttttaattactattttaactagaatgcaaagctgtagatttccttcaaaagccttatttgttcattcttaatttttaaaaaatgatttttaattcatttaaatgttatagagtctattctgagttacaygttgttctcagtgctgggcacaccagaatggatggtccctgctctcagagttcagctaaaggacttaacaagtaagctaagaagataatagtaagataatatacagtgatgagtactacaatgcagatagactaaattaattggaacatatccgttaggatatttttataataaaggccaaaatacagtagcttaaacaaataggagtttattctctcactgaacaagacactctgaggctgttaataactgctccacagtgtgggtgactcaggctctttgagtcctactgctttgccagcctcatctgttgcttctatttttgtggtctgagatggctgttcagctccctctacaatgactataattcggtgagcaagaggggaggtggggaaggggaggagtacagccacccttcaaatgacctgaaagtggtgtacagcacctgtgatcacgtaccactggcaagaac

SEQ ID NO: 885805 - DNA, 633 bp, Homo sapiens
ccaggggacgagccctgtcaagttttaaaattaacgtgagtgtggtgtgtagaattgttgtccgctgctggtcacccacaggtgtaactacagtgtagctctgaccttgacctcttattcctcctcaccagggtatgggctgagccttagtcagaggtctcaaggctggtttccttcccagtgcccatctcagcctcccctccacttgtctcttggggtgtgggtttctctcttacattgttcactcctgcgtcccatctgatgtgaccrggctgcttcctgctaaactcatcaggggccttgctgtccgtctgcctgttcttgttctgggtataatcttgtatgggcatctcccatgtccacctttcactccagccattgctaccaccaccaacttcaagctattgtacttaacagcacctggggcagctataccacacttctctcacttcctgccccagggcttccctgtgcagagtttaagattcctgtagggacacactcagcacccacgtatatacaaacctgggcgtgggagtcggtgagccagctcataccagtttgcaagagctgattgttagatattcagaacatttactagacaggtgctaaaccagcgacagcttgaaatga

SEQ ID NO: 885806 - DNA, 661 bp, Homo sapiens
attgagtgctctgtcctgcaaattcttgtctttgtctttctggacccctagctctatcttcccaatttaggatgtttcccaggcactacttccattcctacttcctgtgatgcaacagagaaactctaccaagacagtatgctgagatgattttagggctcaccttgtttgttttctgtctctaagggatactatcctttgttttctgatgtccagtatcttgaaaaccattgttttatatagtttgtgtgtgttttatttgtttgtttcaggcgagaggataaatctggcctctgttgcttcatcttggatagaagtaggtgcctctctccatggctttaaacaccatctatatggtaatgactgccaagttcacccctgaacttcagactcctatatccaacctgggatagtcatggccagcacctcaaactcaccatgcccaaaatggaacttttcactgtcctctcatcaaatctttccttcctgccatccccatctcaggaaacgtcayctagatgttcaggcaaaaaaccttggacttatctttttcctctctttctctcacattctatatagctctacctcagtagctctttttggcttgaacttcaaaatgcatctcaaatctgagacccttccattactcccaccactggtt

SEQ ID NO: 885807 - DNA, 654 bp, Homo sapiens
cattgatcagcttccacttactgtgtagctgggccaattgcaaccaagtcattgctgtttggctttgcagctctgctagctctgctagcagcctcagggccctctgtctgcttcctaggatatgctcagggccttggccatgcaccagccccagccctggtgtcaatctcagtcccagttccaaagtcagctcaacccagttccatccccagccccaggcccagtccatctctagcctccaggggtctgatggctccgggatctctggccacagtagcccaagaaccttrggctcactttctctgggttcatctgaggactcactctgcctcctcagtcccaccacacagcagccaagtctgcaaacaggagactgctgactgctgtgtcatccctgcaagggtctgtctgtgcaccctgaggccgcttccagctagctctgccagggtgctttcagattcccagccttctctgcaggcggaggggctggagctggtccgggcatcctcctggtgtgaaggtcacctctcatccgcagcaggctgccttgtgatattgccctgacgaccagggcagcactggtgcctgggtggtgtgtgggtgtggatgcgaagacctgaatgtgtgcacgtctatgtcgtgtctgcatgtgct

SEQ ID NO: 885808 - DNA, 581 bp, Homo sapiens
aaataaaaatgaaagcggcacctctacacatgattgtgaaactgtcacaaaccaaagatcagcagcaggtctttaaagagccagagagtgaagatagattacctacacaggaatggtgtttagactgacagctgacagctgagtaaaatctttaaagtatttcaggaaaataattgtcaactttgaatagtgtagttagtgaaatcatctttcaagaacaagcacaaaatacattttcagacaaacaaaaactataggcttttcaccctattacttcaggattacttccagaagaaggaaaattatcccccaaatgaggacaataagggtggtgtgcctgcaatggaaggacaatgagcaaggaaattgttacgcttgtgggtaaatctaaagaaacattagtgatatgaaattatagcaataacgcctgcatcatgggrttaagaaaaaaaacaaggtaaaagaaaaatcctgaacaagagtgtagaaagtaattaagaaatcaaaagtagcatcctataatttctcgaatgttcaggacagttttacatttacatcaatatgcatgtcaaattttctag

SEQ ID NO: 885809 - DNA, 604 bp, Homo sapiens
cttactgttacaattttagtggctgcccgtattgtctaagtgtgatgtatgtaagttgcacagcttactggttccctctcccaaactcaatcctggataagctaaggaagagggatggaagcaacaaccgaggagtaaacatgaggaartgtgttgagaaccaaccctctgggaggcagaacctgtgtggctacagagcctggagccagggctgctgtctctaaacaggaaagacagaagaacttctagagttcatgccaactgctcattatgggtgcagtctcaggcctcagttatgatatctgttagccagaattaatacaagaacatagggcttatcattttctgttgctacagaaaggaactggtgatgtttaattttcccaagagtatggaactaacataggatgagaaaaataggccaaagggagagagcttctgttttctcacctgcagagatgggagcaccaagcctagcctgacagatcactgggccagttcccagagaaagccctcacaatgagcagttccacactttccttgtactgcccttccttcttcaggaagcaccatattttcccatcaactagaaggtatctttctg

SEQ ID NO: 885810 - DNA, 592 bp, Homo sapiens
tgtgtgaagaggtcaactacagtgtttcctgctttttctcattaattggaatgagctcactggggcactggctccttccgagcttaggctattgggttgctggtgatatttctcattaaaaacattatgttaataaaggactattatgaaatacggtttagctgttaaaaaaagagttagtgacatatcttctgataaaaccaagaggaaaattctatgtatgcatgtgagtgtgtgtatatatgcatgtagatatgtatatgcacatacatattcaggggcagataatatactccacaaagtrgagaaaggtctcctcaggcatttgtgttgatttctttcagggtttgagatggagaggtagtctcttttttttttttttcattgacatatctttatagtttctagttgcagcacacattatcatgtgattttaaagaatgatttgatactaaataataataaaatgaaaaaaggcatgagggtcataggggcaagctcttgtggtgccttcagctaagggaccctcagtttctatgcaaagggagcgtgttggctatagagaagggactgctgattggctcactgaatg

SEQ ID NO: 885811 - DNA, 624 bp, Homo sapiens
aaggacagcccaagagctgctgctgagcttcatttctggtattaaacaagcactaggtcatctcttggcaattgagaaacctggccaatgataatgtgcttttaaccagctcatattagaagtgaatgtgatcactatcccagctcacaggtagcaccgaggctctaggcaaaggtcagaacaactctgccagggtggcgtgactgcgggttcctgcctctgcttgctggggacctacttactccaaggaggcaggcaccggccatgaccctatttgaaggaggtctttgctcctccctctgtgctcaactcccagtcagctccctccaaggcatccrccacaattgcaaccgttcactcacctgctggtttactgctttacccatctgccttgccggatgctgtagctgacagtgctggcaggctgccctccgggtcgcctgcagcctctgtagacagttcacacacacaccacagcttcctgcctgcagcacctgccactcgagcggaggatgccccaaagccaggagtgcaccagctaggactgaagtcctggggggcagagggtgatgcctccagcagccactcttgacagatgacaggggttgatggatgatacctggc

SEQ ID NO: 885812 - DNA, 624 bp, Homo sapiens
aaggacagcccaagagctgctgctgagcttcatttctggtattaaacaagcactaggtcatctcttggcaattgagaaacctggccaatgataatgtgcttttaaccagctcatattagaagtgaatgtgatcactatcccagctcacaggtagcaccgaggctctaggcaaaggtcagaacaactctgccagggtggcgtgactgcgggttcctgcctctgcttgctggggacctacttactccaaggaggcaggcaccggccatgaccctatttgaaggaggtctttgctcctccctctgtgctcaactcccagtcagctccctccaaggcatccgccacaattgcaaccgttcactcacctgctggtttactgctttacccatcygccttgccggatgctgtagctgacagtgctggcaggctgccctccgggtcgcctgcagcctctgtagacagttcacacacacaccacagcttcctgcctgcagcacctgccactcgagcggaggatgccccaaagccaggagtgcaccagctaggactgaagtcctggggggcagagggtgatgcctccagcagccactcttgacagatgacaggggttgatggatgatacctggc

SEQ ID NO: 885813 - DNA, 584 bp, Homo sapiens
gttgcggtgagtcaggatcacaccactgcactccagcctgggcaacagagcgagactctgtctcaaaaaaaaaaaaaaatcagctaatgtaatctatcacatagaaatgaagaaatcatattgtcatattttcaaatgcagaaaaaatgacaaaatctaacacccattcaagataaagaaaaaaatcctctcagaaaactaggaatagaggaagactttctcaacttgataaagaacatctacaaaaaacctacaactccacaaaacaaccagaaaacaacaaaatggcaggactaagttcttacttatcaataataacattgaatgcaaatggamaaaactctctaataaaaagatatagagtggctcaacgaattaaaaaacaagacctacaagaaacacatttagtccataaagacacacatagactgaaaataaagaaatggacaaagatattgcatgccaatggaaacaaaaaagagcaggagtggctatgcttatatcagacagaatagatttcaagataaaaactataagaaaagacaaagtagctcactgcatagtaataaaggggtcagttcagc

SEQ ID NO: 885814 - DNA, 600 bp, Homo sapiens
aaatgtgtacagaatctatatgaggaaaactataaaactttgatgaaagaaatcaaatatctaaataaatggagagatatccatgttcatgaatatgaagactaaatattgttaagatgtcaattcttcctaacttaatctatagattcaaaactatcccaatcaaaatcccagcaagttgctttgtggatatcaacgaagtaattctaaagtttgtgtgggaaggtaaaagactcataaaagccaacacagttgcattggctgaaatagaacaaggccagaggactgacactacctaatttccagmcttgctataaagctacagtaataaagccaaaatggtattcatgaaagaagagacacataggttaatggaacagaacagaaagcctaggagtggacctacctaaatatattcaactgatcttaacaaagacaatttactggagacaggataagtttttcagcaaatgatgtgggaataattaacacccacagtcaaaaaaataacgttacaccttatccaaaaaataactcaagatgaatcatagacctaaatgtaaaatgcaaaactataaaactcctagatgataatttagg

SEQ ID NO: 885815 - DNA, 600 bp, Homo sapiens
aaatgtgtacagaatctatatgaggaaaactataaaactttgatgaaagaaatcaaatatctaaataaatggagagatatccatgttcatgaatatgaagactaaatattgttaagatgtcaattcttcctaacttaatctatagattcaaaactatcccaatcaaaatcccagcaagttgctttgtggatatcaacgaagtaattctaaagtttgtgtgggaaggtaaaagactcataaaagccaacacagttgcattggctgaaatagaacaaggccagaggactgacactacctaatttccagccttgctataaagctacagtaataaagmcaaaatggtattcatgaaagaagagacacataggttaatggaacagaacagaaagcctaggagtggacctacctaaatatattcaactgatcttaacaaagacaatttactggagacaggataagtttttcagcaaatgatgtgggaataattaacacccacagtcaaaaaaataacgttacaccttatccaaaaaataactcaagatgaatcatagacctaaatgtaaaatgcaaaactataaaactcctagatgataatttagg

SEQ ID NO: 885816 - DNA, 656 bp, Homo sapiens
gcaataagccttaactaaggttatgacttaaccatggttatacaagttgtctccaaagagatggcaagtgttgttacaagatttagaattgcccctaaggtagctcggagaaaagaatattcaagacagggaatcagaagctgtccatggagggaaaaagaattaatatattctttaattttttgtatatggtataaggaaggggtccagtttcattcttctgcatttggctagccagttatcccagcaccatttattgaatagggartcctttttccattgcctgtttttgtcaactttattgaagatcagatagttgtaggtgtgcggccttatttctgggctctctattctgttccattggtttatgcgtctatgtttctacaagaaccatgctgttttggttactgtagacctgtagtatagtttgaagtctggtagcatgatgtctccagctttgttctttttgcttaggattgccttagttatttgggctttttttgtggttccatatgaatttttatttatttatttattttgagacagggtctcactctattgcccaggctggagtacagtggtgcaatcttggctcactgcagccttgagcacctggtctcaagtgagcctcccaccttagcctccccagtagctgg

SEQ ID NO: 885817 - DNA, 656 bp, Homo sapiens
gcaataagccttaactaaggttatgacttaaccatggttatacaagttgtctccaaagagatggcaagtgttgttacaagatttagaattgcccctaaggtagctcggagaaaagaatattcaagacagggaatcagaagctgtccatggagggaaaaagaattaatatattctttaattttttgtatatggtataaggaaggggtccagtttcattcttctgcatttggctagccagttatcccagcaccatttattgaatagggagtcctttttccattgcctgtttttgtcaactttattgaagatcagatagttgtaggtgtgcggccttatttctgggctctctattctgttccattggtttatgygtctatgtttctacaagaaccatgctgttttggttactgtagacctgtagtatagtttgaagtctggtagcatgatgtctccagctttgttctttttgcttaggattgccttagttatttgggctttttttgtggttccatatgaatttttatttatttatttattttgagacagggtctcactctattgcccaggctggagtacagtggtgcaatcttggctcactgcagccttgagcacctggtctcaagtgagcctcccaccttagcctccccagtagctgg

SEQ ID NO: 885818 - DNA, 705 bp, Homo sapiens
cgcccaggctggagtgcagtggcgtgatctcggctcactgtagtctctgcctcctaggttcaagaaattctcctgcctcagcctcctgagtagtgaggattacaggctaatttttgtatttttagtagacacagggtttcaccatgttggccaggctggtctcgaacccctgacctcaagtgatccgcccacttcggcctcccaaagtgctgggattacaggcatgagtcactgcatctggccagctcattagacttcctgataagatttcaaattttatgtctttgtccraagtcagatctataactttaaaaatataaactagttattttactttgttttcatttgtttttctttctgattttttaagtaattaattctaacaaaatggtctacttggctgtgctcatgtgtatagctgatgtcagcatattaatagccagatgtagatgacatatcttgatctctggtctcatcgctctactgttaccgtcaacattgttaccaagcatgagctgggcaatgcaaggcaattattttctgacccttgcagtctgtataatttggttatcccctagatacaatctctataaatagtgtttgttgggttctggaaactagagtggacagatggcatgggggacataatcaccaatcttacccaagtatgtaacagatctgagtatataaagaaagcttgggtat

SEQ ID NO: 885819 - DNA, 660 bp, Homo sapiens
tgtacaggtttgttacataggtaaatgtttgccatggtggtttgctgcacctattaaccaatcacctaggtattaaccccagcatccattagcttccggatgctctccctctccctactccccccacaggcctcagtgtgtgttgttcccccaccatgtgtccatgtgttctcatcattcagctcccactgataagtgagaacatgcaatgtgatcttcaacaaatctgacaaaaacaagcaatggggaacagattcgctatttaacaaatggtgctgggagaactggctagccatatgcaaaaaaattgaaactagacacctttcttacaccttatacaaaaactaactcaagatggaatgamgacttaaatgtaacacccaaaactataaaaaccccagaagaaaatctagtcaccagaatttaatacaaaatttaatggtaaagagaataagcatgtggtcataatagcagatgatgaaaatgacgttttaaaaatttatcaggaatttctaataaaacgaattacaaaaaacaaaaagaccatttaccaaaagcacagctgaagttttttttttcttttgtaagtgatgaaatactaaaaatacttaaaattcattgagggtatagtttccaaatgaaaaaatagacaaaggacat

SEQ ID NO: 885820 - DNA, 622 bp, Homo sapiens
gcctgtagtcccagttacttgggaggctgaggtgggagaatcgcttgaacccaggaggcagaggttacagtgagctgagattgcgccattgcactccagtctgggtgacagagcaagactccgtctcaaaaaaaaaaaagaaaaaaaaaagacagacatatattctgtaatgtatgttaactgaaaaatagttagaaaacataaaaagacacacggaagaaaatcaacatctgtaatcatatcatatacaaaaaagacattacaaacactttgtgtatatctgtaaatcttttcatatgctataatggatcatgttacttggtaatgaataatattgaattacatgaataaaaaacaccaatayaaaatatactcaaaataccaatacaaaatatactcaaaaataactgataaaatgcattgggcatctttttttctatttcagtatattctacaacctgaccaccaacagaagtaatggttaataaatatttaagtaagatagattataaagttcatcttcacttatatttctagtgaaaagacattaaatagtggaaatggatgatatcttgaaacatgactttaagattcttttttctagccatataaaccaatctca

SEQ ID NO: 885821 - DNA, 662 bp, Homo sapiens
aaaacttaataacctttgctgctattattatgataattatggtaattactatttccccatttcattcagaatctaattctctatcctgaaaagaaagacgtaccaattaattaacatttattgagagccttctgtgtgttgaagactcatactatctcatttaattcttacttcacttcatgaggtagaatatattaacatctctctattatagataagaaaactgaggattactgtaagactaatccatcctagtttacaaacctagtacactagaacctgagattttggccaaataaacgaaaacatgatgaaaagaaaacaagataatacattataaatgagtaactgtcttgttaaatttctrtcatcacagcaaagtactcatttcctcactaacaaaaatggtagaccattttgtgaaatgaatgcttattcatttcacactaaatgtattcctctccactgactggtaaccaagtaatataaacaaattagatgcatcttatctttcataactaaaggttaatttaacaagggacattttatcttatacagtttatccagcaggtaacaactgctgttttctgatctaaatctgctgacctataggcatgaatataaaaaatactttgaatggctaatttaaaaaaatgtatttt

SEQ ID NO: 885822 - DNA, 633 bp, Homo sapiens
agataaaaagctgtctatttttataaactgctacagctcagaaatgactgctgaaaaaagttaccctgcgcttctcagatttatttcacagattttgtccctttagaagaattgtaaagttgtttcaggcattttttcagatatattacatatatatttattttttgacccggaggatgtttagtctggaggatgtaagagactcttttaaagctgataaaacacctgttttcaagttcaaaagccaaaggattccatttttcctctctaaaaacatttggagacaataacaaggtcttgatgacttgttcttcaatttctagtgggttttattcattctatcaggtttctgaaagttacagaaagaataaagttgggtagatgggattagtggtgaaaacaacccaaaactgtggataaaatagaagcagaagaaataggtaaatggttycatttgcttaggcagaaaaaagctgcttcacagttagtattttaagtaactcactaccatctacacacatgacagataagggtactctagtagaggcaaggggcacggaggggaaggaatcatcttgaaaaagaattctgaggttaaatggatatgatgtaatataaatgtaatagcattta

SEQ ID NO: 885823 - DNA, 604 bp, Homo sapiens
atctttagggagggcttcccttagtcaaggttaaaaagacattcttctacttttactttagtaagatgtaaagggtctaatgttatttttaaatggataaacaatcattgccacgcatattattgaagggcccatcctactttgaatggcttctttattattgaatgcattcttatgtattaattactctgctcttggattctatttagccccatcaaattattggtttgttttacatccattttttcatagtttttattactgcagtcttatggacctgtgatctcagtgtcagcattagtgtcctagaagccgttttgctttgtagagtcatctttagtatttaaaaataggcttctggggtaccactcaatttaatgagaaattcattgtccattgtttagaatgtttttggtggtgggagagggggaaaraagtgaacgcactcatcctaaattattttactcaaaagtttttttgttttccagatgtcttaatgtcttttgtgtttttgagcctttttctggaagtttggactaatggaagggactaaaatgaaattcctgtctttagaagtctcttagtcacttcagccagtagaaat

SEQ ID NO: 885824 - DNA, 644 bp, Homo sapiens
ttacctgtgtcccagagattctggtatgtgtgcctttgttctcattggtttcaaagaacatctttatttctgccttcatttcgttatgtacccggtagtcattcaggagcaggttgttcagtttccatgtaattgagagttttgagtgagtttcttaatcctgagttctagattgattgcactgtggtctgagagacagtttgttataatttctgttcttttacatttgctgaggagagctttacttccaagtatgtggtcaattttggaataagtgtgatgtggtgctgagaagaatatctattctgttgatttggggtggagaattctgtagatgtctgttaggtatgcttggtgcagagctgagttcaattcctggatatccttgttaactttctgtctcaytgatctgtttaatgttgacagtggggtgttaaagtctcccattattattgtgtgggagtctaagtctctttgtaggtctctaaggacttgctttatgaatctgggtgctcctgtattgggtgcatatatttttaggatagttagctcttcttgttgaattgatcctttaccataatgtaatggccttgtctcttttgatctttgttggtttaaagtgtgttttatcagagactaggatt

SEQ ID NO: 885825 - DNA, 303 bp, Homo sapiens
tttaagttagtttaaaatgtacagtgaagatattattgactatagtcaccttgttgtgctatcaaatagtaggccttattcattctttctaactatattttgtacccattaaccatccctgtttatatatattattttgtgaaatctttgtttaaayattcatttgaaaaattatgttctttattcaatgtttgtattgtaaatctggaaaatatgccttacctttatgttttctttggtggaatttgttttgtttttttgttggcgtcttttgaaaagtagccgttgttaattttgataaaa

SEQ ID NO: 885826 - DNA, 527 bp, Homo sapiens
catgtcagtgtacctggtgggggcgctcctgcccagctgataggagacagcttctacccagcccacccctttggtggctacaccagcttggcacagtctctcattgctgaagagcatccccccgccaactccgcccaatccccacctccagtcttgactacttttcattggtttgtttgtttaaattgacatctcctgattttcaaaaccttgctgattaacaaagcaaaaagagcacmcaaaaaaaaaaaaaaaaaaaaaaaagtcaaaaacaaagcaaaaaactctcagtctaaaacagataaacaaaccaacaaacaaagcccaggggctgctagaggttgactcttgtaaactgcaagaacggacaccacaaactccagagcagagggcgcctggacattccagtgacttcatcaagcagtaaaatatccgtctttcatctgcttctgctgatgaccaatactatgcctgtcacaatttccagtcttttagagctactctttgattacacacaaccgagactt

SEQ ID NO: 885827 - DNA, 761 bp, Homo sapiens
cagaaatagtaaaagtacttgggatatagtttaaccaaataaagattcatgttcttaggcagagaaattacatttcaagacattttttgacaagagaaaaggacccctgaggttgcagaattgagcctccgcttgtattataatgtgttgtatcatgtcaataacgataccagccataccttcccatcctgtttattcttctcascatgggcagagtttgaggggtcccaggacctaagtccagccaatcagaacctctctcaggacttttatttcaaaactaccaaggaatagtttttgtccctcattagaggttcatagtactataagcttataaatttaagtctgccatgagacacccaccccaattccatggaggaagcttctttgtagtaggaaaaagtgagttcaacatgaaaagataagcagagatgaaagatgggtggagagaagaaaataaccctttgtttttccccttgagatcccatttcctgcctttttgtccttaattctctgagctattccagttgctttccaaattatgtgggccaatgcatctcttttgttcttaacctaacttaatttgggtttcaaccacttacacataagtgccttgaaaaatacaaaaatttatttcatgagactctggatttggagaacgtgcagactctgggatgatcattgaaaggacgtagaagatcttctaggtcatctgcaggaacttctagctggacaattataaaataaagaagaggatatgg

SEQ ID NO: 885828 - DNA, 761 bp, Homo sapiens
cagaaatagtaaaagtacttgggatatagtttaaccaaataaagattcatgttcttaggcagagaaattacatttcaagacattttttgacaagagaaaaggacccctgaggttgcagaattgagcctccgcttgtattataatgtgttgtatcatgtcaataacgataccagccataccttcccatcctgtttattcttctcagcatgggcagagtttgaggggtcycaggacctaagtccagccaatcagaacctctctcaggacttttatttcaaaactaccaaggaatagtttttgtccctcattagaggttcatagtactataagcttataaatttaagtctgccatgagacacccaccccaattccatggaggaagcttctttgtagtaggaaaaagtgagttcaacatgaaaagataagcagagatgaaagatgggtggagagaagaaaataaccctttgtttttccccttgagatcccatttcctgcctttttgtccttaattctctgagctattccagttgctttccaaattatgtgggccaatgcatctcttttgttcttaacctaacttaatttgggtttcaaccacttacacataagtgccttgaaaaatacaaaaatttatttcatgagactctggatttggagaacgtgcagactctgggatgatcattgaaaggacgtagaagatcttctaggtcatctgcaggaacttctagctggacaattataaaataaagaagaggatatgg

SEQ ID NO: 885829 - DNA, 761 bp, Homo sapiens
cagaaatagtaaaagtacttgggatatagtttaaccaaataaagattcatgttcttaggcagagaaattacatttcaagacattttttgacaagagaaaaggacccctgaggttgcagaattgagcctccgcttgtattataatgtgttgtatcatgtcaataacgataccagccataccttcccatcctgtttattcttctcagcatgggcagagtttgaggggtcccaggacctaagtccagccaatcagaacctctctcaggacttttatttcaaaactaccaaggaatagtttttgtccctcattagagrttcatagtactataagcttataaatttaagtctgccatgagacacccaccccaattccatggaggaagcttctttgtagtaggaaaaagtgagttcaacatgaaaagataagcagagatgaaagatgggtggagagaagaaaataaccctttgtttttccccttgagatcccatttcctgcctttttgtccttaattctctgagctattccagttgctttccaaattatgtgggccaatgcatctcttttgttcttaacctaacttaatttgggtttcaaccacttacacataagtgccttgaaaaatacaaaaatttatttcatgagactctggatttggagaacgtgcagactctgggatgatcattgaaaggacgtagaagatcttctaggtcatctgcaggaacttctagctggacaattataaaataaagaagaggatatgg

SEQ ID NO: 885830 - DNA, 596 bp, Homo sapiens
caaaaatttatttcatgagactctggatttggagaacgtgcagactctgggatgatcattgaaaggacgtagaagatcttctaggtcatctgcaggaacttctagctggacaattataaaataaagaagaggatatggactgccagctgcagaattatgaaactgtggctccttgctgtttcatatttgccatggrgaactgcagagcagctggtaagtggaagaaaccagacagaaatccagagtccaatatactccagcactaccaatttcatccctgctgctgcttcagctgctcctatctccaaagaaaattaaggaccacactgaaaatctgcctttctctattcttcctctgttctaggatgcaaaggactccatatttacagagatcttagcacaaattgttaatggttttattggtggaatagtcagagaagtggataaggcttctcctctatagtctagctagaccttttacctacataaatgttgatcttctcagcaagaattagcctttgatactgtctacaggctctacaaaagcttcctttgcactctacttttcttacctaaaacaaaagtttatttttgat

SEQ ID NO: 885831 - DNA, 596 bp, Homo sapiens
caaaaatttatttcatgagactctggatttggagaacgtgcagactctgggatgatcattgaaaggacgtagaagatcttctaggtcatctgcaggaacttctagctggacaattataaaataaagaagaggatatggactgccagctgcagaattatgaaactgtggctccttgctgtttcatatttgccatggggaactgcagagcagctggtaagtggaagaaaccagacagaaatccagagtccaatatactccagcactaccaatttcatccctgctgctgsttcagctgctcctatctccaaagaaaattaaggaccacactgaaaatctgcctttctctattcttcctctgttctaggatgcaaaggactccatatttacagagatcttagcacaaattgttaatggttttattggtggaatagtcagagaagtggataaggcttctcctctatagtctagctagaccttttacctacataaatgttgatcttctcagcaagaattagcctttgatactgtctacaggctctacaaaagcttcctttgcactctacttttcttacctaaaacaaaagtttatttttgat

SEQ ID NO: 885832 - DNA, 596 bp, Homo sapiens
caaaaatttatttcatgagactctggatttggagaacgtgcagactctgggatgatcattgaaaggacgtagaagatcttctaggtcatctgcaggaacttctagctggacaattataaaataaagaagaggatatggactgccagctgcagaattatgaaactgtggctccttgctgtttcatatttgccatggggaactgcagagcagctggtaagtggaagaaaccagacagaaatccagagtccaatatactccagcactaccaatttcatccctgctgctgcttcagctgctcctatctccaaagaaaattaaggaccacactgaaaatctgcctttctctattcttcctstgttctaggatgcaaaggactccatatttacagagatcttagcacaaattgttaatggttttattggtggaatagtcagagaagtggataaggcttctcctctatagtctagctagaccttttacctacataaatgttgatcttctcagcaagaattagcctttgatactgtctacaggctctacaaaagcttcctttgcactctacttttcttacctaaaacaaaagtttatttttgat

SEQ ID NO: 885833 - DNA, 644 bp, Homo sapiens
aagttttacagatttaataagacaatgtttatatattctttactaaaatataatgagctgggcacagtggctcataccttaatcccagtgctttgggaagccaaggtgagaggatcatgtgaggtcaggaatacaagaccaccctggcaacataatgaaaccctgtctctacaaaaaaacttttacattaagtgggagtggtggtgtgcacctgtagtcttgaatacttgagaggctgaggcaggagtatcacttaagcccagaagtatgaggttatgatgagctgatcatgccactgcattcaagacttgatgacagggcaagacatcatctctaaaaaagtgaaagaaaaagaaagaaaggaaagaaagaaagargaatggattttacaatcataaaatatcacaatttatagatgaatctatgggaaatgctgagtttgaggtttttcaaaatcacagacacaaatagtggacaaaataaaaattcagacttgtaaaatgattaatccgaattcctaacactggagttagtggcctctgcccttcacagaaagctagctagtcaagcatctggtcatgtataggacaaacaccagcttttctcaaaattctctgagatgaactaagtccagcttccaaaat

SEQ ID NO: 885834 - DNA, 495 bp, Homo sapiens
cccaagtagctgggattacagacacgtgccaccatgcctggctaattttttgtaattttagtagaggcggagtttcaccatgttggccaggctggtcatgaactcctgacctcaagtgatccacctgctttggccttgcaaagagctggcattacaggcttcagccaccgcacccggccccataatttactctcgattccagctttttgttgccacctcctcrtcaaaggactaagatgagctaagatagagaatttaagatattattgtgtgcattccattcctgcataaccatagtggaactctctttgctgtcactaaatatagagactttatttctgtttcttactatccagtctcaccagcaacatattttgtaggaaatctgccaagttcctgactcatagatgcaagcttctatattttacaggttgatagagtttgtttattttaatatttctttgtgtgtgtgtgtgaagaccccacatttaggtt

SEQ ID NO: 885835 - DNA, 631 bp, Homo sapiens
tcacatttaacattgattctgtgagagggggcttattttgaccatttccagacaggaagcaggtactgagaggtgtcagaagtggtaaaacctgaattttccattcaggcttactgtctcccaggcaagggttctcaaaaagcatctttgtrtgggggtatgaaagagattagagatcatacggatataaattcaagtcttaattccaacacctgacaggtaactttgcaagctttgctacaagtattgttaagctctctgaacgttctttgctgtaaggttcttgtgaggcttaaatgagataatgtttatgaaagcaccttgtaagtattaattttctatcaaaatgttaacagttgtgatgtatttgccaaaagaaagctgtactgatatttggaatggacttgtgggaatgattttaatgggaaataaattgcctgtgaaacagtcccaatcacgaatgcaaatcctgctggcaaatgtggcagagcctggaaaagacacattcagatattgtctccttatccctctaatgtctctgtgactaagggagtgtagcagctgctgctattactatcactgtcataatcgttatttttaaactattgatggaaaacccaagaacaggaaa

SEQ ID NO: 885836 - DNA, 645 bp, Homo sapiens
gaaggatgggctgcagggatgagcagagctttgagtgaggggctctcattagcctgaggtgagaggaggttgtgaaggaaggaaaagagaggagtgttgttgagtttattttaatataattaagattttctgacagatacaagttaaatattggaattattttaattattattttgactggtttcatcctagcaactagttaaaagcccacatggtggatrtccaattactatttctgaataaatgaatattattagttgccatcctcaaaggccaggttgtaccagtctaggcacagtcaatatgaaccatttgcagaacatgatggtagctgatgccacagtgaaaacagagcccaatggtctggcaatgctgcaaatctaaggcaggtatcagaattttccactgtgacctcaacacaccttttcaatcaatccaatttaacatacagttaatggtggcttatctcattcagttcactgcaatagttcatgttagattacaaagatgaaaaaaaggcacaggaagccctcaaagtcaaggtgtttaaatataacaggtgtttcaaatacatctgtccaataagacctgttccttcaaagatcgaataattcccatcatttgttttgtttattgatttatgct

SEQ ID NO: 885837 - DNA, 654 bp, Homo sapiens
tcactgcaatagttcatgttagattacaaagatgaaaaaaaggcacaggaagccctcaaagtcaaggtgtttaaatataacaggtgtttcaaatacatctgtccaataagacctgttccttcaaagatcgaataattcccatcatttgttttgtttattgatttatgctccagttcttttatctacttgaaattttttcttcccccctgtttactcttcttcatttctaaggctcatccccaaacttttctcatctgtaaaattagcatttttgaaycttagaaggttctgaggctcttcctgactctctcctaaaacttcccacggtgttctctcatcacgaagttgtggctgatatgaagccttcatgtgcaagcactgtgcctcacgccacaagctcaaggctccaggcagtttaggtctctttctggactcaccacagaacggcctctgctcctcactggcagcagctttctttctcaggcttttgtacccgttcgtgtgcttgcgtcctgtttgcctatttgctttccagactacaagccttttgaggaaaacatactgtcttatctccctggacattttaaagaaacattcaaatataagggaagggaatgctttagttattaaatctggcaggaaatcagtttggca

SEQ ID NO: 885838 - DNA, 590 bp, Homo sapiens
gaggcaggagagtcgcttgaaccagggaagtggaggttgcagtgagctgagattccatggagctctggcttgcttgtttctaactccagcttgttgtacattgtgggattgtttggttcaatggcttaagtcagcatatacaatacagtgggggtaaaaatcagaaacaaagactatgggaatcttgtctacaactgaatacaagatttacctgaacattattaatagtcaaggaaaagaagaaagtataatgaattccagggaaaaatatagtaccaaattctagagaaatttactgttgatgtatatagcaggaagagaggaaactaaaaaatagttattcttagactgtagacccaacaaatcacaactcagccttcctctcycactgcaaaaagcaaagtgtagaaatattggttacatctcataaagaatggctgttaatgcctcaggagagaaaatgcttatgttgcagggagaattcatagaaaagtccttataatcaagtcattaaagtgatgttataattaaccattttatatatatatatacacacacacacacacacacacacatatatatatgccagg

SEQ ID NO: 885839 - DNA, 590 bp, Homo sapiens
gaggcaggagagtcgcttgaaccagggaagtggaggttgcagtgagctgagattccatggagctctggcttgcttgtttctaactccagcttgttgtacattgtgggattgtttggttcaatggcttaagtcagcatatacaatacagtgggggtaaaaatcagaaacaaagactatgggaatcttgtctacaactgaatacaagatttacctgaacattattaatagtcaaggaaaagaagaaagtataatgaattccagggaaaaatatagtaccaaattctagagaaatttactgttgatgtatatagcaggaagagaggaaactaaaaaatagttattcttagactgtagacccaacaaatcacaactcagccttcctctctcactgcaaaaagcaaagtgtagaaatattggttacatctcatraagaatggctgttaatgcctcaggagagaaaatgcttatgttgcagggagaattcatagaaaagtccttataatcaagtcattaaagtgatgttataattaaccattttatatatatatatacacacacacacacacacacacacatatatatatgccagg

SEQ ID NO: 885840 - DNA, 652 bp, Homo sapiens
ctgcaacatggcagggccattttagttgctaaagaaatctacctatgatctttacctcatttattgttaaattatgtgatttttaattaataggaaggcaggaaagcatttttcccttaaaatgtggcagcattgtaattgtgtatttgtgagaaagacctttttttcagctaacatgaaaatcttcaatggcatttttttatttggtagtaaagccttctggtaaaattttgttccatctttaagtcttctttatgagccaaatctttaacatgaaaacaaaacaaacaaacaaaaaaacaacagggagaaggacagggaagaaacagggaaaattatatgatgcaacacagcttgtaattccctgcacatttgttacttgggaatttatttgaactaggcwttcttgagcatttaaaacggcattttggtgttgtttctggctgagttaaaatttattcttagcatttagttgctgcagtttcacacaatggggatctggcaatcaggtactcttaacaggcttattattgggagttttaatcagattttgaatgttaaagcaacctcaatttggctttacagggtatctgagaaaaatgtacttatttccactccctagttcctataacgatgcttttttatttttatt

SEQ ID NO: 885841 - DNA, 571 bp, Homo sapiens
tttgctaatactttgttgaggatttttgcatctacattcataaggggtgttggtatgtagttttattttcttgtgatgaatcaggatgatactaacttcataaatgagttaagaattattccctcctttatttatttttcaagagtttatgaagaacttgtgctaatacgtctttaaatatttggtagactaaaagagagaagctgtctacttctggactttgtgttgtgggaaattttttgactgacaattcaacttctttacttgttataggtctactcaaatwttcaatttcttcttaagtcagattcaatagtttttgtcttcctaggaatctgtttgtttaatcaagattatctaatttgttatcacaaatcgttcatagtattcccctaaattttttctgtctgcctattatctatctatctatctatctatctgtctatcatcttgtattaaggttccttttttattcattattttaataagttgagtactctcttcatcttcatcagaatagataaagctttatcaattttgttgatcttttcaaagaataagttgtttcatt

SEQ ID NO: 885842 - DNA, 571 bp, Homo sapiens
agcaattcaggctccacttgtaattctagttctcttgctctttttactacatctgcagttgcttcctccactgaaatcttgagcctttcaaagtcatccatgagagctggaatcaactttttccaaactcctgttaatgtttatattttgacctcctcccattaatcatgrattctctgaatggtatctggactggtgaatcctttccagaagatttttaatttatttatctcaggttcatcagaggaatcactatctatggcagctgtagcctcatgaaatgtatttcttaaataataagacttgaaagttaaatttacaccctggctgacagcagaatgaatattgtgttagcaggcattaaaaacagcaataatttccttgtacatttccatcagagttctttggtaacaaggtcaatgagcagtaatattttgaaaggagtctttttttttctcagcagtaggtctcaacagtggacttaaaatattcagtaaaccacactgtcagcaaacttactgtcatccagtctctgttgttttatttatagagcacaggaagagtagattta

SEQ ID NO: 885843 - DNA, 498 bp, Homo sapiens
tgagagaggtaccacttttccttatccttgaatacctagaggccattataaggttgttcattgacatactttctattttgttgtgtctcaggaaagagagagggccaaggaaaggaaagacatggtggaatgaccagttggtagagtggtaagaacacacccaacattattgattaaattcattgttttatctaggtgtagctcatcktgtcccagaacaaatgctacagtaacatcaaagatatctggtcacagatcactgtaacagacataacaataataattttaaaagtttgaaatagtgtgagaattaccaaaatgcaacagagacatgaaaagagcacatgttgttggaaaaatagtgctaatagatttgctccatgcagtattgccacgaaccttcaatttgaaacagatgcaatatctgagaaccacaattaagctaactgcaaaaaattaggcatgtctgcatatgtctattaggcctagtttgtttta

SEQ ID NO: 885844 - DNA, 689 bp, Homo sapiens
gtacaaggatttacttttcttcaaactgttgccaacacctatctttcattttttaaaatgatactcattcaaacaggtgtgagatgatacttcattgtggttttaatttgcattctcttggtgattcatgatgttgagcattttttcttacacctgttaagcatttatatgtcttttgttgagaaatagctatttagatcctttgcccatttttaatctggtcgtttgttttcttaatgttgagtttttgagttccttatatattttgaatattgactccttatcaggtgtatgatatgcaaatattttctcccactctgtagattgtgcttgtactctgttgactgtttcctttgctttgcaaagcttcttagtttggtgtaatctcatttatyaatttcaccttctgttgcctttgctgtttgtgttataatcaagaaatcattgccaaaactaatgtcagttaactttcaccctttattttcttctaggagtcttacagctcaggtcttacatctcattttgacttgtcttttctgtgtgatataagacaataattgaattttattcttttgcatgcagatatccagttttctcaacaccatttactgagagcctattctttcctttttgtgtatgcattgtgcccttgtcaaagactagttggccatatatgcaggggtttgttt

SEQ ID NO: 885845 - DNA, 603 bp, Homo sapiens
attcctctttatctcttgtactatgttttgcatttcatgaaggcatacctctgagtttattgtcagttcagttctagaccactgtaataaagtgattattatgctaagggaagccacacattttcttttcatttcccagtgcatataaaagtaataattaaagtatactatagtatattcagtgtgcaatagcattatgtctaaaacaacaatgcacataccttaattttaaaaaatatttcattgcttaaaaaatgctaataataatctgagccttaggagagtaataatattttttgctagtggagagtcttattttaagatgttgatggctgctgactgattagggtggtggttgctgaaggtggtggtggctgcagcaatttcttaaaatgaacaaaaatgaagaytgccacatcagttgacttttcttttcacaaaagatttttctgtagcatatgatgctctgtgatagcattttacccacagtaaattttgttacaaaattggattcaatcccctcaaattctgctgctcctttatctaagtatatgtattactgtaaatctttttttatcatttcaacaatgttcacagcatctt

SEQ ID NO: 885846 - DNA, 628 bp, Homo sapiens
tgctcctaaatgacttttgagtaaacaattaaagcagaaatcaagaagtttttgaaactaataagagcaaatatacaacgtatcagaatctctgggacacagctaagggcatattaagagggaaattaaacacatacattagaaggttagaatgatatcaagctaacaaactaacatcaaaacaaaaataactagagaagtaagagtaaaccaacccgaaagctggcaaaagacaagaaataagcaaaataaaaactgaatggaaggacattgagacatgaaaaaccattcaaaagatcaatgaattcaggagtctgcttttttaaaaaaaataaataaaaaagaacactcgttaaaataataaagaagccaagaaagaagatccaaatacaattagaaataacaaagaggatgttaccactgaccctacagaaataaaaataaccatcagtgactacgatgcacacctctgtgtatacayacttgaaaatatagaagatatagataattcctggacacatacaccatcccaagactgaaatagaaaaacaattgaattcctggatgatcaataacacactttgaatttgaatcagtaataaatagcctactaaactaaaaaaaaatt

SEQ ID NO: 885847 - DNA, 642 bp, Homo sapiens
agaaatacaaaaattagccaggcatggtggcacatgcctgtagtcccagctacttgggaggctgaggcaggagaatcacttgaacctgggaggaggaggttgcagcgagctgagattgtgccatggcactccagcctgggcaacaagagtgaaactcagtctcaaaacaaacaaacaaacaaacaaacacactgctttaaagtagtccattatagaaatatatcatgatttacccatccattctattgtttatggacattagggttgtctctacttcttaattattatgtgtaatgctgctgtaatcaatcttgcgcatgtgatttcktatgcaaatatcattagatctgccagatatgtacataggatcggaacttctgtccaagggtatgcttatatttggttatgtaaattataaccaaagtgttttaatcaaggtatactaccactgatagtgtttgagaatccgtattttcaatacttttaaacctagcaatttttatgagtgatttatagtaaattattgtggatttaatttgtaaatttctgttgactaatagattgaatgcactttcatccgcatgacattatttaaactacctccaattttcttgcccatttttctactggattgtcaacctt

SEQ ID NO: 885848 - DNA, 642 bp, Homo sapiens
agaaatacaaaaattagccaggcatggtggcacatgcctgtagtcccagctacttgggaggctgaggcaggagaatcacttgaacctgggaggaggaggttgcagcgagctgagattgtgccatggcactccagcctgggcaacaagagtgaaactcagtctcaaaacaaacaaacaaacaaacaaacacactgctttaaagtagtccattatagaaatatatcatgatttacccatccattctattgtttatggacattagggttgtctctacttcttaattattatgtgtaatgctgctgtaatcaatcttgcgcatgtgatttcttatgcaaatrtcattagatctgccagatatgtacataggatcggaacttctgtccaagggtatgcttatatttggttatgtaaattataaccaaagtgttttaatcaaggtatactaccactgatagtgtttgagaatccgtattttcaatacttttaaacctagcaatttttatgagtgatttatagtaaattattgtggatttaatttgtaaatttctgttgactaatagattgaatgcactttcatccgcatgacattatttaaactacctccaattttcttgcccatttttctactggattgtcaacctt

SEQ ID NO: 885849 - DNA, 642 bp, Homo sapiens
agaaatacaaaaattagccaggcatggtggcacatgcctgtagtcccagctacttgggaggctgaggcaggagaatcacttgaacctgggaggaggaggttgcagcgagctgagattgtgccatggcactccagcctgggcaacaagagtgaaactcagtctcaaaacaaacaaacaaacaaacaaacacactgctttaaagtagtccattatagaaatatatcatgatttacccatccattctattgtttatggacattagggttgtctctacttcttaattattatgtgtaatgctgctgtaatcaatcttgcgcatgtgatttcttatgcaaatatcattagatctgccagatatgtacataggatcggaacttctgtccaagggtatgcttatatttggttatgtaaattataaccaaagtgttttaatcaaggtatwctaccactgatagtgtttgagaatccgtattttcaatacttttaaacctagcaatttttatgagtgatttatagtaaattattgtggatttaatttgtaaatttctgttgactaatagattgaatgcactttcatccgcatgacattatttaaactacctccaattttcttgcccatttttctactggattgtcaacctt

SEQ ID NO: 885850 - DNA, 673 bp, Homo sapiens
aagcccaactctcaggcatttgcacagggcctattgaagggttggtggtctcagctagtttgaactgtatagaagctgtccaagtttctgaaaaacaagtgaagtgaccattaccataatgacctatatgttatcatattatctataatgcaaccagtgaagattaagtttttgttcagtggtgaggccttcagctactgtggccttcagcttcatggaaaaaaggaaaaaaataataacaaaaagcaaatgaccaaaagtaagcagttcaggcatacctgatcaattaaccccttggtttcattaccagargcaacttagaagtgaggagatccacattgtaccgcagatgcagttattcctactggttggctaggagtaaattacttctaccctctttgcctcagtttcttcaaccaagaaaagcttatgttacactaatttcttagttgaagcattttgtaattctataaatagcagtaaaattcagcaaatccttaggactgtgtttatctgattaaacttttcagttctgtaaattaaaaatgattagatgtaaacctaaacagagttatctctgacccttagaaaccaagataagctcatgattaaaaaaacaaaaaacaagaaaacaaccaaagctgcttacatttactgcagagaacctttaaat

SEQ ID NO: 885851 - DNA, 644 bp, Homo sapiens
ctgtatcagaagagcctctatcagacctcctgctgctccccgagaagcagatgaccactgcctcctcctcagtggaaggccccatgtgtaggagagttttctctggtctcctgctctgcacctgtgcctcagggggctctttctcagttctcctttcctaaatccaatttttctcawgagtactagatgaaagctcaggaaaaagagtcaatggataggtacaaggattccttctgcctggaactcccggagcttctaaactcccatgccagcccacatccagcctttaaaaatttgtcataatttcagcagtttttttcttgcccaagtctatggcatctgtctcctcttcctgctgctctgccatagatggaagcagctgtgcagcctgcccaactctctctattagtctcatcctctcttggattttaggctactctgtgaccatggctctctgatgagtgtgaaataactgtaacttttcagatgattcacttgttttcataattaggctgggagtgctgtttccttgctatattttatatcctaagtggaagcagaaatccattaaactttttgagttgaaacttttgctcatgatttttattatcttgaatataactttatacagcagaaagtactgt

SEQ ID NO: 885852 - DNA, 600 bp, Homo sapiens
cctctcttggattttaggctactctgtgaccatggctctctgatgagtgtgaaataactgtaacttttcagatgattcacttgttttcataattaggctgggagtgctgtttccttgctatattttatatcctaagtggaagcagaaatccattaaactttttgagttgaaacttttgctcatgatttttattatcttgaatataactttatacagcagaaagtactgtctcacatgcatttctccccaaggatgtggttctccatattttattagggcatatctgatctaattctaaaaggtttaaatgtcttctctttgtaagtagcaaacatttaagtcatgcttattaggctagtatcacaayagtttaaaccaagttagatgactcaatgaaggctgaaactttttttgcctataggtttttggggaacaggtggtatttggttacatgagtaggttctttagtggtgattcgtgagattttggtgcacccatcacctgagcagtatccactgaagccagtttgtagccttttatccctcaccccactcccaccttttccttccaagtccccaaagtccactatatcattcttat

SEQ ID NO: 885853 - DNA, 582 bp, Homo sapiens
tctttattgtctccatagttttacctttctcagaatgtcatatctttggaattaaccgtatatagcctttctattttcagaatagccatagcatgaacatttgaagccttttcaaactggcttttttttttttttttttttttttgkggtggggtcttgctttgtctctcaggctggaatgcagtggcacgatctctgctcactgcaacctctgccttccaggttcaagtgattctcctacctcagtctcagtagctgggattacaggcgcgtgccaccacacccggctaatttttgtgtttttactagagactgggtttcaccatgttggcaaggctggtcttgagctcctgacctcaggtgatgtgcccacctcagactcccaaagtgctgggattacaggcattagccaccatgcccagcccaaaatggcttttaaaaaatgtgatgtcaacatttagcagctacagactggcttcttttccttagtaatatgcatttaagtttgctccaggtcttttcattgcttgatagctcatttcttttcagtgctgaataatattctattatctggatgtacca

SEQ ID NO: 885854 - DNA, 582 bp, Homo sapiens
tctttattgtctccatagttttacctttctcagaatgtcatatctttggaattaaccgtatatagcctttctattttcagaatagccatagcatgaacatttgaagccttttcaaactggcttttttttttttttttttttttttgtggkggggtcttgctttgtctctcaggctggaatgcagtggcacgatctctgctcactgcaacctctgccttccaggttcaagtgattctcctacctcagtctcagtagctgggattacaggcgcgtgccaccacacccggctaatttttgtgtttttactagagactgggtttcaccatgttggcaaggctggtcttgagctcctgacctcaggtgatgtgcccacctcagactcccaaagtgctgggattacaggcattagccaccatgcccagcccaaaatggcttttaaaaaatgtgatgtcaacatttagcagctacagactggcttcttttccttagtaatatgcatttaagtttgctccaggtcttttcattgcttgatagctcatttcttttcagtgctgaataatattctattatctggatgtacca

SEQ ID NO: 885855 - DNA, 687 bp, Homo sapiens
gtttgctgacgatatgattgtttaccttgaaacccctaaagactcctccagaaagctcctagaactgataaaagaattcagcaaaatttctggatataagattgatgtacacaaatcagtaggtctcctatacagcaacagcaaccgagtggagaatcaaatcaagaactcaaccccttttacaatagctgcaaaaaaaaaaaaaatacttaggaatataccttaccaataaggcaaaagacctctacaaggaaaactacaaaacactgctgaacgaaatcatagatgacacaaacaaatgcaaacacattccatgctcatggatgggcagaatygatattgtgaaaatgaccatactgccaaaagcaatctataagttcaatgcaatccccattaaatacaaccatcattcttcacagaattagaaaaaacaattctaaaattcatatggaacaagaaaggagcccgcatagtcaaagcaagactaagcaaaaagaacaaatatgcaggcatcgcactgcctgatttcaaactatactataaggccatagtcgccaaaacagcatggttctggtataaaaataggcacatagaccaatggaacagaataaagaacccagaaataaacccaaatacttacagccaactgatcttcgacaaagcaaacaaaaacataaagtggggaaa

SEQ ID NO: 885856 - DNA, 655 bp, Homo sapiens
cttctcagtcaaaaatacttcacctaagatgaataatcaccttaataattaccatcagagcatcagcctagtccttctctgcttaaataaatgcaaaagaaactgcaagtgccataggcagaggggtataggaaggtttccagagggggaaaagagcccatggaaagaaaaataacaagaaatyaaatgacacactgtgaaatcaaccatagataaaagaaatcatgagataaattataaaatattttgaactgggtaaaaatgaaaatcgtatataaaattgtgtgggatgcagctaaagcagtgcttagagggaaatttatagcttcatttgcttatatttgaaacacagaaatagaaaatagacaagtaatagagaaaattaacaaagcaaaaatttagttcttttgaaagattaacaaaatttataaatgtttagcaaggccaatgaagaaaagaaagaaaatacaaattaccaatacccagaatgaaaggtgaggcctacctacagaaacaacatatttttaattgactcattgtaattgtacatatatttgaggtaaaatttgatgtttcagtacatatatatgttttataatgatccaaccagggtaattagtgtgtatctatcaccccctgcatttatcatttattt

SEQ ID NO: 885857 - DNA, 655 bp, Homo sapiens
cttctcagtcaaaaatacttcacctaagatgaataatcaccttaataattaccatcagagcatcagcctagtccttctctgcttaaataaatgcaaaagaaactgcaagtgccataggcagaggggtataggaaggtttccagagggggaaaagagcccatggaaagaaaaataacaagaaattaaatgacacactgtgaaatcaaccatagataaaagaaatcatgagataaattataaaatattttgaactgggtaaaaatgaaaatcgtatataaaattgtgtgggatgcagctaaagcagtgcttagagkgaaatttatagcttcatttgcttatatttgaaacacagaaatagaaaatagacaagtaatagagaaaattaacaaagcaaaaatttagttcttttgaaagattaacaaaatttataaatgtttagcaaggccaatgaagaaaagaaagaaaatacaaattaccaatacccagaatgaaaggtgaggcctacctacagaaacaacatatttttaattgactcattgtaattgtacatatatttgaggtaaaatttgatgtttcagtacatatatatgttttataatgatccaaccagggtaattagtgtgtatctatcaccccctgcatttatcatttattt

SEQ ID NO: 885858 - DNA, 606 bp, Homo sapiens
actcttctgaaaaacctctaatggttccacattgttcatggggcaatgtcctgactcttaacccagcactcaaggcccttgagaaatgccctggcctgcaatttgggcctcatctccctgctcttccccgtgtgcctggaactttagtgtccctgaatggctcactcattcccggatgtatcttctcatgcygttctctgcctggcatgctcatgccccctctccattaccaaactcttaatatttattaccagtcctagcagagttgtcactcctccttgaagccttccctacccaccaccacccccctctaaaatagtggtagacaaaccatcagtatcacctggagcttgttagaaatgcaaattctcagaacccaccgaagacctactgaagccaaacctctgggcgtggtcacagcaatcggtagtttaacaaaccctgcaggtgattctaatgcacgtttgtgtttgagaactactgctctaaagactatttatcagctatttctcttcatactaatggtaattacccaagtttcttctccattacttaagaagaagtatctcacatgcaggaagcttgtcttactcatcttagttactt

SEQ ID NO: 885859 - DNA, 581 bp, Homo sapiens
agtgttatatgaaaagtgttcagttgtggtagataatatttttcatgttctctatgatcttagtaatttttttttgtctagtgattctattatctgtggagagaaagagatcttaaatcatgatgtagatttatctgtttctcttttaattctgtacattttggctttatacactttgaagctgtgttagtaagcttatacacatttaaaattgttatgtcttcctaattcattaaccttttaattatatgaaaatgtccttctttatctttagtaatactctttcttgaaatccagagatttatctgatattaatgtagtcacgctaaccttctaatgcttactgttttcgtggtawgtctttttccatccatttactttcagcctgtgtctttacatttaaatatacccattatagataccatataattgtatctttttttatctgttccaaaaatctctgtcttaattgatgtgattagtcaattaacatttagcataattattgatatgtttaggtttggtctgccattttattatattttattaacttttcacatttcacttacagttaatatttt

SEQ ID NO: 885860 - DNA, 687 bp, Homo sapiens
ttttatattactgggacacagctagtcaagcaaatgattcctgttttcatcacaaacccattctaaggatataaatcttaaaacataaatcttaaaatttaagaagaattaataaaatttcccaaatgccatttgaagtaccaatttccgattaaatgctgtccaaagtaataygttgctattttatgttcacaaaaatgtgaattatattagctgcaaaaattaattacaaaaatcaaataaaaatccttaaaagtaaatattaggtaaataatatttaatgtttaagatttttaaaaaatagaatattactaataaaattgtctctaattaaaatttttaaagttcagaataaaatctgtatttaacaaaagttaactaggcaaaaaccttttgctttaatccttgtataaaatccaagtttggtaaatgggaaaataattgaatcttttctgaaactgaaggattgcaaaatagtgaaaacgttgaaaagtaagaattcgttgtttgtccaaccagttggttggcacctttcattaatttatcatttggaaacaaattaatcccttcttgagtcttcctacctcaaacatgcttttaccgttccaccaattgtgtctacatatcataggctgggtgatacaatatacctaagattgagattcccattgagagcaaaaaatagcc

SEQ ID NO: 885861 - DNA, 615 bp, Homo sapiens
ggtgcaactgctttcattcagtatgaaactgaaactacacagacaaatgaatagcccacgtggttattcatttctagttctttacaggaagaagttctttctgttgcttgtataatcttcttagaaaggaaagctyggggactgactcaccataaccaaaaagtaatttaggaagtaatcaacaaaacagtcccaagaataccaagaataaagtgagctaaactaagaaacctggaacattctaggtaggggctgcctacaagaagcgttgaatttgtttcactaaatacttattgaatgcttgtatttgaattcactcaattatgtgtttatttagtgactaccaatgcacttcataacatacctgtgacacaataataatgaaaccaatgtgatctttgctcttttgggggttctcagcttacttggcatgatctgttcagtctggaattcaacacagtgttatgaaagcaatgataatacaagaacaatattaactgtcattgagccctaattcatgtcaaccccttcacatacattatctcagctaatttttaaacactccttttagcctcactttgcaggtgctgaaactaaagtttacaggggtaacag

SEQ ID NO: 885862 - DNA, 591 bp, Homo sapiens
caaagccctgaaccacagtgctcttctcaccgcagcctggaagcggaatgagcttttggagacttcctgggacttgctgtccttgtccaggtctgccaggtgtaggggaggtgtgactggttccatcatggaccggttcctccatggaccggttcctccgtggaccggttccgccatggaccggttccgccatggaccactcctgccctggaccactcctgccctggaccggttctgccgtggactggttcccgccgtggaccagttcccgctgtatactggttctgccctggactggttcccgctgtggactggttccttggggctctaagtgcggaagggcccagagctggtccctgcccagcgccctgctagggctgtgtccttggctccaggggccttgggactggcttcccagcrttccctcggtgtgtcacaggctgcatgacccctggaatgcgggcagggccacagccacagtctgtctgatccctgagcccaggacaggctcacgtcctcagcgacccactggtgactgacttcccagactctcctctgtccctcaggagcagccgtgtcctctcccaggcc

SEQ ID NO: 885863 - DNA, 560 bp, Homo sapiens
cccccagccgtgcccttctccctctccgggcccccttgccctctgtcccccacactgccactatccattcctcacaaaacatcttctcccctccttggcctcccagagctgttgtgtgtcttattttatctcattttatttttggagaaagacgcatttgtgagacccaggaggaggggaacacggcatctgtgaaggaagggcgtctggaaaaagacaacacaggsgcacacacacacacacacacacacacacacacaatttttaaaagcatggtaataaatgctattcaaaaaaaaaaaaagaaaaaaagtagagaaaaacccaccccacaatctctgaaaaacacagcccattgaaatgacaagccgaaaatcatttgctaagcgccgaaaccattccctttgtcacccaaatccttctgttgacagttacctttcaatcccacaattgtgtggcaagggctgatttttattcaatgttctattcaccctccgtattaatgaaaagggaggagggaaaaaaacttgtaagaatggtgtttaataggctgatagaca

SEQ ID NO: 885864 - DNA, 669 bp, Homo sapiens
tgactatccatctaagtcaaatgaggaagcttgccttgctctagcgtgttgcagaagagaaaagcaacaagatctgtacccatgtgggtaaatcagagaaagataggaagcagggaagcttggccattccatgcaggagaaggccctgccactggcaaacctggcccagtcactgccccaaatctaagcaacttggggtgactccttctcagtgggagagataagctggggaaggggttgttgagacagggcaagcacacacctggagcaatgttaaacatgcacctgtaatcccagcactttgggaggctgaggtgggaggatcacttgagctcaggasttcgagaccagcttgggccacatggcaaaaccctgtctctacaaaaaaaacccaaaacaaaacaaaaaaattagctgggcatggtgatgtgtgcctgtagtcccagctactcgggaggctgagggaggacgacggctgggaatttaaggttgcagtgagccatgattgtgccactgcactgcagcctgggcaacagagtaagaccctgtcaaaaaataataataatagagttcacattccctttcccagcagaaaacatcagggacatgggtgggtagtgcccctacagggccgcacagttgggcaaagctgtccattcaggccttacc

SEQ ID NO: 885865 - DNA, 660 bp, Homo sapiens
accaacagcaataaatacgccaccaatttgctctctgaatgttcttatttgcagcacgccatgcagaaaaaatattaacaaaaaacaaactcctcactcataacaggctgaggagagcctctttagagtggcgatgtttgcctggatctcttatcccatgttttctttctgtctaaagaagctataatttgagctaagcagctgctggtaatactcttctgggacattgagctaagagaggcgatggtgtgggagaaggttggcccaaaaggaggacaatggagggagaatcccactccagggactggaaactgaaggaatgggggaggcccgtcagctgaatgggaagatccagagagttgctctcaggggtgatgaggaaccctggggtcttggggtcctgaatactaggaaagccgctactrctttctgggacttgatttccacatctgtgaaatgggctgatttgatgacctcttccggttccagcactctgtatttgccaaagtattttttattctttctcatgttctgggttctgacttagcaagaatttgtgggagtggacactgttctgtaattctgggatcgtcaagatccttgagacaccagaattctgttctattgttctttgatttgaagactccaggggactatgaa

SEQ ID NO: 885866 - DNA, 605 bp, Homo sapiens
aggtgcttagtctgtgtctattgcctcatgggaatttcctacaatcaatcgacagaggaggagaaaactcaggtctggtttatatatgcttcttcactgtatgcagaaaacacctgaaagtagacagttgcagcactacagccactttctaggacattcctgaatgacacaggtgaagagaacttctccraggggttagaaccacagaattgcatctgattgttcacttttctggaaggagaaatggtctgatatgagattacataccgagtcatggtctgtgacctatggttggctggatgatcaggaaattgaaaaaaacatgattgataaattaataacaaaaaattgggggaagaactttctgtataaacacatctaaatgggaaaaatcatggaggcatttgtaccccatatgaatgcttcaaaagaagacatcatcagatgatgattttaataatttaattgacagaatgatccattgtatggataccagacaatttctttctccagaccctttcatgacccagtgagctcataaaaatgtggttatggtgtgagaaatggaggtgatgcatgaggtcagcaaaatcaacttccactta

SEQ ID NO: 885867 - DNA, 588 bp, Homo sapiens
taagatatatatgtataaatattatatatatatacattatgtttctatagagaaccctggatattaccttgattaggccacattggagctagtaagtgtcaatgttgggatacatccatgtttgtctgatttaatggctgtgctcatattatctcctgtgccatagttgagttctgcttattgaatagtgaaggtggatagagwctcagaggtcccccatatctcttgctgatgcctcattgcctaaatgcttagtgaatcttgtcttgtattttgattgatttgctgtatgaaaattatccccaaatttagtagtataaaacagcaatcatttcattttgctcactcatttacggttaagaaattcaggaaaggcttggctaggttactctttcatggggtctctcatgtggttgcagtgagctgtcccctagggtatcagttgcctgaagctcaactgaattgaacctccaagatggctcagtaacttgactgatagttgattcttggtattggcttcggggcttggccagactgtcagccagagtaccagagactttccatcacagtaatctcagagcagtcaga

SEQ ID NO: 885868 - DNA, 609 bp, Homo sapiens
ttaggactgtaagatatattaatattgttatgtgccatgtaatttgcttatacttgttgatgtatatacttacattgtataaatgtaccagatttcggggccgggcacggtggctcacgcctgtaatccctgcactttgggaggccaaggcgggcggatcacgaggtcaggagatcragaccatcctggctaacatagtgaaaccccgtctctattaaaaatacaaaaaaattagccgggcgtggtggcgggcgcctgtagtcccagctactcgggaggctgaggcaggagaatggcgtgaacccagggggcggagcttgcagtgagccgagatcctgccactgcgctccagcctgggtgacagagtgagattccgtctcggaaaaaaaaaaaaaaaaaaagtaccagacttcatttaatcatttttttatttggttgcttcaagtttggggctattagatatattgttgctatgaaattctagtgcatgccttatggtggaacttacggacatgtttctgtttggcatatacttaggagtacaattggtggtttctaggggtatgcatgtggtgagtttttaatacacactgtcaaagagttttccaa

SEQ ID NO: 885869 - DNA, 612 bp, Homo sapiens
gtttgatctaaggtctatttgctttagggggcaccccaagcccactaacactgtgcttcttgcagacttgtggatataccaccttaatggtattggagagctggacgaattttctggattactaggcaaaaacacttgttcccttgccttactttctcccaaatgaacagagtctgtctgtctgtctgcytctctctctctctctctctctctctctctctctctgttctgagccacctggagctctgggtggtgtgatggtgtgacacaagcacacctgtggccactaccattgagactgcagtgagtcatacctgaagccagcacagtactggatctcaaccaaagcctgttatatccactccctggctatggcctatgttcactcaagtccctgggtctccataatcagaaagagtcaaagtcagccaggcctgtgtccttcctttcaacatggtaagttctcccaggccctggacatgtacaaaagccagggactagagttaaacatcttagaaatctacctggtgttcaattgtactgtggatgaactgccactcaaaccacagcatacttttctttctattctttacttctcttttgaaagtcaga

SEQ ID NO: 885870 - DNA, 678 bp, Homo sapiens
gtgtgtatcagagtttctttttccactcattgattgatgcttgcccttgttttttaatgtgtcgcctgcttctttgttgacttgtagaagtatttaatagattttggatctaaaccttttataaagcgtattcattgacatatattctccttgtatctagcttatatttttagtctgtcaattctgtttcgatgaatggatcttccttttgatagactccaattcatcaacaatctccattatggttagtgctttattgtcctataaaaatgtttctaaaattacagatttcttatcctgtgttttattctaaaagtattattatttttatgtttagttctataatgaatctggraaaatttttgcacatgctgtgaggtaggagtccagtcttatgtttctcatattgtatagattatttactcagaacaatttactgaaaagtccttctttaccaactgtactgcaatgctgtctttgacatgattgagtgactataaacatgtggttctatttctagactctctttgtttctcccactatttttttttctttttgttggagtaactacactgtcttaattactatagctttatagtaagtatagatatctgatagtataaatccatgcttttttcttcctcaatattgtcttgaatatgccaattcatttgttat

SEQ ID NO: 885871 - DNA, 660 bp, Homo sapiens
catctgtgtttattgtgggctttctgtgaatatctctgatcacatggaggacattctcttctattcctaggttttaagtaattacttaaatttttaaatgagtgattgaattctacaaatgctttttctgcacccatagaaataataaaactgtttccatctttttttctcaaaatgtaacaataacattgtttgatatctgactgttacaatttacatttgattttgaatgttaactcccatgtgataatgattacacacatacaattgcatttggtgcactaataatgtatctattcagatcttatccagcaatgttggtgagagagattaatctgtagttttccattcttacaatgtctttattaggttttattatcaaaattatgctgcctctyataaaaagctgagatgtatttttctctttttctttccttttaaaatatttgtaaaagattgatattatttcttccttaaatgtctgggaaaattaatctcttattccccctgggcctgaaatttctttgtataaggtttggataacaaatattatttttaaaatggctacaagcacattaaaaattgttttccattttttattgtatcagctttgttaatttgtcttcttcaagtaatttatatacttcatcttaattgtca

SEQ ID NO: 885872 - DNA, 660 bp, Homo sapiens
catctgtgtttattgtgggctttctgtgaatatctctgatcacatggaggacattctcttctattcctaggttttaagtaattacttaaatttttaaatgagtgattgaattctacaaatgctttttctgcacccatagaaataataaaactgtttccatctttttttctcaaaatgtaacaataacattgtttgatatctgactgttacaatttacatttgattttgaatgttaactcccatgtgataatgattacacacatacaattgcatttggtgcactaataatgtatctattcagatcttatccagcaatgttggtgagagagattaatctgtagttttccattcttacaatgtctttattaggttttattatcaaaattatgctgcctctcataaaaagctgagatgtatttttctctttttctttccttttaaartatttgtaaaagattgatattatttcttccttaaatgtctgggaaaattaatctcttattccccctgggcctgaaatttctttgtataaggtttggataacaaatattatttttaaaatggctacaagcacattaaaaattgttttccattttttattgtatcagctttgttaatttgtcttcttcaagtaatttatatacttcatcttaattgtca

SEQ ID NO: 885873 - DNA, 675 bp, Homo sapiens
actgtaacaggtttcaaatggagtataaaaaaaattgttcaaattctttacacatttggtagaattcagctgtgaatctatctggtccagggaatttttcttttcttcataggacttttattactgatttaatttcagagcttgatattggtctattcagggtttcaatctttctgattcaatcttgtgagattgtgtgtttccaggaatgtatttatttcctctagattttctaatttgcctgcatagaggtgctcataatagtctctgtggatcttttgtacttctgagggggcagttgttacrcatctttttcatctctgattgcctttattttgatcttctctttttcactctttgctaatctaactagtggtctttcaatctttgtttatttattaattttttaaaaaaccaattcttgattttattgatcttttgtataaatttttgcatcttaatgtcactctgttcttcgctaattttacttatttcttttcttctgctagcttacgggttggttggttatttttttcctggttcctttagggtgcaaagttaggttgttaatttgtaatctttctaacttcttaattaagttgtttagggctataaactttcctcttaacactgctttagctacatcccatagattttggtaagttctcttcctat

SEQ ID NO: 885874 - DNA, 675 bp, Homo sapiens
actgtaacaggtttcaaatggagtataaaaaaaattgttcaaattctttacacatttggtagaattcagctgtgaatctatctggtccagggaatttttcttttcttcataggacttttattactgatttaatttcagagcttgatattggtctattcagggtttcaatctttctgattcaatcttgtgagattgtgtgtttccaggaatgtatttatttcctctagattttctaatttgcctgcatagaggtgctcataatagtctctgtggatcttttgtacttctgagggggcagttgttacacatctttttcatctctgattgcctttattttgatcttctctttttcactctttgctaatctaactagtggtctttcaatctttgtttatttattaattttttaaaaaaccaattcttgattttattgatcttttgtataaatttttgcatcttaatgtcactctgttcttygctaattttacttatttcttttcttctgctagcttacgggttggttggttatttttttcctggttcctttagggtgcaaagttaggttgttaatttgtaatctttctaacttcttaattaagttgtttagggctataaactttcctcttaacactgctttagctacatcccatagattttggtaagttctcttcctat

SEQ ID NO: 885875 - DNA, 675 bp, Homo sapiens
actgtaacaggtttcaaatggagtataaaaaaaattgttcaaattctttacacatttggtagaattcagctgtgaatctatctggtccagggaatttttcttttcttcataggacttttattactgatttaatttcagagcttgatattggtctattcagggtttcaatctttctgattcaatcttgtgagattgtgtgtttccaggaatgtatttatttcctctagattttctaatttgcctgcatagaggtgctcataatagtctctgtggatcttttgtacttctgagggggcagttgttacacatctttttcatctctgattgcctttattttgatcttctctttttcactctttgctaatctaactagtggtctttcaatctttgtttatttattaattttttaaaaaaccaattcttgattttattgatcttttgtataaatttttgcatcttaatgtcactctgttcttcgctaattttacttatttcttttcttctgctagcttaygggttggttggttatttttttcctggttcctttagggtgcaaagttaggttgttaatttgtaatctttctaacttcttaattaagttgtttagggctataaactttcctcttaacactgctttagctacatcccatagattttggtaagttctcttcctat

SEQ ID NO: 885876 - DNA, 673 bp, Homo sapiens
attaaatgtatgtctatttttttttttttttgagagagagtctcaccctgtcacccagagtggagtgcaatagcacgatcttggctcactgcaacttctgcatcccaggtccaagtaattctcctgcttcagcctcctgactagctgggattakaggcatgcgccaccacactccattaatttttgtatttttagtagagacagggtttcagcattttggtcatgttggtctcaaactcctgagctcatgatctgcccgccttggcctcccaaagtgctgggattacaggcatgagccacggcgcatggctgaaagtatgtctactttgtgattttcatttttcagtttctttataatctccagtggggtttaaactccattcccctctcagtcattagcattgatacattccgtatttctcagaagaacaagggaaggagaacccttatgagtgatatagattaaaggatttattgccaggtccatcccacagaccctggccaagcaatggatgaaaggagtatgcagacacaggtatgcagtgaaagagcagctaggggactgctgaagagtgagcagcctcaataagctggagctgcttgctttcatttagtacagacataatgccgaaagcctggagccaacacaatctgtgggtaattaacattattg

SEQ ID NO: 885877 - DNA, 673 bp, Homo sapiens
attaaatgtatgtctatttttttttttttttgagagagagtctcaccctgtcacccagagtggagtgcaatagcacgatcttggctcactgcaacttctgcatcccaggtccaagtaattctcctgcttcagcctcctgactagctgggattagaggcatgcrccaccacactccattaatttttgtatttttagtagagacagggtttcagcattttggtcatgttggtctcaaactcctgagctcatgatctgcccgccttggcctcccaaagtgctgggattacaggcatgagccacggcgcatggctgaaagtatgtctactttgtgattttcatttttcagtttctttataatctccagtggggtttaaactccattcccctctcagtcattagcattgatacattccgtatttctcagaagaacaagggaaggagaacccttatgagtgatatagattaaaggatttattgccaggtccatcccacagaccctggccaagcaatggatgaaaggagtatgcagacacaggtatgcagtgaaagagcagctaggggactgctgaagagtgagcagcctcaataagctggagctgcttgctttcatttagtacagacataatgccgaaagcctggagccaacacaatctgtgggtaattaacattattg

SEQ ID NO: 885878 - DNA, 673 bp, Homo sapiens
attaaatgtatgtctatttttttttttttttgagagagagtctcaccctgtcacccagagtggagtgcaatagcacgatcttggctcactgcaacttctgcatcccaggtccaagtaattctcctgcttcagcctcctgactagctgggattagaggcatgcgccaccacactccattaatttttgtatttttagtagagacagggtttcagcattttggtcatgttggtctcaaactcctgagctcatgatctgcccgccttggcctcccaaagtgctgggattacaggcatgagccacggcrcatggctgaaagtatgtctactttgtgattttcatttttcagtttctttataatctccagtggggtttaaactccattcccctctcagtcattagcattgatacattccgtatttctcagaagaacaagggaaggagaacccttatgagtgatatagattaaaggatttattgccaggtccatcccacagaccctggccaagcaatggatgaaaggagtatgcagacacaggtatgcagtgaaagagcagctaggggactgctgaagagtgagcagcctcaataagctggagctgcttgctttcatttagtacagacataatgccgaaagcctggagccaacacaatctgtgggtaattaacattattg

SEQ ID NO: 885879 - DNA, 570 bp, Homo sapiens
ttggtcatgttggtctcaaactcctgagctcatgatctgcccgccttggcctcccaaagtgctgggattacaggcatgagccacggcgcatggctgaaagtatgtctactttgtgattttcatttttcagtttctttataatctccagtggggtttaaactccattccccyctcagtcattagcattgatacattccgtatttctcagaagaacaagggaaggagaacccttatgagtgatatagattaaaggatttattgccaggtccatcccacagaccctggccaagcaatggatgaaaggagtatgcagacacaggtatgcagtgaaagagcagctaggggactgctgaagagtgagcagcctcaataagctggagctgcttgctttcatttagtacagacataatgccgaaagcctggagccaacacaatctgtgggtaattaacattattgttctccctttctggggtcaaaatttctggttaacataggtaaacaagcttatttgcactaaattccactatgcttccttgtatctactccttgccctctgcctcagggtacga

SEQ ID NO: 885880 - DNA, 673 bp, Homo sapiens
attaaatgtatgtctatttttttttttttttgagagagagtctcaccctgtcacccagagtggagtgcaatagcacgatcttggctcactgcaacttctgcatcccaggtccaagtaattctcctgcttcagcctcctgactagctgggattagaggcatgcgccaccacactccattaatttttgtatttttagtagagacagggtttcagcattttggtcatgttggtctcaaactcctgagctcatgatctgcccgccttggcctcccaaagtgctgggattacaggcatgagccacggcgcatggctgaaagtatgtctactttgtgattttcatttttcagtttctttataatctccagtggggtttaaactccattcccctctcagtcattagcattgatacattcygtatttctcagaagaacaagggaaggagaacccttatgagtgatatagattaaaggatttattgccaggtccatcccacagaccctggccaagcaatggatgaaaggagtatgcagacacaggtatgcagtgaaagagcagctaggggactgctgaagagtgagcagcctcaataagctggagctgcttgctttcatttagtacagacataatgccgaaagcctggagccaacacaatctgtgggtaattaacattattg

SEQ ID NO: 885881 - DNA, 660 bp, Homo sapiens
actggggagggcatctctgaaagaaaggcagcagtcccagtcaggggcttagagataaaactcccatcttcctgggacagagcacctgggggaaggggcagctgtgggcgcagcttcatcagacttaagcattcctgcctgccggctctgaagagaacagtggattctgacaaggagggttctcccagcacagcgctcaagctctgctaagggacagactgcctctgccagtgaatccctgaccccagtgcctactgactgagagagactccccaacaggggttgacagacacctcatagaggagagtccagctggcactgggcttccctttgggatgaagcttccagaggaagaagcaggcagtaatagttgccgttctgcagcctccacyggtgatactcaggcaaatagggtctggagtgaaccttgagcaaactgcagcagacctgcagaagaggggcctgactggtagaagaaaaactaacaaacagaaagcaataacatcaacatcaacaaaaaggacccccacacaaaatcccatccaaaggtcatcaacctcaaagatcaaaggtagataaatccacgaagatgaggaaaaaccagcacaaaaatgctgaaaattccaaaaacattcttctagagaaaaatgtcttttctcc

SEQ ID NO: 885882 - DNA, 715 bp, Homo sapiens
tcatacctgggataaaaggctggttcaacatacacaaatcaataaacataatctatcacataaacaaccaatgacaaaaaccacatgattatctcaatagatgcagaaaaggcctttgataaaattccataccccttcatgctaaaaactctcaataaactaaatattgatggaacatatatataaaaaaagacctattcacaacaaacccatagccaatatcataatgaatgggcaaaagctggaagcgtactctttgaaaacctgcacaagtcaaggatgccctctctcaccactcctattccacatagtattggaagttctgcccagggcaatcaggcaagagaaagaaataaatggtattcaaataggaagagaggaagtctaattgcctctgtttgcagatgacataattgtatatttagawaaccccatcatctcagcccaaaactccttaggctgatgagccacttcagcaaagtctcaggatacaaaatcaatgtgcaaaaattacaagcattcctatacaccaataatagacaagcagaaagctgaatcatgagtgaactcccattcacaattaccataaaaaaataagatacctaggaatacaacttacaagggatgtgatggacctctttaaggagaattacaaactgcttctcaaggaaataagagaggacacaaatgaagagaaaaaaattccatggtcatg

SEQ ID NO: 885883 - DNA, 618 bp, Homo sapiens
agcttctttttaacaatgcaggtacaggaagctttgctgaataagttttcattgtcgagatggtcttcacagcactcaaaggtaaactttttctctgcagagacttttcattttataacatcatgtattccactagcattctgaagtacagagtactaaattttttctttgggattttgatcaattaggctaaatatattgcatcctcaaacctgtctccctcaacagctgtatttggcatagatcattccattgtytttgcttctcaagtcattctgtctattaaatagagccatagagctgtcattgagatgctactccacatatttaaataggttttaaaataatatatgatataaacttaaggttgaaatcaaacgttcaatgagaagcaatcttctggggggattcaaggcattagagaaaacaagttgaagaataataatggatagaattttctgtagttcattttggaacacaactattgcccttggatatatctgactgcctttcacatgtcagaaaatgctagaagcctaacaaacaataaaacttgtatttgacagttatttttctaatacagatgataagattccagtattttaatgtgacctctgg

SEQ ID NO: 885884 - DNA, 578 bp, Homo sapiens
aatgtatgttctcaaaggatttgttttaactgggacatcaggctagaacacattccaaaagacattaatctgtgtgtgtgtgacagtcacagactgatatagctgaagggaccatagacatcatagaagacctttgctgacagattattcaggtggttttgtctttggaaagtcaatgagagtttagcttaagtaaagggagggataagtacccccttattccttatgggaattttcaggttattccttacttagcttctccctgcaccagagacagggcatgttacyggttgggaatctttgaagactgatgtaattctctctgtctcaatttcttcatctgtacaatgatgctaatagtagtactgatttccttttattgttatgaaaattaaattagttcatatctataagatgctctagaacagtgtctggcacataataaatgttatgtgactgtttgctgttattgtttctcttattgtagtaatgttttccacttttttgttttacatatttcagttctatttttttgtcagtcattgttgttagaggttcattggtatgtttttagcatt

SEQ ID NO: 885885 - DNA, 617 bp, Homo sapiens
aatgctcagagcatgatgaaatttagatagggagaaggatttgtggaatgctgaaaaggcattctgaatgtcaaaaatgtgtgacttggagtcatgaatggtagaggagaagttttgactagcacacatgcaaatgtgggcttacatacttcaaaacccagaggtaaaacctgttaaaaatgaatgtggcacattcctcgggaaagcttggacaggtttattcatattaggttatcttaacacaatttgtgcattagagactcatgttgtgacttaattctttcaataattctgtcttcagcaaaagaagttaacaaaaaacaagtgtgctacaaacacaatttcaatgcaagctcagtttcctggtgttcaaaaactgttgatgtgtgttgtcactttaccaatgctgctaataattcagtytggagcccatctatgaagctgaatctggttcctggtaagaacgttttaaattactttaagatgttatagtcagggcagggacttatttatttattcactccctcattcatccccattcaataaacatatgttaaataccctcactgtggtaggccctgggctcaccatagtggtatttaaaagaaaagaaataa

SEQ ID NO: 885886 - DNA, 512 bp, Homo sapiens
catcagacaaaaccaaattgagggaaatctgcaaaatagctgactgatactgttttaaagtatatatatagagagagagagagagtcagtgtctcactctgttgcccaggctcactgcaacctctacctcctgagttcactccgctcamtgcaacctctacctcctgagttcaagcaattctagagcctcagcctccagagtagctgagattgcaggggcctgccaccacgcccagctaatttttgtatttttactagagacggggtttcaccatgttggccaggctggtctcaaactcctgacatcaagtgatccgcccgcctcggcctcccaaagtgctgggattacagccatgatccgtcacacccagcctgtttcagtgttaaagttgtaaaagacaaagactaaagaactgtcatagaagggagacaaaggagacataaaaactaaatgcagtgtgggatcctagatttgatcctggaggagaaaatggacattgttggaataactg

SEQ ID NO: 885887 - DNA, 512 bp, Homo sapiens
catcagacaaaaccaaattgagggaaatctgcaaaatagctgactgatactgttttaaagtatatatatagagagagagagagagtcagtgtctcactctgttgcccaggctcactgcaacctctacctcctgagttcactccgctcaatgcaacctctacctcctgagttcaagcaattctmgagcctcagcctccagagtagctgagattgcaggggcctgccaccacgcccagctaatttttgtatttttactagagacggggtttcaccatgttggccaggctggtctcaaactcctgacatcaagtgatccgcccgcctcggcctcccaaagtgctgggattacagccatgatccgtcacacccagcctgtttcagtgttaaagttgtaaaagacaaagactaaagaactgtcatagaagggagacaaaggagacataaaaactaaatgcagtgtgggatcctagatttgatcctggaggagaaaatggacattgttggaataactg

SEQ ID NO: 885888 - DNA, 604 bp, Homo sapiens
tcggtgagggcaaaccaccacacacatttggcatcagaagtgttctgtgggcagaaacagatcatagtagcaataacacagtgctaagatgtcattagttgtgagacacatcctgatttcacaggcactaaattataaaaagagctttgtcttagaatcgataaaatacaccatctcgacagctgtgtctggctgctcgcccagccctgctaccacctgcaggcctctaggttgctcatttctgatctaactttgacctccctgctgtcctttcaggcctacctggaaggcytgagccagcagactagctgcctgttctggcatagtgtcacttttctcctcttctgactttctgtcctatcgcagacatgacaaggttggggaatcccaggaacccaggccagctgcagaatcaggcaagtcagggacagatggtggcctgaatgaaaaggggcaggatgggccttgatggtgtctgagattcccccgatgtaggaagtgggtgtccctggagggcactaagcagggcaatgccatgtttgtgtgaaacttgacaacagggattgggcaggcaacaggtgttttctctaggcttgtaaaaaca

SEQ ID NO: 885889 - DNA, 611 bp, Homo sapiens
cagggttaaggaaggagagctttcacaagtttgggaattgctggggaagttcagagggaaacagtgcctaaccctgaccagctgaaacccttgtgcaggatactggtgggaacttggagaaaagccaatagtaagttatgcagatatggcccttggaggctgtggaagggaagcttgaggcatgaggtgtagggactgcagcctctttggggcccaggggctgggtgagggctgaaggctgctctgggtcagcagagccagcagtgagatgatatcactgcaaagcaggaggctagtgaggatgtgctgggcaccgctgtgtccrtccactggcatgtttgaccatatgaccctcctccacttcccttcagtcttctcaattctgagaatcatgtctccggacaactttagccgagaaccatacaaagaaggaaattctgggagcagacagccatgctggcaatagacaacccagcttagagtctccagttctagagaaatattcttctgatgtcctcttatagggtattgaaaaaactagggcactgctgaaggaaagaaatcagattaatgtgtccaaggcaaagggttaccatttaaagagtgaatga

SEQ ID NO: 885890 - DNA, 647 bp, Homo sapiens
aagctatattagctgaaacaactccttttactgcgtagaacctatatcgagagtgtgtgtatatgtattataggaggagctctcaattttatgtattctttctgcctttaattttcttgtttgtttgagcttagggatgagatacttatgcaagatatttttgaagtaaattaaacatttttcacatctctggaaatttagagttctagacctctggttaatttatatctaatatgaagaagacacctctaatctggatgttaagaatgaagttctgctacattataatgtacagaagagcaaaagggaggaacactatggttaaccctctcttgattaagggctacttaatgcacagtgcattatgtacacaggtcaaccatggtaacaatagttcttagctttgaaactccatgcaaaccatgccttttttttaaggagcaaaaatctgagaaaaaaagtgagagacctctgcctacaaaacytcaaaccagtcacttttgtcaattgctaatacccagttacttatgatttaaaaacaaccaacagaaaacatcccactgactgtatggcactctgtagtcaaaaaaggaaacttccttattgggacttttctttcttagtccagttgtgttgacacatatgaa

SEQ ID NO: 885891 - DNA, 570 bp, Homo sapiens
ctctatacaaatgtttgtaatattaaataataaaatgcctaactaaccatcaatcagtgggtaaaaaagcatctccccacccttagtcaacaattagtgatgctgtttctttacaggagtggttattgggaaaattgagagtagagtggaaatgtttttatctcaactattactcaagaattactgcagctataagtcaggataagtaggtgatgtttaactcttcaaattctatttattactcacaccaagaatgcaacaactcaatcagtatttgccttccagtgctgccttcttagcgcatagttcctatgtgaatcacagcytcatggaggaaacatgtgaagaaattacacctcatcctgtatattttgacctggaaatgagacatggcacttctgttcacaggctattggtaaaactagtgacatgaccccacagaaaatccagagggctatgaaatgtgaagaagctcatggatttttttgaaaaattgagcagttaatattaccgccatacccaatgttattttaatatttcccacttaatttcaccggatatcataagaca

SEQ ID NO: 885892 - DNA, 562 bp, Homo sapiens
ttgataaatttggtaaaatgtttgctaacagttatccatcaaaattattcaaattatccttaatctaaaggttaaattttttttatcagccacaggtcataatgtaattcatttgacaacattgtgaaaagtacagagagatcaagctttattatctcagttttctagaaggaaaagtgaagctataaaagatatatgtcacagctaatgttggagatggaaataggttctggtttcactcacattttaccatgtgacatatataatatatatctggctggatttgatttctgctatctttcttaattgaggtaattatttttttagtggcacccaaataaaagcacttaataataaatacttttttwaaaaaaagatagtcattaagctctttgaatgtcagttttccttctgcaaagtgagaatgatgtagaatatagcgtctaagtttgaatatattttaaaatccatgaggaattaagtcctcttggtcaattctagattttaagcacctagaatgtttttctggcatgtagattgtgcacagtaattatttgtttaa

SEQ ID NO: 885893 - DNA, 626 bp, Homo sapiens
gtactttctcttctgttcctaacccttactccttcagatctattcctgcaccccttccacaagagtttttggggaaactcagattttaaatctctatggggttgcagatttgttagcttgatgagattttgctcttaatctgattataaaatgttcttaagttcttaaatatttcagggtttctatttcccatgkttttttttaacttagggggttttattttctataatattaaggcatggggaaagaagaaatattatgaatgggagctcagcagctatctggcatcttctaaacatgtgggttttttttttattgtatttttgtttttttgcttttttttttttttttgagacacagtcttgctctgttgcccaggttggagtgcagtggcgtgatctcggctcactgcaaactccacctcccaggttaaagggatactcttgcatcagcctcccaggtagctgggattacaggtgtgtgccactatgctcgcctaatttttgtatttttattaaagacagggtttcaccatgttggccaagctggtctcaaactcctgacctcaagtgatctgcttgccttggcctcccaaagtgctgggattacaggtgtaagccaccacc

SEQ ID NO: 885894 - DNA, 626 bp, Homo sapiens
gtactttctcttctgttcctaacccttactccttcagatctattcctgcaccccttccacaagagtttttggggaaactcagattttaaatctctatggggttgcagatttgttagcttgatgagattttgctcttaatctgattataaaatgttcttaagttcttaaatatttcagggtttctatttcccatggttttttttaacttagggggttttattttctataatattaaggcatggggaaagaagaaatattatgaatgggagctcagcagctatctggcatcttctaaacatgtgggttttttttttattgtatttttgtttttttkcttttttttttttttttgagacacagtcttgctctgttgcccaggttggagtgcagtggcgtgatctcggctcactgcaaactccacctcccaggttaaagggatactcttgcatcagcctcccaggtagctgggattacaggtgtgtgccactatgctcgcctaatttttgtatttttattaaagacagggtttcaccatgttggccaagctggtctcaaactcctgacctcaagtgatctgcttgccttggcctcccaaagtgctgggattacaggtgtaagccaccacc

SEQ ID NO: 885895 - DNA, 626 bp, Homo sapiens
gtactttctcttctgttcctaacccttactccttcagatctattcctgcaccccttccacaagagtttttggggaaactcagattttaaatctctatggggttgcagatttgttagcttgatgagattttgctcttaatctgattataaaatgttcttaagttcttaaatatttcagggtttctatttcccatggttttttttaacttagggggttttattttctataatattaaggcatggggaaagaagaaatattatgaatgggagctcagcagctatctggcatcttctaaacatgtgggttttttttttattgtatttttgtttttttgyttttttttttttttttgagacacagtcttgctctgttgcccaggttggagtgcagtggcgtgatctcggctcactgcaaactccacctcccaggttaaagggatactcttgcatcagcctcccaggtagctgggattacaggtgtgtgccactatgctcgcctaatttttgtatttttattaaagacagggtttcaccatgttggccaagctggtctcaaactcctgacctcaagtgatctgcttgccttggcctcccaaagtgctgggattacaggtgtaagccaccacc

SEQ ID NO: 885896 - DNA, 626 bp, Homo sapiens
gtactttctcttctgttcctaacccttactccttcagatctattcctgcaccccttccacaagagtttttggggaaactcagattttaaatctctatggggttgcagatttgttagcttgatgagattttgctcttaatctgattataaaatgttcttaagttcttaaatatttcagggtttctatttcccatggttttttttaacttagggggttttattttctataatattaaggcatggggaaagaagaaatattatgaatgggagctcagcagctatctggcatcttctaaacatgtgggttttttttttattgtatttttgtttttttgcttttttttttttttttgagacacagtcttgctctgttgcccaggttggagtgcagtggcgtgatctcggctcactgcaaactccacctcccaggttaaagggatwctcttgcatcagcctcccaggtagctgggattacaggtgtgtgccactatgctcgcctaatttttgtatttttattaaagacagggtttcaccatgttggccaagctggtctcaaactcctgacctcaagtgatctgcttgccttggcctcccaaagtgctgggattacaggtgtaagccaccacc

SEQ ID NO: 885897 - DNA, 588 bp, Homo sapiens
atagaggagggtgctattcttatcttatgatatgtatatgtagagagagagaggaagagagacagggagagagacccttattttcacatgatctttcccactgtgaagataggacccttaattttaaaggatgaattgytttggagcacatgattaagattctacaaggtacacactacaagttagagagtgtatcataatggaagaagggcaaatgtacaatatatatttataaatgttatatatataagtactatatatttataaatgtatatatatagcacttatatatgtgtgtgtatatatagcacttatatatataacatttataaatacattataaaatacaatatataaagtgcctggtgtattagttttgctttttcatgaacaattcactgatggtttcattttcctcaaaatccttagtggaaaattgcaatattggcaaaagcttcagaaaaaaatatttttgaggcagtttacatagactacagtccaaaaacaacagagagataggttcgtccaggggttgcatgcaggtagctacctcaattaactcattgtctcatctcctaggctgctgaa

SEQ ID NO: 885898 - DNA, 588 bp, Homo sapiens
atagaggagggtgctattcttatcttatgatatgtatatgtagagagagagaggaagagagacagggagagagacccttattttcacatgatctttcccactgtgaagataggacccttaattttaaaggatgaattgttttggagcacatgattaagattctacaaggtacacactacawgttagagagtgtatcataatggaagaagggcaaatgtacaatatatatttataaatgttatatatataagtactatatatttataaatgtatatatatagcacttatatatgtgtgtgtatatatagcacttatatatataacatttataaatacattataaaatacaatatataaagtgcctggtgtattagttttgctttttcatgaacaattcactgatggtttcattttcctcaaaatccttagtggaaaattgcaatattggcaaaagcttcagaaaaaaatatttttgaggcagtttacatagactacagtccaaaaacaacagagagataggttcgtccaggggttgcatgcaggtagctacctcaattaactcattgtctcatctcctaggctgctgaa

SEQ ID NO: 885899 - DNA, 658 bp, Homo sapiens
tgttatagaagccagtattctggccattattttttttttttaataagaaagaaagaaaaggaaagatgaaataatttcagaatattttaaatccttatgattagtgtgtgtgtgtgcacatgtgtgcatgtgtgtttgatataattatttgaattaattttggacattcaatgttgatttcaacatccaaagattaatgtacatttaatgatctttaatatttattagtgagacttttcagatatcattttgtttgtcgacawgatccctccattttgtcatacatttcactgttgactaggttgcctttgtgatttctgcttttctgggttctctcttaggattcctcactttacctacaactgtcctaggtagagagatctaggagaggaagaggctgggaatgaagtttcaggcacgtgtgatttattaaaggtgggtcctcaggaagcaggaatggcaaatttagccaggccagggaggggaactgagcaaagaagtggtatgatgtgcgttctgactttagcctgatcccacagcaggctgtggagagtcaatttctcaataacctcagtcccaacttgaggcaagagagcagggcaggcacacatatactgtcctaggcagtgcttccttctcagccaagggcaattctcca

SEQ ID NO: 885900 - DNA, 569 bp, Homo sapiens
gctctgctactgaggtcccagccagtgaccccaagtaggtggccaagtccccatgtgatcaataacaggttagtttctctcctccctatacatgttatacycccatcttaaccctctaataatcaagcatctgtgaccatagaaacacactgctgctgtggttctataacttcagagctctctagtgggttttagtggagaaaataaataaaacagggtgttctaatagaatagcaattgaattaaatagatattatatcaaataggggtctgtcagtacagaccacttgataaataaggaattccatagagaaataaaaagtttaatccttggtcccctaactgtggtcctcataccctgctttggaatctgaatcaaaacgcactctcatcatgaaatgatgttgggacaactggatattcacatgtaaaggaatcaacttggactcttacactgttaagaaaaataaactaaagtgaattaacaacctatgtataagaactaaagccataaaactcttcaaagaaaacataagggaacttcctcatgtctttggatttggcaataa

SEQ ID NO: 885901 - DNA, 656 bp, Homo sapiens
tgggctcttggggcccctgattccagcacttgactctttgatggcatttctggacctgccctcagccagaggtgagcccagtgccctgaagggtaagtcccaggccaggcagcatttgccacaagctgactgaagagcgcttaggacttaaggaaacataggtggcagtctggcagtactcactgtggcctgtggtggcagtggccatggggtgaggctcctcagcctttggaaatgggggaggggtggagagtgggaaagactgtgtcttgtggcttgagtgccagcccagcctcagtacaatagaacaccaaatagacttctaagatttcagactctagtccctggcttctgggcagcagctctgtacccacccaggtcctagggaactcaccgccttgaagtgaaggacacaggcctggctgaatttaccacctgataaktgcagagcctaagggccttgagaaagcataggcagtagccaagaagtggtgtcagcaggttttgggtgagaaccagcactgtactggcttcaagtcagacccagaacagaatggtggtagccaaaagggtacttgtgtcactccacccacagaatcaggtggctcagaagagtaagaaaccccatttgtttgggagaaagtaagggaagagaa

SEQ ID NO: 885902 - DNA, 656 bp, Homo sapiens
tgggctcttggggcccctgattccagcacttgactctttgatggcatttctggacctgccctcagccagaggtgagcccagtgccctgaagggtaagtcccaggccaggcagcatttgccacaagctgactgaagagcgcttaggacttaaggaaacataggtggcagtctggcagtactcactgtggcctgtggtggcagtggccatggggtgaggctcctcagcctttggaaatgggggaggggtggagagtgggaaagactgtgtcttgtggcttgagtgccagcccagcctcagtacaatagaacaccaaatagacttctaagatttcagactctagtccctggcttctgggcagcagctctgtacccacccaggtcctagggaactcaccgccttgaagtgaaggacacaggcctggctgaatttaccacctgataagtgcagagcctaagggccttgagaaagcataggcagtagccaagragtggtgtcagcaggttttgggtgagaaccagcactgtactggcttcaagtcagacccagaacagaatggtggtagccaaaagggtacttgtgtcactccacccacagaatcaggtggctcagaagagtaagaaaccccatttgtttgggagaaagtaagggaagagaa

SEQ ID NO: 885903 - DNA, 522 bp, Homo sapiens
actctgttttatggtcacaaccagcttttataaccacagatatacatgtggaaaatgacttcttacattttcagtcaaagaaaattgacataatcccagctcttaagagatgtacttcctgagatttcagtgtctgtgaatattgtgttgaaatatgtgagaacaacataagatagctcacttcttcttgtccacagacttggtggcataaagagttggtgtctaaaatgttgggaatgaagaagtagaagggtggttktaaaggaggcaattaaccctggagaagtctggataccaatcccgagttagctataccactaataaactgtgtgtaatgagacgggcaatgtatatttagaatttactgtcttcatctctaaaaaagaagagattagacttctacatctaacaatctgtgattcctttagacctggtattttcatgtaatttgatagaacactagacagtggtttaagcaaggagagaattgtattccaggtataaacacaagacctggatgaa

SEQ ID NO: 885904 - DNA, 522 bp, Homo sapiens
actctgttttatggtcacaaccagcttttataaccacagatatacatgtggaaaatgacttcttacattttcagtcaaagaaaattgacataatcccagctcttaagagatgtacttcctgagatttcagtgtctgtgaatattgtgttgaaatatgtgagaacaacataagatagctcacttcttcttgtccacagacttggtggcataaagagttggtgtctaaaatgttgggaatgaagaagtagaagggtggttgtaaaggaggcaattaaccctggagaagtctggataccaatcccgagttagctatacyactaataaactgtgtgtaatgagacgggcaatgtatatttagaatttactgtcttcatctctaaaaaagaagagattagacttctacatctaacaatctgtgattcctttagacctggtattttcatgtaatttgatagaacactagacagtggtttaagcaaggagagaattgtattccaggtataaacacaagacctggatgaa

SEQ ID NO: 885905 - DNA, 625 bp, Homo sapiens
ttgttgtcatagactagtaaaagtatatttaaagtaggactgttgcttcatgcttttttgttgcttgggggaaagcatataccacttgcagcttgtgtcacttagatgttgtagcctttgcagctaatggaaagtggcagtacaggatatctttttctgtccagtgtcaaaaaattggcctttgtttggtcaactttcakgaacttccatttactccagtggaaaatgaaacacttgtgaaataaagaaatattgtcttcaatgggaaatgcattccatgtgcggtatatatcatattatgacagattttattgagactgtactatttttattcacaacatgaatgcaagacttttttcaggggtctgcattataaggcagtggttatttgcatttgtgagaagagacaaaaaatgtttaatgtttttatagttaaatatcatttttaattcaagttctcaataaaatacttccacctcttgtatataaagtttgtttcaaataggaaaagtctgtttttcttaggtgcagtaacaagagtttaaggatggaagatgagaggacatgtcagtgtccatatcgtgtcattcttgtgaaacttgccaatccatgatggctttatcct

SEQ ID NO: 885906 - DNA, 610 bp, Homo sapiens
ctgagcaacttaaagtttctttaactttaaaatgaggaaaataaatactccgcatccataaataatatttataaagactacaggtagaacatgtcaagttcctagctcagtgcctgaggaacttaataaaaggtaaatattatacaaatcacaagcgaagcatctagaaggcagatcactccacttttatccccttgccatttcagtttctgttctttaattttaataatttacttttagcaacagattattgtaataattcaaacaatagagacaactcaagagcaagagactttcccctccattcctagattcaatttaatcctggatgtaaccattattaaccatytggctacaagaacagtctttaagacgctgcaatatattagtgaataagatactgccaaagatcagtatttctattgtgtagtttcagaatattatgaataaagacaaacatattcaagtagcctgttcacatcaggcatatcgcttattggccttgtaggccgagtgaaaataagctaaaagatgacaacttccaaatccaaataaaaatctagttttgctcccttatcaagaagttcttacagtcactccacgctatcgt

SEQ ID NO: 885907 - DNA, 574 bp, Homo sapiens
tagagctgtcagacagggacataactctccccagtaaaaactttcttaagttatgtgtttaccacagatcagtgcatctttgtaatttgttgggactatgtgcttaagttttacaagataatctaaaagtgatacttgtgaatggagaaaactgtcgctcatatacgggtagaggctggggttatagaaataatttatttcacttctagaaaggcaatgtccaagtctggtttcacatgcaggttataggctaagtgctctgctgggaagaaggtggctttccaggggcccaggcagcgctcttgtccacagggtatatctttagccatgacaaccacaaatttcttcctttaaaaatgcttatgagagatattaaattagagaggcattattctctgtcttwgatgatatttctccctctttgttctgctgtttggtacattatctcttggttgagagttattgttatccatatgttgcattatttgcctaaagagaagctaaatggtcagtctgcccaattctgaattagttggaatttggctaaagcagggaaatacattatatgaagtaa

SEQ ID NO: 885908 - DNA, 611 bp, Homo sapiens
ttacttagcctttctttaattgtatgtacttccctgaaaggccatgaataaagttcagatttggatattgaatcatattttccacagacttcaattcaggtttcagaacatattcccaaagtaaagaaaatgctgccactaagactagataaaacccacttaagatttaaagggccggtctgtgttattattscagtggtccaaatttgttacctaaaagagctaggtagagattttttatgacatcaattcagtttactatcattctatatcacattttgtgtatcaaagtatttcattttgcatactttatacttacgtttaagtatactttatgtacttaagaagtccaaatgcttttatctttttatactgatagcgcagtaattcttgacaattgatgtaatcatttatcaggtgaatcttttatccaagtaactggataataacaatttataggtgctaattgactttgaaggtggtcttttaaagctctggcatatttttaacttctttgaagtgtggaatttcagaaaaaaatacttattaatagacccaagtgataaacattcagaggcatacaccagtgtcttatgactttctaagaaata

SEQ ID NO: 885909 - DNA, 661 bp, Homo sapiens
tggcaattctggagggatcttgagtcgttttgcaacaagttccaagcacacataacacaattcttagggagttagtgctcttacattagtctggcatttttggatgggtgcatatcatgagcaaaaaggtaggatgaccctggatccacaaaacatatttgaaaactatatctctgctgtttatttttagagtgcttgtggaaagagataaataagttgctcagattactcattcaagggtaaagtcactttaaaaaaattgacaatgtaacagtttcaattttatctgcattgagtcaagtttagaataaccatattcaagataayagttgaaagataaccattacaaaaatttaaatccgtgatttatttttgccaaaagatggtactcatgtatctgttaagattgttaagggagatgtaaagaaaaaaaaccacaacattatttccatgaatctgaaggtatgaaacctagggctgtggaatcatggcaatatacttgcattttaccatattgcatttgaaatgtaaacaacttaatttaaaagatatgctcctggaaatgtattattaaacagcaggctctcacaagagagttaacatgccaaattaaagcacttgtaagtaaatgccagattctgcaaccattttactatcttct

SEQ ID NO: 885910 - DNA, 536 bp, Homo sapiens
gttgatttatgtacctgaatttctcccaaattataaaatctcctcagaaaagactgtatctcacttgaccttggattcttaacacctagcctcgtactgggcataaagtgggctttaaaaacatgattatctaacattgcatgttctcacttatttgtggaatctaaaaattaaaatgattgaactcataggcacagagtaggaggatggttaccagaggctgggaagggtagtagggggctggagaggaggtgggaatggttaatgggtacaaaaaacccagaaagaatgaatmagacatactatctgatggcacaacagagtgactacagtcaataataacttaattgtacattgtaaaataactaaaagggtgtaattggattattcataacacaaaggataaattcctgtgggaatggataacccattctccatgatgtgattatctcacattgcatgcctgtatctaagcatctcatctaccccacagatatatacacctactatgtacccacagaaattaaaaattaaaa

SEQ ID NO: 885911 - DNA, 543 bp, Homo sapiens
atatctgatccttttctcatattatcaaagggtttcctaccatcgtttctctgttgaaattctaccttgcacaaatgctgtgaccacttgagacttgatgctgttacttccagttaaaagcaacttttctaactcaaaatcttcatarcattttacttatgtctcttatctatagatttctacctttttctataagtattttcattaagatgaagtcccagttattcttatatgagcaaaataatgcttacatagtgcatgcttatagtagtaaccactgttttcattttggtatatttcttccattcttctgcatagaaatgaagcaaaataatttaccaagatctaaagtggctatataaatttagccatgtaccaacagtataagaactcctttaacagcattaagtagtttctttcttgtttagttcttactaatttaataggaaaaacatggtcttttatactttgagattttttaagaataaatatcctatttattaagatttgtgctatattcaggctaagaatattttcatgata

SEQ ID NO: 885912 - DNA, 625 bp, Homo sapiens
tgacctcatgccaaatttagtctcatttaatctgaaaattttactagaggcatggataagaacaacatacttacattagacttgttggtcctgttacttcccagctgaaaatatagatttttcaatggaacttggctgctgttttgaattgaatatgacccttgctgccaataaatccttatggtatgttataatgtttctgttgcattccatttctaattttctcctttcttcttcaaacattgatcccattgaaagtaggtcctaatatctcttttagctgttgtttctattttaaaaatattcctcattttgaggggattattgggaccarttaaaatttaaaaaattaagaataatgattaaaagcaatactgtgcttactattttattgctatggaaatagtaaaataatcactcagagagaaacataatagcatttctcatcatcagaagaagaaccagacaagttcccagggtccaagcaatgttggtttggagaagagagcagagagaccagggctgagtccttactccactgctcacagtgccacttacctctatgtacctcgatgaactttataatattattgtctgtaaaacaaagtccacaatatctgacttg

SEQ ID NO: 885913 - DNA, 580 bp, Homo sapiens
aaagtgagctccaggagaaaaaggaacttgtccttcttgttcacctctatttacagcatgccaagaatattgactcagagagagtaaggtaaagactcaatacatatgttttgaatatataaataaagggaaattgctttccaatccatcctccacccacaacatccagattataaagaacttgaataaaaagttgctatgtttagatgcaggtgaaatacaaataatttatgaaatttatcttaartatttttagtttcaaaagaagacagtgtggattaaagttcctgtaagataaatacaggagacattaaatctaaccattacaacgtatttccaaatacttttattgggaaggaagtcacaggactcaataggactcctaatatttattctgaaacttttttgcaattaattctatatgtttttattctacagtcacatgtacatagtatagcaaaatctttttctttatatacggcaaacatattcgtgtttagaaatacttctgtgtccccaccccatgagtttatttgtcttacagtatctacctgggcatgatatacacctatactgatca

SEQ ID NO: 885914 - DNA, 593 bp, Homo sapiens
gttgactggctttgacaaaaatgctgatagtgatatggacaatgaagtccaggctgaggtggtctcagatggagatgcaaaacttgctgggaactggaataaaggtgactcttgctatgccttagcaaagagactggcagcatttttgcccctgccctagagatctgtggaactttgaatttaagagagatgatttagggcatctggaggaagaaatttctaaacagcaaagcattcaagaagtgacttgggtgctcttaaaagcattcagttttatgcatccacagagawagtttgaaattggaacttatgtttaaaagggaagcagaaaataaaatttggaaaatttggaaatttgtagcctgacaatgcagtagaaaggaaaaacccattttctggggagaaattaaagccagctgcagaaatttgcataactaatgaggagccaaatattaattgccaacacaagagggaaaatgtctccaggacatgtcagaggtcttctaaacagcccttcccattacaggcccagagacctaggaaaaatatggtttcatgggccaggcccagggccttgctgctttgtgcagtct

SEQ ID NO: 885915 - DNA, 593 bp, Homo sapiens
gttgactggctttgacaaaaatgctgatagtgatatggacaatgaagtccaggctgaggtggtctcagatggagatgcaaaacttgctgggaactggaataaaggtgactcttgctatgccttagcaaagagactggcagcatttttgcccctgccctagagatctgtggaactttgaatttaagagagatgatttagggcatctggaggaagaaatttctaaacagcaaagcattcaagaagtgacttgggtgctcttaaaagcattcagttttatgcatccacagagaawgtttgaaattggaacttatgtttaaaagggaagcagaaaataaaatttggaaaatttggaaatttgtagcctgacaatgcagtagaaaggaaaaacccattttctggggagaaattaaagccagctgcagaaatttgcataactaatgaggagccaaatattaattgccaacacaagagggaaaatgtctccaggacatgtcagaggtcttctaaacagcccttcccattacaggcccagagacctaggaaaaatatggtttcatgggccaggcccagggccttgctgctttgtgcagtct

SEQ ID NO: 885916 - DNA, 577 bp, Homo sapiens
tttattctttattagtctagctagcagtctatctatttattaatattttcaaaaaaccagctcctggatttgttgatttcttgaagggtttttcatgtctctatctccttcacttcagctctgatcttggttatttcttgtcttctgctagatttggggcttgtttgttcttggtactgcaattcttttagttgtgattttaggttgttaacttgagatctttctagattttttgatatgggcatttagtgctataaatttccctcttaacactgctttagttatgttccagagattctagtacatggcctctttrttctcattagtttccaagaacttcttgatttctgccttaattttgttatttacccaagagtcattcaggagcaggttgttcgtttccatgtagttgtatggttctgagtgaatcccttaatcttgagttctcatttgattgcactgtggtctaacagacttttcgttctgatttcagctcctttgcatttgctgaggagggttttacttccgattatgtgatccattttagagtaagtgccgtgtggttatgagaagaatg

SEQ ID NO: 885917 - DNA, 621 bp, Homo sapiens
ttatccttggtagaggctgacatcctggcctggagaatgcgtcctttcctgggctgcaagaagcggcttaggtttctttgtgttaaggatgtgtctaagcatgtgggttttgtcctcctgacgccacagaagggccatgaagatgagggagctgcagataccccaccccccatccctgctccccactaacccttcagccccaaggctgcatcagcctcttggccatcttgggctcatggggttggggccaggggtgacagaggcaggtgcttttagaatggctggggaactgaagagagcagcccacagatggaagggtggcactctttactcacaggattgaggatctgccaaatgtcaggcattagccactcagctctgcaaaagctcctaagagccatttgagacrttgcctccatttttcagataaggaaactgaggctcggaggcatcaaagcatttttctgagttcacagtttgtagaatagcatgtaagtaacttgcagaagtcccacaactggttagtgtgggaaccaggattcaaactctctcctccctttctgccctagcccaggccctggcttgggcccacctgccctgggtccacacctcggctgtgtt

SEQ ID NO: 885918 - DNA, 651 bp, Homo sapiens
tctctgtacctcaattttccgaagtataatgtgggaataacaagagctctacctcatagggttcatgtgaggacttaatgagctagtccatgtaaggtgcctagacctcttaagcactcaaactttagctacaattattatttatctcaagtttgccttggagatggtgtaacacgaaccaaacagtccaggacacactttacagcagtgaaggggcagaggaagcaagatggagggtgtcctgttccctctctccatctccccagagagatcgcagaggtccgacagctggggagtacaaggcaggcagcagcaccagcaccagcacccaactaagccttttgtaagaggacctacctcccagccgcacakgtgaggctggctggggctttcatgctctttcctgcccatcaggcttcttgtgaccccgagctgaccttccccagccctgtgatttcatcacaccttgcacatcctggaccagggcctttcttgatggtgaggtggaacttctggtggtcagggaggactcttggcaggatactgagagtgccaaggtggggagaacttgtatggggcagggggcattgtgacacctctttacaacacaattccttctgtcttcccaaggagacatgaggccagggctgg

SEQ ID NO: 885919 - DNA, 655 bp, Homo sapiens
ctgtgaccatgccatgtctctggttctgactcttctgcctccctctcccccatctaaggacctctgtgattacaccgggcccacctacataatctccttatttttcacaagtgtctgttgattagcaatttcaactcctccttgctatgcagcccaacacattcacaggctccggggactaggatatggacatccttgcagggtgggggcattattctgcctacacgggggatattctcaaatggaygggcatttttacctttgaccctcagggattccaaaacttgagtgtacttcagaatcatgggagacagtgtttgaaaaggcagaattttaggccctgtcagattcagactcagtacttctaggatgggcccaaggaatctgaatttttaacaagctccctcaggctttcctgatacacatgatctaaagaccacattttgaaaaatctgctttcctttggctttggatagggcatagtggctacattttagaaacctaattacaaaatctatggtctataatttattgagcaattccaatgtcctaataaatatagctaagcttatcaagcacttgctatgtgccagattctgcctcaagggctgtccatgcatcatctcacttaatcctctcaataacacaacaaggt

SEQ ID NO: 885920 - DNA, 616 bp, Homo sapiens
aatacattatctaagtcagtagtttttacactgtattcagtggagccctggagttttgccaaggcatgtcaagggcagctctgaagttctgaagttagtaattatccctctggctgaatgttaacttgaacagagtggaggaactcaggctgtaaggcctgaggacgactgtgaaacagctgtgccagaaccttcacgctgcctaagagcacattcagttctggagatgtgtgaccttggtcaagtcacttcccacctctggcatctgtcgtcttctctgtccaatgaggagaatcaatggcgtgacaatttaaaaaatcttttggctctaaaattctgagaccctcacatgaattgcggtctcttcaatgtttacttccaataaaaaaagatttttagggctaccttcatacaactgtcttcmaaattggcacatcgtttctttgacatttctcagtgattgcaaatcctagccctttcaggataaatgtgatttggggaagtgacagaaaacatccactcattccaaaccaggtgtttcattcaactcaccccacaagagcttagtgagtgcctttcaagagctagacactggcagaggtgagacaatagtgat

SEQ ID NO: 885921 - DNA, 672 bp, Homo sapiens
aaaaacttttatgggagctaaataaaaatttcatttgtgatagatgtattaattgaaacctcagtttattctgtatggatatgaattttctacaatgcacagtcctactcacccgaaggctaataaaactatactttccaaaacaaacactttaggaacccttctaagttggtagaatgcttagatatctcacagagggtagtcaataagcggggatagaacaaggccatacacacatttggaaatttttaayggtacatttctgggaagccaaaaagtatgctattaaaatcttgtcatattaagctagcaagaatatttattactaatatgatgtataaaaatcaggaagaataattctcaatcagcatgaggaagagatggcattctatacatttccagagggcatgtgtgaacaacaaaagtatatctaatatatactgttttcataagacaagctttagaaaataaaaagtgacaaaatctccctagctggtaggtacatacaagagttagaatgagagaatattacaatggcataagttaggaagagttgagaagaactaagctgggaatttttttacataaaattttaaaaatgtcagcattaccctaaatcagacttctcttaacacacaaagaaaagcaaaaacatatataatactgtacaaa

SEQ ID NO: 885922 - DNA, 653 bp, Homo sapiens
tgggcaagtttttgtaggtgtcccatgcctcagggcatcagaaaagccccaggcaaggtagaaagtgagaggcacatagggagagactgtcagtttgctcctggatgaaactgaccaaagcaggtattagttaggtagccgcagcagtggctggaataagaagtgaggctgaaaggattttaagtagtgtgcaagagatatccaataagcattctataataaaagtatgtatagggtactagggaaatgcctaattcaattaaggtagggatttcacagaaaarattcacagttctgtgacccagcagaatagtgtcctcaaataaatgtcatcacacttgttaatgtaattgtaaacttctctttatattactaaaggtcatcaccttcattttttaattatttcagatttcaattgaatatccatatttggtaaggaggctgatgcttttgttgctgtaaaatcatgcagtgtattgacatgaagttggaatttcaatgtacctattttggtagtgtgaaacaccaagttcataaaattatagtcttctactcccccaaagggttaatcttgcctgcttcctagaaaaaccagtgcactgagaacagcaggtttttgcaatagagaaaaaatttaataatcgcagtctcag

SEQ ID NO: 885923 - DNA, 575 bp, Homo sapiens
tcgtaagaatgctaacatttgtatgttgtttccatttctactccaggtgttgccacatctgcaaacttcctgggagagtaatggggattcgagtgcttcgattatctttggtggtcatcctcgtattattactggtagctggtgctttgactgccttacttcccagtgttaaagaagacaagatgctcatgttgcgtagggaaataaaatcccagggcaagtccaccatggactcctttacwctcataatgcagacgtacaacagaacagatctcttattgaaacttttaaatcattatcaggctgtaccaaatctgcacaaagtgattgtggtatggaacaatattggagagaaggcaccagatgaattatggaattctctagggccccaccctatccctgtgatcttcaaacaacagacagcaaacaggatgagaaatcgactccaggtctttcctgaactggaaaccaatggtgagttgcagtgtagttctcagcctggaaaggctgccgctgtccagagctgggacagacatgtgaatttctggccttctgcttaaccgtctggagaaaaa

SEQ ID NO: 885924 - DNA, 631 bp, Homo sapiens
taagagagctcaggcaagaagagacctccttgtcataaaagtgcaccacagtgggacacagagaaggtccatgtccttgatgaggaaaaaaagacttggtagtatttttatagatcatatgacagcagccagtactgcaaactatacacagttctcacgtcagcccctagtacagtgcctggcatggagttgatattcaatgatgtatttattgaataaataattccaatggtaggtttaattgttatttaatatttaaataatattattaattaaataggcacacatatgaatcctaggtctaccacttgctagtggggtgaccctaggcaacttgcttaccatttmtgagcttcagaatcatgtgggtgataatactttccatgtagggatgttgtgaggatgaacttgagtttgaaatagttagctcagcacttgacattgataggtgctcagtaataatggctagtgctcatttcagcggaaaactacatatagttaggggtaggtatcaaggcccagtagagactgcctgattctgattcctggagacagaaaaatcaggacagtattccaacatagagaattgttataatagatctttttctctcattttcatctaaatacgctt

SEQ ID NO: 885925 - DNA, 653 bp, Homo sapiens
tgttagagggagggtggagaactccaatatgaaggagaaaaagtgaacagctaatccttaaaagtgtttaagatcagtcatatttggagaggtctgtcggcagccttcagggccggactccaggccaagggtagtcagggatagaatgccaaaccagggtgagagagggcaggagagacatcttgagcatctgctggtttgcccacacaaactctatctcccctttttctgataacgagcatccatgacttctcttaggaaaatttactcttcctctctcagtccatatggttcaggtgaggttgacttaccccattcccacatacctggggatgagtgtgactctcactcgggtccaatggagaaagcactggaatttggaggggggaaggaagctttctttctgatgatattgctgagttwgttccagcaactagatgaaactaggggttggcttagggggcaccagaaggagagagagtccctaaatagaaagccaacgtggaggagagatagaaagaaaccaagcctgaataatgctacgcagctccctggaagcaccgttggactttacagctctggactgctgcaagtctccttgtatctagtttaagcccatctccattgagtttaattcactgccaaaggaatag

SEQ ID NO: 885926 - DNA, 653 bp, Homo sapiens
tgttagagggagggtggagaactccaatatgaaggagaaaaagtgaacagctaatccttaaaagtgtttaagatcagtcatatttggagaggtctgtcggcagccttcagggccggactccaggccaagggtagtcagggatagaatgccaaaccagggtgagagagggcaggagagacatcttgagcatctgctggtttgcccacacaaactctatctcccctttttctgataacgagcatccatgacttctcttaggaaaatttactcttcctctctcagtccatatggttcaggtgaggttgacttaccccattcccacatacctggggatgagtgtgactctcactcgggtccaatggagaaagcactggaatttggaggggggaaggaagctttctttctgatgatattgctgagttagttccagcaactagatgaaactaggggktggcttagggggcaccagaaggagagagagtccctaaatagaaagccaacgtggaggagagatagaaagaaaccaagcctgaataatgctacgcagctccctggaagcaccgttggactttacagctctggactgctgcaagtctccttgtatctagtttaagcccatctccattgagtttaattcactgccaaaggaatag

SEQ ID NO: 885927 - DNA, 609 bp, Homo sapiens
tgcaaaggacattatttcattagtttttatggctgtgttgtattccatggtatatatgtaccacattttctttagcaaatatcagtgatagacacctaagttgactccatgtcattgctcttgttaataaggctgcaaacaactatgagtgtatgtgtctttttggttgaatgatttcttttcttctggatatatgcccgataatgtgattactgaattgaatggtagttgtgttttatgttctttgagaaatctccaaactgctttctatagtggttgaactatatatagtgtttattattactaatttacattcccaccaacagtgtataagcatacgartttcatttggtcaaccctttgacaggtttgcaagggcatggggttaatcaaagtctgagatcttccagaggctggtgggaggtcacaacctagaaaatgagaggacaagctaactggagagagggaggggaatcaaagagatggcttatacatgtagcgatgtctctcagcagcaagacagggagttgctgggtcagagatctctgaagggcagcagtaggttagggtttttatctcctggagtttatcctatctatagctaacaga

SEQ ID NO: 885928 - DNA, 680 bp, Homo sapiens
aagtgactaatccactccagcatccaatctccctatgcttttggatcccttcctctacattaaaataaaggagatcaggcatttccagattgctcacagtgggccatattttaatccatatttctgctaaccaagcatataaactattagaatcttttgtaactccctgagctgcaagattaaatgcagaatccttgcttagtaggctcaaatcagtaaattcagactgatccaactctgtgttccttccaccattatcccatacccttaacatccatttccatgcctgttatccagatttttgcttatataaattagaaaactcaagcagttctcctggagtatggcacacctcctcatgggtcacactctgaacctcccctctaggkgcctgcagggacttgagtctagtaataggtctaggagcaaacaggagggttgggagtggctcctgagaagaatcaacattgtcttgcctggcaacggacttaggggaggccatcactcttgcctcaaacagcacagaatttatctcttcagacaaaggaataaaggctgatggcaacgtgtcttggggagaggatgtttccactacagagtatggaaaagctgtttcttctggcaaaaaaggctcatcaaagttcacaagctcagtgtccccagctttattaaggtcctcc

SEQ ID NO: 885929 - DNA, 616 bp, Homo sapiens
aacaccccactgactgtatgagacttatcaccaaggcagaaaattgacaaagacattcagaatctgaacttaacactggaccgaatggatctgatagacatctacaggactctcttccccagaacaatagaacatacattttcctcatctgcacatggcacatactctaaaatcaactacatgaatgggcctaaaacaattctcagcaaatgcaaaaaaaaaaaaaaaaaattataccacccactctattggaccacagcacaataataatagaattgaagactaagaaaattgctaaaaaccatacaattacatgaaaattaaaccactggcttctgaacaaattttgggtaagtaatagaattaaggcagaactcaagaagttctttgaaactaatgaaaacaaagatacaatctawctatttttctccatgcaaggacaccaatttagcaactatctacagacaaaaaaagacctttgtaaaaaccacaaatcaagtaattatgctcagtacttgatttttactttatatcattgaaagaggtactaaaatggtagaaaaatagttttgaatcgcggacaccgcctctttttatttccttgaagaggcagaat

SEQ ID NO: 885930 - DNA, 716 bp, Homo sapiens
agtcttaaaacattcaaattaaaataatatgaagaatctcctctgaccacaataatataatgctagaaattaaggataattttggaaactatgcaaatacgtagaaattaaataatatactccagaatgaccagtggaatgataaataatttttaaaaaattgagaaattttatgaaacacttgatagtgaaaacacaacaacggaatayagcaaaagcagtactaagaggaaaatgtatatttacatcaaataaaaacttcaaataaaccacctatttatgcatctaaagaacaagaagagtaacagcaaaccaaatccataattagtagaagagaaaatatagtgaagatcagagcataaaaaatgaaatggaagcaaacaaaacaatacacaacatcaatgaaacaaaaagtttgttgttttaaaagctaaacaaaatagactaaacattagccagactaactacaaagaagatccaaataaataaaatcagagttgacaaaagatacattagaattgatactgcagaaattcaaagagttatcactggctactacaagcaactatatactaataaattagaaactctgggggtaatggataaattcttagacagatgcaacttatcaagattaaaccatgaaaaaaaaaatctaaaatctaaacagagcaataagaggtaatgagattgaagacataataaaaactttccaa

SEQ ID NO: 885931 - DNA, 716 bp, Homo sapiens
agtcttaaaacattcaaattaaaataatatgaagaatctcctctgaccacaataatataatgctagaaattaaggataattttggaaactatgcaaatacgtagaaattaaataatatactccagaatgaccagtggaatgataaataatttttaaaaaattgagaaattttatgaaacacttgatagtgaaaacacaacaacggaatacagcaaaagcagtactaagaggaaaatgtatatttacatcaaataaaaacttcaaataaaccacctatttatgcatctaaagaacaagaagagtaacagcaaaccaaatccataattagtagaagagaaaatatagtgaagatcagagcataaaaaatgaaatggaarcaaacaaaacaatacacaacatcaatgaaacaaaaagtttgttgttttaaaagctaaacaaaatagactaaacattagccagactaactacaaagaagatccaaataaataaaatcagagttgacaaaagatacattagaattgatactgcagaaattcaaagagttatcactggctactacaagcaactatatactaataaattagaaactctgggggtaatggataaattcttagacagatgcaacttatcaagattaaaccatgaaaaaaaaaatctaaaatctaaacagagcaataagaggtaatgagattgaagacataataaaaactttccaa

SEQ ID NO: 885932 - DNA, 611 bp, Homo sapiens
tcaattggtgctaaaaagaatttgataaatttcaatatcccttcataataaaatcctcaaaaaactcggtatagaagaaacacctcaacataaaaaatgccatatatgacaggcccactgttaatatactgaattggasaaaaacttaaaaactctcctcctagatttgtaacatgacaaggatgcccacttttgaccactgttattaaacatagtactggaagtcctagctagagcaatcagacaagtgaaaggaatagaatgcatccaaattggaaagaaataagtcaatattttttgtttacagatgatataatcttatatttagaatactccaaagactctaccaaaaaaattagaacttataaacaaattcagtaaagtcggaggatacaaaattaacatacaaaaatcagtagcatttctatatgccaaaagtaaaaaatctaaaaaaagaaattaaaaagtaatcccatttacaatagccacaaataaaataaaatgcctaggaattaagcaaataattcaaaaattgctataatgaaaactataaaacattgatgaaagaagtcaaagaagacaccaaaaatagatgaatattccatgttcat

SEQ ID NO: 885933 - DNA, 611 bp, Homo sapiens
tcaattggtgctaaaaagaatttgataaatttcaatatcccttcataataaaatcctcaaaaaactcggtatagaagaaacacctcaacataaaaaatgccatatatgacaggcccactgttaatatactgaattggagaaaaacttaaaaactctcctcctagatttgtaacatgacaaggatgcccacttttgaccactgttattaaacatagtactggaagtcctagctagagcaatcagacaagtgaaaggaatagaatgcatccaaattggaaagaaataagtcaatattttttgtttacagatgatataatcttatatttagaatactccaaagactctaccaaaaaaattagaacttataaacaaattcagyaaagtcggaggatacaaaattaacatacaaaaatcagtagcatttctatatgccaaaagtaaaaaatctaaaaaaagaaattaaaaagtaatcccatttacaatagccacaaataaaataaaatgcctaggaattaagcaaataattcaaaaattgctataatgaaaactataaaacattgatgaaagaagtcaaagaagacaccaaaaatagatgaatattccatgttcat

SEQ ID NO: 885934 - DNA, 611 bp, Homo sapiens
tcaattggtgctaaaaagaatttgataaatttcaatatcccttcataataaaatcctcaaaaaactcggtatagaagaaacacctcaacataaaaaatgccatatatgacaggcccactgttaatatactgaattggagaaaaacttaaaaactctcctcctagatttgtaacatgacaaggatgcccacttttgaccactgttattaaacatagtactggaagtcctagctagagcaatcagacaagtgaaaggaatagaatgcatccaaattggaaagaaataagtcaatattttttgtttacagatgatataatcttatatttagaatactccaaagactctaccaaaaaaattagaacttataaacaaattcagtaaagtcggaggatacaaaattaacatacaaaaatcagtagcatttytatatgccaaaagtaaaaaatctaaaaaaagaaattaaaaagtaatcccatttacaatagccacaaataaaataaaatgcctaggaattaagcaaataattcaaaaattgctataatgaaaactataaaacattgatgaaagaagtcaaagaagacaccaaaaatagatgaatattccatgttcat

SEQ ID NO: 885935 - DNA, 641 bp, Homo sapiens
tggtccctgagcacagccgtggtttctgcaccatggtggcccttgtccctcagcctgcagtggacacagtggatgttgtccccaagctcctgttgtctggagcctttctagacacccgtgacccatggaccagcccagagacctcaagggtcacggcaacaagcgtattgtgggaagggagggccgagatgacrccggctgcagagactggccagagccagagccagatgctggagagtctcatgggtcccaaggtgcccacagggcagaaaagcccacacgtggtgatgggagggcgacctggaccacacacgtgaactgacgctcagccgcagagtcctggggccatcacggcagccccgcaagggctctcaaggtcctggtttcccaatggtcacaccgaggcagagaaaactgaagcgtggaccactgtggcccgaggccagaccccaacctcgccgggcttggaattaaccccgggtagatggcggcacgggcttagctgaccttttccaacgtctcatcagccccagggctccttgctgttagggtctccaggtttagcaaatgaaaaaacaggtgcccagttaaatttgaattccagaaaaacaagaaattcttttttttgtatgtgtgtgttt

SEQ ID NO: 885936 - DNA, 641 bp, Homo sapiens
tggtccctgagcacagccgtggtttctgcaccatggtggcccttgtccctcagcctgcagtggacacagtggatgttgtccccaagctcctgttgtctggagcctttctagacacccgtgacccatggaccagcccagagacctcaagggtcacggcaacaagcgtattgtgggaagggagggccgagatgacgccggctgcagagactggccagagccagagccagatgctggagagtctcatgggtcccaaggtgcccacagggcagaaaagcccacacgtggtgatgggagggcgacctggaccacacacgtgaactgacgctcagccgcagagtcctggggccatcacggcagccccgcaagggctctcaaggtcctggtttcccartggtcacaccgaggcagagaaaactgaagcgtggaccactgtggcccgaggccagaccccaacctcgccgggcttggaattaaccccgggtagatggcggcacgggcttagctgaccttttccaacgtctcatcagccccagggctccttgctgttagggtctccaggtttagcaaatgaaaaaacaggtgcccagttaaatttgaattccagaaaaacaagaaattcttttttttgtatgtgtgtgttt

SEQ ID NO: 885937 - DNA, 586 bp, Homo sapiens
agactagagaggagtgaatcactgcagctggcagaactagtttagaaccttgacctttgaaagttcaacatgaatggtctggttcctctctttagaatgggaaacatattgttttgttgttaacttttccaacagtgcatcttgttgtctaccatatcctttcttgtattattactgctagggtatctgtgacttccytaagacagagacaatatcactcctttttttggagacagggtctcactctgtcacttagactggagtgcagcagcctaatctcatctcactgcaacctccacctcctgggctcaagccatcctctcacttctgtctcccaagtagctgggactataggcatgcacaaccacacctggctaatttttttttttttttttttttttttgagacagagttttgctctgtcacccaggctggagtgcaatgtcgcaatctcagctcactgtaaactctgcctcccgattctcctgcctcagcctcccgagtagctgggattacaggcacactccactgcgcccagctaatttttgtatttttagtagagacggcgtttcaccatgttggccag

SEQ ID NO: 885938 - DNA, 586 bp, Homo sapiens
agactagagaggagtgaatcactgcagctggcagaactagtttagaaccttgacctttgaaagttcaacatgaatggtctggttcctctctttagaatgggaaacatattgttttgttgttaacttttccaacagtgcatcttgttgtctaccatatcctttcttgtattattactgctagggtatctgtgacttccctaagacagagacaatatcactcctttttttggagacrgggtctcactctgtcacttagactggagtgcagcagcctaatctcatctcactgcaacctccacctcctgggctcaagccatcctctcacttctgtctcccaagtagctgggactataggcatgcacaaccacacctggctaatttttttttttttttttttttttttgagacagagttttgctctgtcacccaggctggagtgcaatgtcgcaatctcagctcactgtaaactctgcctcccgattctcctgcctcagcctcccgagtagctgggattacaggcacactccactgcgcccagctaatttttgtatttttagtagagacggcgtttcaccatgttggccag

SEQ ID NO: 885939 - DNA, 586 bp, Homo sapiens
agactagagaggagtgaatcactgcagctggcagaactagtttagaaccttgacctttgaaagttcaacatgaatggtctggttcctctctttagaatgggaaacatattgttttgttgttaacttttccaacagtgcatcttgttgtctaccatatcctttcttgtattattactgctagggtatctgtgacttccctaagacagagacaatatcactcctttttttggagacagggtctcactctgtcacttagactggagtgcagcagcctaatctcatctcactgcaacctccacctcctgggctcaagccatcctctcacttctgtctcccaagtagctgggactataggcatgcacaaccacacctggctaatttttttttttttttttttttttttgagacagagttttgctctgtcacccaggctggagtgcaatgkcgcaatctcagctcactgtaaactctgcctcccgattctcctgcctcagcctcccgagtagctgggattacaggcacactccactgcgcccagctaatttttgtatttttagtagagacggcgtttcaccatgttggccag

SEQ ID NO: 885940 - DNA, 719 bp, Homo sapiens
ccttatcacagcaacatgaattctgctaaaattgaagcaagaacaaacattaaatttatggtaaagtttggatgaaagaataatgaaatcattcatgttttatgaaaagtttataggaatggcccaaagaaatcagcagtttacaaatggataactcattttaagagttaactcattttaaaaagggataagaccayactgaagatgaaacctgtgcaggagaccatccacatcaatttccaaggaaaaaaattcaactttattatgtcctaattgaagaaaaccaaggattaacagcacaaacaatagccaacaccatagccatctgcattggttcagcttacacaattctgtctgaaaaattatagatgagcaaactttccactcaatgggtgccaaaactattgcacccagatcagccacagaaaagagcagaactctcaatggaaattttaaataagtggaactgagatcctgaagcatttcttcaaagaattgtaacaggagatgaaacttagctgtgattctaaagacaaagcacaattacagtaatggctaccaagaggtgtaagtggtccagtcaaagcaaaagtgtcctggtcaagagagaacatcatggcaacagtttttggggatgctcaagacattttgctttttgagtctttgttggaccaaagaacaataacatctacttatcatgagaatgtttttgagaaagc

SEQ ID NO: 885941 - DNA, 609 bp, Homo sapiens
tgacagacgtgagtattcaagcacagttcactgctttttgtcatctacatgcatagcaagtacacaccgttgatttgccattccactcagagaagaggaaaaactccacactaccttaatatggctgtaggttggttagctgctttttaagaagaaaaagtttgaagatcatattcaagaaaatccccaaacttttatacagaactacaggawatgaacgatgcatcattttctttatcaacaacaactttgcgatattttgatgtaggccctgagacttcaatattgagtcattattataaaaacaacactttccgacctgagaaaaacatatttatgtagaattaaactcattcaaagagaaggaaagtgcagagtgatcttggtcacacattcttttcctcagaatcaaaacaggtaaaataacttattataattattaaataaaagtcataagcttactgatgagactcaaacaagattccaaaaggtctcagacagtagccaacactaaatgcttcttgaccatctgccacatttcaggcactgtggtagaagtgcagctattgacttgctcacaagaagcctgttatctactaagaaaagtct

SEQ ID NO: 885942 - DNA, 627 bp, Homo sapiens
cttgcttgggctatttcaacagcatcctacttgacctcctcttctaactcttgcccccacagtctattctcaacatagtagttagaggaatcctgttaaaatgtcttttctcaaaccattcattaactttgcatatttctcagaataaaagcccaagtctacaaaatcaggccctttattaactttctgacctcatctctggttgctctcctcctggccatgagcatctctgcttctgaaacaaacatgcgaagcatgctcccgcctcagagccttcgcacttattccctctttctgggcctttcttcttccagacatccagatgtctttaccagcgatttcagatctttgctcaaatgtcacagtctcrgtgagcccttccctaaataccttcttaaaatgaaagaccaccacattcatacatcatactccccttcttccgtttatgcctttatttcccctcataaaactcaccaccatataacacactatatgttttatttattaattttaattattttgtgtcttctccccctaaaatataaattctctgagagcagagctacttctctgtttgattcctcattgtatatccccatatcctattgtgtacctattctgggacat

SEQ ID NO: 885943 - DNA, 558 bp, Homo sapiens
agggatcaaaaaaggagctaatttataactctcatttgactatcagatgccctctgtcatagcagccttccaaatattggatctcattaagtacatttgcagattcttgggagactctcaacaagttcctatgccctacatgtttcctacaatagacaatgagctctttatctgaccgctcagaatcacctgcayccctcagctttgccccagtagacagccctcttagggtcctcttgactcacaggaagtacaatgaacgtgcagcttgacaaactgctgactccttccttgttgccccacagtcaagggcagctctactttgttttctatcctttgtcttttccagaaaagaagcagagacctattattatcacactttgcttcaaattatggagagtcacatgtcagtttctctcaagaaaaaactcactttctgctcagctagatgcaaagggaaaccccactaatttttgcaatttggcaaacatccagccagggacagagatgacactctaccattttgtagatgaccataacctctatatgcagtactct

SEQ ID NO: 885944 - DNA, 558 bp, Homo sapiens
agggatcaaaaaaggagctaatttataactctcatttgactatcagatgccctctgtcatagcagccttccaaatattggatctcattaagtacatttgcagattcttgggagactctcaacaagttcctatgccctacatgtttcctacaatagacaatgagctctttatctgaccgctcagaatcacctgcatccctcagctttgccccagtagacagccctcttagggtcctcttgactcacaggaagtacaatgaacgtgcagcttgacaaactgctgactccttccttgttgccccrcagtcaagggcagctctactttgttttctatcctttgtcttttccagaaaagaagcagagacctattattatcacactttgcttcaaattatggagagtcacatgtcagtttctctcaagaaaaaactcactttctgctcagctagatgcaaagggaaaccccactaatttttgcaatttggcaaacatccagccagggacagagatgacactctaccattttgtagatgaccataacctctatatgcagtactct

SEQ ID NO: 885945 - DNA, 645 bp, Homo sapiens
aaactctccaatcaaaaaacatagagtggttaaacccacttgatcacggtggagtatctttttgatatgctgttggatttgattacctagtattttgttaataatttttgcatctatgttcatcagggatattgttctgtagttttcttttttgttatgtctttttttggttttggtattatggtgataacaaagaaaagtcaaaaatagaaaactacaggccaatatctctggtgaatattgatgcaaaatactcagcaaaatactagcaaaccaaactcaacaatacactagaaagatcgtttataatgaccaagtgggatttacccctrggatgcaagaatggttcaacatatgcaaatcaagcaacatgatacatcatatcaacagaatgaaggataaaaatcatatgataatttcaattgatgctgaaaaagcattttataacagtcaacatcctttcatgataaaaaaaaaacctccaaaaactggtgatagaaggaacacaactcaacagaataaaagccacatatgacagatccacagctagtgtctactgaatagggaaaaaccaaaagcctttcctctaagatatgggacatgacaaggatgcccactgtcaacactgttattcaacatagtact

SEQ ID NO: 885946 - DNA, 629 bp, Homo sapiens
agtgtatattttgcccctgatttcagtaaaacatataaggctgaaaacaaattataaattcattttaaaacccttaaaattatatttggtattacaactctgaagtttttagtgtgaccattttcaataaattactttttgttaaccaagactaacccaaaataagaaaataattatatcaaaagaagaaagaaagggaggtagggaggtagaaagggaagaaaatatacctcttctagtgcttcagaaataattctagagtaacaagttttaaagattccaaatgtggaaaagtcacctattaagtattaactaaagactaactccaggttgacagtgatgtattctctggaaaagactttgcctaagggcagcttttcacactttattcacacacacawcccattccattgtctatatttttaaatcagaaattttcctgcccaaagcataccagatttcaatatttcaaaaacatctcaaaggccctgacccataaattatttattccctgtggatcatggaaccaactttttcactacaattaaaaaaaaacttttgatgagttagatagttccctatttgaaacctgaaagaaatgaaaaccataatagttaattgattatcca

SEQ ID NO: 885947 - DNA, 608 bp, Homo sapiens
acttatatgagatggtatctcgtgatttttgatttgcctttctctggtaattagtgatgtggagcattttttcatgtttttttttttttttttgctgcttgtatgtcttcttttttttaattgtatgtcttcttttgagaactgtccattcatgtctttcttttgcctatttttaatggggttattggtgttttacttgttcaattgtttaagttccttatagattctagatattagacctctgtcagatgcacagtttgtgaatattttctcccactctgtaggttgtctgtttactctgttgatagtttcttttgttgtgcmaaagctactcagtttaattaggtctcacttgcaatttttgcttttgttgtcattgcttttgaggacttagtcataaatttttcccaaagtcaatgtccagaatggtgtttcctatgttttcttctaagattcttatagtttgaagtcttacatttaattctctgatccatcttgagttaatttttccatatcaaacaaggtaggggtccagtttcattcttctgcatatggatagccagttatcccagcaccatttattgagtagagagtcctttccccattgc

SEQ ID NO: 885948 - DNA, 628 bp, Homo sapiens
cccaggctagagtgcaatggtgcgatcttggctcactgcaacctccgcctcccaagttcaagcagttctctgcctctgcaacctccgcctcccgggttcaagcagttctctgcctcagcctcctcccgagtacctggaattacaagtgcctgccaccatgcccggctaatttttgtatttttagtagagacgtggtttcaccatcttggccaggctagtcttgaactcctgacctggtgatctacccgcctcggcctcccaaagtgctgcgaatacaggcgtgagccactgtgcctggcctggactgttgtttttcaaagcgaagttgaggatcacctggcacattttgtaacaaagtggatctctgggccacacccaggaatcarcaatgtctctggatgtgggatcctgagcgtggtggcggagctctatcctgatgacagaggctcttaggaggcctgacctggtcagaggagaatgggcaaaggatggccagggaagggtgttcctggcacagggctggcatgggcaaaggtctggagacaggaaagcagatggccggggtgccagagatgaaggggcacagcctggcagtgacaggaggtgctacagtccctgggtggaagct

SEQ ID NO: 885949 - DNA, 616 bp, Homo sapiens
gcccggcaggagtgggttctgtctcatccctgggaccattagcctgtgagggtgtctcagcagccctgagccctgaacccgagtctgctacccagtcctggctctttggtggagcaggctcattgcacagggcacagctttgtcatcggcagctggcctgtccagggttcaccctgagcattggcacacacggctttgtcgkcggcggctggcctgtccggggttcaccctgagcattggcacacaacagctttgtcgtcggcggctggcctgtccagggttcaccctgagcatgggcacacaacggctttgtcgtcggcggctggcctgcccggggttcaccctgagcatgggcacacacggctttgtcgtcggcggctggcctgcccggggttcaccctgagcatgggcacacacggctttgtcgttggcggctggcctgtccggggttcaccctgagcatgggcacacacggctttgtcgtcggcagctggcctgtccggggttcaccctgagcacacacatgacatagtgttcaatggctcagccctgtattttggcgttacaggagttacctgaggtcctagaattcactccgtcttcagtctcagctgat

SEQ ID NO: 885950 - DNA, 626 bp, Homo sapiens
atgtaatatttatatcttttactatcgaaaattggatcttacatatagtagttttctccataaatatatactacataaaatcatgcattaatgaggttttcaattatattttacaatcattataaaattataattaaaatattkaaataagaaaaagctttaataacattgcacattaaagaataatatattttagtccagacttagtggcttacacctgtaatcccaacactttgggaggccgaggtgggcagatcacctgcggtcaggcgttcaagaccagcctggtcaacatggcgaaacccagtctctactaaaaaatacaaaaattagctgggagtggtggcaggtgcctgtaatcccagctactcgggtggctgaggcagggagaattacttggactgggaggcggaggttgcagtgagctgagatcgtgccactgcactccagcctgggtgacagagcgagactgtctcaaaacaaatttctttttaaaaaggataatgtattttaaacaactttccaatagttgcttctgtatttgttagcataacattagctgctaaaatagactccaaaatttcagagatctaacacagcactatttctatttcttgcctacatga

SEQ ID NO: 885951 - DNA, 614 bp, Homo sapiens
caacctgtacaaagccccgttttcagaagggccctatgtttactttgatgctttgctttcactatcttgaaattctataaactttttgaaaaataggtcttaaaatttcattttgcatttggttctgcaaatttatgaggcatgttttgtgtggaaggtgtgtaagcttttgttagcttagcatattctaagtatcctcaattgtttaacaggtcttttatgccccctgttggtcccagaaaattgggggaatgtgsccaaaagcatctacttaggtctctttccttcatatttcactcaaaactccacaatctgtttagtgctgcattgaccagagatacaatgaaagataaaatatttcggcacttagaactaaacagtaggggctaagccaatcaccttttctctatcacattgcagtggatatgtgatgagaatctgataaatcacaacattctccgtggaaagccacattccttttaaagctaaatgagagaagaggcagtcaataagaaattattgatcccaatgggctgttcagtagtgtagtaagtgctatctctacctgtttatactcctttttactatggccctattccctgaatgttttatag

SEQ ID NO: 885952 - DNA, 614 bp, Homo sapiens
caacctgtacaaagccccgttttcagaagggccctatgtttactttgatgctttgctttcactatcttgaaattctataaactttttgaaaaataggtcttaaaatttcattttgcatttggttctgcaaatttatgaggcatgttttgtgtggaaggtgtgtaagcttttgttagcttagcatattctaagtatcctcaattgtttaacaggtcttttatgccccctgttggtcccagaaaattgggggaatgtgcccaaaagcatctacttaggtctctttccttcatatttcactcaaaactccacaatctgtttagtgctgcattgaccagagatacaatgaaagataaaatatttmggcacttagaactaaacagtaggggctaagccaatcaccttttctctatcacattgcagtggatatgtgatgagaatctgataaatcacaacattctccgtggaaagccacattccttttaaagctaaatgagagaagaggcagtcaataagaaattattgatcccaatgggctgttcagtagtgtagtaagtgctatctctacctgtttatactcctttttactatggccctattccctgaatgttttatag

SEQ ID NO: 885953 - DNA, 716 bp, Homo sapiens
ggaagctaaaaaccttgataaaaggttagaggaattgctaactagaataatcagtttagagaagaacataaaagacctgatggagctgaaaatcacagcaagagaacttcatgaagcatacacaattatcaacagccaaatcaaccaagtagaagwaaggatatcagggtttgaagaccaccctactgaaataagacatgcaggcaggaatagagaagaatgaatgaaaaggaataaacaaagcttctgagaaatatgggacttcataaaaagatcgaacctctgattgattggtgtaccagaagaagatggagaaaatggaaacaagctggaaaacacactacaggatattattcaggagaacttcttcaacctagcaagacaggctatcatgcaaattcaggaaatacagagaacaccattaagatactccatggcaagatcaaccccaagacacatatcatcagattctccaaggtcaaaatgaaggaaaacctgttaagggtagccacagaggaaggccaggtcacctacaaagggaagcccatcagaataacagcagatctctcaacagaaactctacaagccagaagatcaatattcaacattcttaaaaaaaagaaagtcaatattcaacattcttaaaaaaagaattttcaacccagagttttatatccagccaaactaagcttcataagtgaaggagaaataaaatc

SEQ ID NO: 885954 - DNA, 572 bp, Homo sapiens
aaaatatccaagcaaaaactcatctttgttttccttgcagattgcacaatttatctccaataacacacacattcatcatcactagagctcagtggaataattatgagtatttcctgaatagaccatgcaaagccatgtgctcttggtggaaagaatgtgaagaagatacttaaaacttgcacaaataataagactgcaaagtcagccacttatagttcagcagcatttgaaatcatatatgcatgcaaggagagtggtctgcggctgtgaatagatttttggatctctatgaggtagaaggagtttggtaggagagaataggaacttcaaattttctgttacaagrcagacgttttaaaaagaagttattagagtaaaatgttaacataaaatatctatggatataggtatcactatatctcctataatgtgcaatgttaaggaatttaaaagaaagcaggagactgaagatgtggtgaagaaaagaaaaattgcattaatgttaaaaatagcttgcaagccactgtgaggtaatatagtgaaacataacaatatttgttatttacgttgaa

SEQ ID NO: 885955 - DNA, 560 bp, Homo sapiens
tacagtttagtgatattgagtttactgtctatcaattataatagagctaaaaataaatctgaaaaatcaaagtaaggagaacaagaaaggaagtttaaaaagcactacaaaatctaaatcatgctacctgattattaccttcaataatatttggtaatacttcaggcatctcttttttttaattccaatttttattttaagttcaagggtacatgtccagggtgtgggtttgttacataggtaaatgtgtgccattgtggtttgctgcacagatcatctcatcacccaggtattaagcccagcatccactagwtattcttcctgaacctctccctcctcccacccactcctcctccaacaggccccagtgtgtgttgttccccctgtgtgtccatgtgttctcatcacttagctcccacttataagtgagaacatgcagtatttgtttttctgttcctgtgttactttgctaagtacaatggtctctagttccatccatgtccctgaaaagaacgtcatctcgttccttttcatggctgcatagtagtccatggcatata

SEQ ID NO: 885956 - DNA, 555 bp, Homo sapiens
gggatacagctgaaagagtgttaagagggaaatttatagcattaaatgcccacatcagaaagctagaaagatctcaaatcgacatcctcacatcacaattaaaagtgctagagaagcaagtgcaaactaatccaaaagctagcagaggacaagaaataactaagatcagagaacaatttaaggagatagggacaaaaaaaaaaaaaaaaaaaaaaaaaccttcaaaaaatcagcgaatccaggagctgttttttttctaaaaaattaacaaaatagatagacagctagctagactaataaagtataagagagagaagaatccaataaacacaataaaaaatgataaaggggatatcaccactgaccccacagaaatacaaactaccatcagagaatactataaacacctctacacaaatsaacgagaaaatctagaagaaatggataaattcctggacacatacaccctaccaatactaaaccaggaagtagttaaatccctgaacagaccaataacaagctctgaaattgaggcagtaattaatagcgtaccac

SEQ ID NO: 885957 - DNA, 583 bp, Homo sapiens
agagaagcctaagtaaagaatagaagccatattgttccaaaggtcagcgcagtctccttcattctcttttaaaattgctcatataaaaataaatttgatttgtattatagtcataaactttctttaaagaagagattaaagctatgcagaagctgcttgtttgagcgtattcaatgccttttaaaatatacagatattttatttcttgattaaattcacattttccatcaatatctatggtattttctgcttctggagatgactttgaaaagaccattaaactaaaaaaaaatcattgcagcacttttattgctacttctttaataacattctttagyactattaaccatttacagaaataattttgaaacctaaatatcatgcacttcaattttcataatagaatatattaaattatatgaatacatgtcacatacacatcatatatttggcttagaaaagattaaaaattcatttcatttgattattggtaatacaaatgagtataaataaatgataaatataatatccttgtggcacttatgatagttccaaaatattttatgttatttaatgtctacct

SEQ ID NO: 885958 - DNA, 639 bp, Homo sapiens
tattgagacagcattcctttgtagtaaacacttggttagtgcagagtagcaggtgcttcctgtaagacacaacgtgaatttgttgcagcctgtcagcaccctaatgtgttatgtcttgctgacttcatttattttctttaccatcctggcttttgtrgccattggaaatgcttaagttagggaaaggtattcccctttttattgaaaaattctgctactaagaaccatctagttatttactataaagaacatgggttcgatgttgccatcttctgattttttaagaaaatctggaaattcagattatatgaaatttcccagtttacaaatactgtctgggtcaaatattcatcacaaaatagaccaataaatcagaatgttttctaacattcctataggtgcttctaaaccaatttgattgtcccatctctcacaaaagggttgaaagataaatacactagagaatatcaaaaagatatttttagttctgaaatactatagagaaccaccttcctccttaccatttaagatttatacttatgtcatgtgagcttttatatcagttatttactcattcaggatttgtgataattgaagtgttttattcctaagagaaaatgttaaatttgctatgctcca

SEQ ID NO: 885959 - DNA, 669 bp, Homo sapiens
cctacccagtgtggctctgggtcaccctatggcatctacggactttaatggcatgagttaatacacagaagtacttagcagctcacacgcactctgttaccattggcatggcttttgttgttagaactggacttgaatcctggccctgatgatgattagatgtggatgggccaggagatttaatttacctaacctttagtttatctgtagaatgggcccggttacacttaccttggagagtgtactgtggcaattagcatacttgtgccactaccactaccacttccactctgcacagaagcctgaaggccttggggagctcaagaaacactgaactatttcagtcagttctctgggttcatgagttgctacttgaggaggatgtggcctgtgggctgtcagtgcccaagttgggatggtgatgtcctaaaactatggaggacgttagtctgaatagaaagtgtaggtrcaagtctgagctagggcaaaatgtcagatctggagagagatttgagaaccatcaataaaaatgggatgattattttaaattatcccatttgctgcctttaaactctaactagtttcattaaactattaactggctctcctggaataacactagtaagtgcaaagtgtttttaaagtggaggcagaaattgggagcagcct

SEQ ID NO: 885960 - DNA, 658 bp, Homo sapiens
cggttattgacattttttcattactgttactggatgttggtaaaaaaggagaaaaggaattaagtaggaaaagcagctcagggaaaatggaagtatcttaattgaaaaagacatcataaagagatctataaagaccaaatgaggtcacacaaacttttctatgttggaagtgatacgtgattggtattagaaaaatgagtaaggacaggggctaaattctgtaagccaaactgatctattgatgcagactaaaggagacaccaaaacagcccatagcaaaagttttggaaaataggctgaatgtcagaagagtcaggcattaaaactcaggaaggcgagtgtcaatatcaagctggtgccacgaggggggcaggtggtacggggctgtgttacaaaaagatacaaacycattataagagccagcatgcaaggctgcagtgggggtaattattaattttaaggcttactcgatgtttagcttgtaagtgatatttgataattgatatttagctggtagcttatataccctaagtaggaatgatttgagggtggagaacaagtgttcctctgtctgggaactggaaggacttagccagagctgacagtcatattccaagtcgttttctaacatggcctcacagcagcatttgcaactgtg

SEQ ID NO: 885961 - DNA, 584 bp, Homo sapiens
gatctatttggttatgcaagtaagaaaactgggattcatccttgacctcttccttgtctctgtgatcttattttttaattaattatttttattattattttgagacagagtctcactatgttacccaggctggagtgcagtggcatgatcttggctcattataacctccacctcyccagttcaagcaattctcctgcctcagcctcctgagtagctgggactacaggcacatgccaccatgccaggctaatttttgtatatttgtagagatggggttttggcatgttggccaggctggtctcgaactcctgacctcaagtgatgcacgcacttaggcctcccaaagtgctaggattacaggcatgagccgctgcacccagccctctgtgatctataatcagtaaagtatcaaggtttgctgactttgcattccaaatatctctaaaaattatctgactgatactgcctcatttcatgccatcaatatctttaaccttacaataactaccttctgccttgtttccttgtttgtagaaaaactgtcgtgggaagtttgggtcctgaactcagatcttcatcaaaat

SEQ ID NO: 885962 - DNA, 615 bp, Homo sapiens
tgcttgtgggatggggccggtctaatctgagcaccaacccccaccccccacccccactgcatctgctggcttcttccaggatccctgcctggcagcacccacttgcaatgcagcctcaggtacccaacttgggcacttgcaattggccaccaccatagctcctttgccagcagcacctgcctgactgtcagagagcttctgcagacaggcatttgccagcatgcacccacctgttgcattcaaccacagctttgctggtgtgcagtyaattgcggcctcccctcactgctttgctgatgcatgtatgtggacattgcagacactccacccccaccggtgcacaggtgcagaccccactgtcctgctgccatcagcacatatgaatgaatgcagaccccacagccagcacctcccatcagagtgttgttaccagtggactggtaacaccttgggccccccagcatagcaggtacttaactacaggggctacagaacaaagccatggacctggtcccagccccctagttagagcatgcaaccaaggagtgctaagctgagcactgggccactgaaatcatccagaattgaagctagttaactgaacacataatatgc

SEQ ID NO: 885963 - DNA, 641 bp, Homo sapiens
atagactacatgcaggaaaaccactttggagatcactgaactcaccaagatgtgtaagggtgtgtgtgctggtttagggtgaaggcaatgcttatagaaagataaggaaaataatgttgctttgatttgtttcaaaataattttcaggacttagtaactagtgaacaagagaagtcaaggaaaagattgtcaaagtaaagtgtttttctttctgaaaaattatacacagaagtattacacctggttggatccttagaccarttaacaggcttaatttggcagtgaggaagtacattcatgagaaatatttttgtggcaaacaactcctactgtttttgataaaatgaactacttggtgtcttgtcctaccaacatttagaggtgaactgtttctaacctcttatttccatgataagtgctgggatttctgttacaacctggacaattttaatatttcagtataatttcacatgtgtattgcagtcttgatgccttgccttgttttaacatgactttctcttttttgaagtctaaacacctcaatatttgtaaatatacattaaattgctaatatagaaaactgctaaaggtggcatttaactgcttaaaatttgctgatggaaatgtttgttttgaaagag

SEQ ID NO: 885964 - DNA, 605 bp, Homo sapiens
acagatcaaaagtgtagttaggcctatgatggttacatttgtggtgaacgtgtatttgttttttcttgtcattattccctagacattaaagtataacaactatttatgtagcattttcattgtattaggtattgtaagtaatctagagatgaattaaagtatacaggagggtgtacgtagattgtactatgccatkttctattaagaccttgagcatccatagaatttggtgtctgaggagggtcctggaatctatctgtatatactaagggataactgtatattaacatatacaaatgtacatatgaaaacatgtatgtgcatattgtgtataaatgcatacatacacacatacatatgtatgtattgtgtagtacatatgccagtatgtatgtgataaaatgattaaacatatcgaaaccatgtgaaataatgtcatccatctcttcttcccttgccaagagaccacatacatattccagatgaagtgaataccaaatagtggaaggccatctaacctacatcagattagcgtgaatgagagaaaataaatttttatggtgttaaacctgtggcatttcagtgattgttggaggaactcacat

SEQ ID NO: 885965 - DNA, 616 bp, Homo sapiens
cctagaaactgaagttactggcaacagaaattctaaaaaatggcatcaaattttcaaagtagagggacacatcttggatgttaaagataagaggtataatacggatggaaaatatttatataaagtcttcaatatttgacaattgtccttaggagctcctaaaatttcaaagtaaggtgcaaattatatgtaattgactaatwagggagtctgacataatatagcatatggaaaggcagtggaattggaagttgggttttaattcctgttctacccttaaccagccttgtgatcctggtaaagtcacttaacttactgccagtacacacacacacacacacacacacacacacacacacacacacacacacacacactccaggaagaccagctaagtgacttacagcccagaaatattatcctttgttcaaagtcatcaaggatatacttagctatatacttagctaaatattcccatgaaaaaaaatgcttcaaagacaaaatatgagggaaataaagtttcgctattgggatgctgatctttatatgactgtactctgtagctctgaagacagatattttctgaaagtctttccttcttaacttagtcctaggt

SEQ ID NO: 885966 - DNA, 580 bp, Homo sapiens
attttcaaagtagagggacacatcttggatgttaaagataagaggtataatacggatggaaaatatttatataaagtcttcaatatttgacaattgtccttaggagctcctaaaatttcaaagtaaggtgcaaattatatgtaattgactaataagggagtctgacataatayagcatatggaaaggcagtggaattggaagttgggttttaattcctgttctacccttaaccagccttgtgatcctggtaaagtcacttaacttactgccagtacacacacacacacacacacacacacacacacacacacacacacacacacacactccaggaagaccagctaagtgacttacagcccagaaatattatcctttgttcaaagtcatcaaggatatacttagctatatacttagctaaatattcccatgaaaaaaaatgcttcaaagacaaaatatgagggaaataaagtttcgctattgggatgctgatctttatatgactgtactctgtagctctgaagacagatattttctgaaagtctttccttcttaacttagtcctaggttgctctgctcaca

SEQ ID NO: 885967 - DNA, 580 bp, Homo sapiens
attttcaaagtagagggacacatcttggatgttaaagataagaggtataatacggatggaaaatatttatataaagtcttcaatatttgacaattgtccttaggagctcctaaaatttcaaagtaaggtgcaaattatatgtaattgactaataagggagtctgacataatatagcatatggaaaggcagtggaattggaagttgggttttaattcctgttctacccttaaccagccttgtgatcytggtaaagtcacttaacttactgccagtacacacacacacacacacacacacacacacacacacacacacacacacacacactccaggaagaccagctaagtgacttacagcccagaaatattatcctttgttcaaagtcatcaaggatatacttagctatatacttagctaaatattcccatgaaaaaaaatgcttcaaagacaaaatatgagggaaataaagtttcgctattgggatgctgatctttatatgactgtactctgtagctctgaagacagatattttctgaaagtctttccttcttaacttagtcctaggttgctctgctcaca

SEQ ID NO: 885968 - DNA, 610 bp, Homo sapiens
cccagaggcaatccttctaaatgccagtttgtgcataatactgtgacaataaataaaagaaatgtaggatttcagctgcaaatgcatgcctggtcaggcatagagcttcactttgttttgtttttgtaaaaaatcttttgtatatctttattctcatattgattgatttttaggattcattttcctaaagcagagaaaaataaatattgggcgagaactctacattgcagatttttagccaaggaagtttcaattacgtcatgccactctgccatgtgttttccaccaaggcctcctcattacttctcttcactcagggatgccactcctgtttaggtctcattctacctctcgggcaattcctgcccagtctccttgtctctactgcctcatctcaccaacctctaatgcagtcttccagggctcattccaaggagagttttgctgctcatactcactccttatttgayctcatccagtccctttgcattttgatggttcccaaaattacatccccagtcccaacttcccgctaggctcattattccaaccacctgttaagtgcatccattttgagagctaaaaagacatcttaaagcaaacatagcaa

SEQ ID NO: 885969 - DNA, 640 bp, Homo sapiens
gggacagaagggagacaaagcagccgcatgtgcattgcactttattcttctctctggtggtcttgcaaagagcatctcgtctcctggtagctgctataattagtatcttattatcttgtcactgttcaaatttgatttgctaaatcattctgaacttccctgacaggctgctgatgcaaggtcagaaaataacatttcatacttattttaggccagcttccctagaagcagggtctgagatggggatttaaatgcatatgattagttgggagagtgctcttaggagaaaggcggaaagtaggataggacaggagaagaaactcagccaagatgtggttcagctgaggtttyatctcagcctgatcctacaggaagctatagagaatgaagggcaccggagaccaagtcgtacgttgaggcaaagaggctggtcctttgaaccctcttgccaatcagctacagattgcccccagaaatttagtgtaaccccataacctcccagatatttctcagtgagacaactcctctagaccaaggtctcagtataaggaggaaagcagttatctggaagcaaacaataatcacagcaacaggggatggggctcctcaggtgaagtgtatcttgacaatacttactagc

SEQ ID NO: 885970 - DNA, 599 bp, Homo sapiens
gatcaaatttttgttttgactaagtttccatgatgactaatgctgtagtttgaatatctgcttcttcttaaactcatgttgaaatctaattattttaacaatagtaagaggtaggacttttaagaggttaggccatgagggctctaacctcatgaacaggttaagactgtcatcacaggagtgggtttgttatcatargagtgggtttcttataaaaggatgaagttggctccttttttcccatcccttcctttcctcttgctgcccccacaactccttctccctcttccccctctctctctctttttctctctccttccctttttgccctctatctcctttcatcatgggattatgtaacaaagaggaacccttgccagatgtgttcccttagtcttagacttcacagcctctagaattgttagccagtaagtttctatctgatatggtttggatgcttatccccttcaaatctcatgttggaatgtagtccccagtgttggaagtggggcctggtgggagctgattggatcatggggacagacacttacgtatggtttagcagcatccccttggtgatacgtgagttccactcagtt

SEQ ID NO: 885971 - DNA, 599 bp, Homo sapiens
gatcaaatttttgttttgactaagtttccatgatgactaatgctgtagtttgaatatctgcttcttcttaaactcatgttgaaatctaattattttaacaatagtaagaggtaggacttttaagaggttaggccatgagggctctaacctcatgaacaggttaagactgtcatcacaggagtgggtttgttatcataagagtgggtttcttataaaaggatgaagttggctccttttttcccatcccttcctttcctcttgctgcccccacaactmcttctccctcttccccctctctctctctttttctctctccttccctttttgccctctatctcctttcatcatgggattatgtaacaaagaggaacccttgccagatgtgttcccttagtcttagacttcacagcctctagaattgttagccagtaagtttctatctgatatggtttggatgcttatccccttcaaatctcatgttggaatgtagtccccagtgttggaagtggggcctggtgggagctgattggatcatggggacagacacttacgtatggtttagcagcatccccttggtgatacgtgagttccactcagtt

SEQ ID NO: 885972 - DNA, 629 bp, Homo sapiens
gtactggtaaaaaaagagacacatagatcaatggagcagaatagagaagccagaaataagactgcatacctacaactatctgatcttcaataaacctgacaaaaacaagcaatggggaaaggacaccttattcaataaatggtgctgggataactggctagccatatgcacaagattaaaactggaccccttccatataccatatacaaaaattaactcaagacgggttaaagacttaaatgtaaaacccaaaactrtacaaactctggaagacaacctaggcaatgtcattcaagacacaggcatggacaaaaatttaatgaggaagatgccaaaagcaattgcaacacaagcaaaaattgacaaatgggatctaattaaactaaagagcttctgcacagcaaaagaaactatcaacagaataaacagacaacctacagaatgggagaaaatttttgcaaactatgcatctgacaaaggtctaatatctagcatctgtaaggaacttaaacatatttaaaagaagaaaaaacaaccccataaaaaaagtgggcaaaggacataacagacatttttcaaaagaagacatatatgcagtaacaatcatatacaaaaaagctcaacatcac

SEQ ID NO: 885973 - DNA, 583 bp, Homo sapiens
ggtaaaacagtatgggaaagagaacacagataactccttctcaggtgaacactaggacttagttttagaggccagcagctgacaccagatgcattcatgaaagtgctcaaaccatgctgtctgacccccacttctgtggttacaaacttagtttctctcctttttcatccccaaacttctatttcgakactgaggtgtccactttttcccattcccacatagagaggaacaaaggtggtttaacatgaaacatcaaagttcaatcatttgaaccccgtaatcatatggctggggaaaccaatctctggaaacttgaaataacttgtacaaagccagtgaatcagcttctaacagaatcagatcagaacttggatttcctgactcatcacctctacaaaactccttggcacagaagtgggtacggcatgtttcaatacctactatagaatattgggatgcaatatatgaaaggtatagacattccccaccctgttaccaatcataggctcattgtattggctcatgaatgtcttagtcaactttactagaaaaatgtgtgtggactaggcccagggataaaatt

SEQ ID NO: 885974 - DNA, 638 bp, Homo sapiens
tttttcaaatacactaatcctttcaccattttactaccatattcaactctttaaagtcatcacacccacctgaccaagcttagaatctccagcatgctgttttaataattctcttgctcaagtattaaactccttaaccatctctcatgccattgtactgaccaagaaaaaatgtctaactcgctaaacaaaattctccattatgctatagtcacactcccacacaggtactatgatgggacaaaatttttwaaaaggcacaaggttgaatgattttgctttccacacatgaccattagcctcaagtggtcttcgaaactgcctgggaagatttccgttttccattcactatcctattcccttaaagaatgatttcacatcttctcctctgaatgacctgtgcttcttatttcctaagaacaaaaggagaaattcaaagggaactcacacaagcctaccatgcatttcactccttaatctgaaccattacagataaacctgcctttatctccagtcccttcactagagtgcctgttccagcccttctcatcgacataagattgttgcatattaactccccttctctttcttgcattgtaaatttttcatcgctttacaaatgtgctgtcatttttccc

SEQ ID NO: 885975 - DNA, 595 bp, Homo sapiens
atgtcctcttaggaaaaaatctctaataaaatgttttgcgaatgttgccattatgtgtcagtttgcatcctactacataattattactcaaaaggttttgtctataattttattcaaaatacgttgacctagcattcactttcccttgatattaaaaacagataaaaactaaatgacaaaaatatcacaagaaatgtctagcacagataactcaaacagcctaatagttgaaaaattctgaacacttttcattygaaaatgagaggttaagtttcctacacattactgatgctaatgaagtcttaaccacaatgaaccatcctgtgagaaaaagtcaagcttccattgacaattctaaatgtattatgtgtttataactgtaaatactttgtcttcaacatgagtccattaaatttaagaatcagagtagcaaatagtggggaaaaatacagtagcaccaacttcaaaatatttacaattactgtttgcagttttgatcataaattgatcagtaattctaaacataacatttaaaaatcataactatcttgagacatttttgacaatttccattaaatcctatgaaaacatagtt

SEQ ID NO: 885976 - DNA, 595 bp, Homo sapiens
atgtcctcttaggaaaaaatctctaataaaatgttttgcgaatgttgccattatgtgtcagtttgcatcctactacataattattactcaaaaggttttgtctataattttattcaaaatacgttgacctagcattcactttcccttgatattaaaaacagataaaaactaaatgacaaaaatatcacaagaaatgtctagcacagataactcaaacagcctaatagttgaaaaattctgaacacttttcatttgaaaatgagaggttaagtttcctacacattactgatgctaatgaagtcttaaccacaatgaaccatcctrtgagaaaaagtcaagcttccattgacaattctaaatgtattatgtgtttataactgtaaatactttgtcttcaacatgagtccattaaatttaagaatcagagtagcaaatagtggggaaaaatacagtagcaccaacttcaaaatatttacaattactgtttgcagttttgatcataaattgatcagtaattctaaacataacatttaaaaatcataactatcttgagacatttttgacaatttccattaaatcctatgaaaacatagtt

SEQ ID NO: 885977 - DNA, 590 bp, Homo sapiens
tttcctgttgggagggaaaatgtgccttcacctcagctcacagtgggctctagaactgatggagaagtaaggtattaaaagagtgaagttaatccatatgcacaagcgcaagggagacttgtaaaccttcactgctcaktatccctcttgtggcaagaattccagtaagggatctgaaagccataaggactccttacaaaaaaagaaacaatgtcaattcccagattctaacagccacagaacttaggaaggagactatttgtaaggcctgtagtcatggtattttcaaatgcgaatgacatagtttaattacttatggcccactatggcaagtaaaaagcactcatggcagaaatatgcatggcatttggtccttcctaaaatcagctgatatgcaatgttttacctgttaactctaaatgatacatcataacactgagttttctaacaaatgtgttcactttgggcatgtctaaaggccatgtttccctatgtttccactaagaaggcttttagaagaacaattgacatgcatgaacttcagtttttgttcaaatatacctaaaaatgctgacatatactggggcagg

SEQ ID NO: 885978 - DNA, 590 bp, Homo sapiens
tttcctgttgggagggaaaatgtgccttcacctcagctcacagtgggctctagaactgatggagaagtaaggtattaaaagagtgaagttaatccatatgcacaagcgcaagggagacttgtaaaccttcactgctcagtatccctcttgtggcaagaattccagtaagggatctgaaagccataaggactccttacaaaaaaagaaacaatgtcaattcccagattctaacagccacagaacttaggaaggagactatttgtaaggcctgtagtcatggtattttcaaatgcgaatgacatagtttaattacttatggcccactatggcaagtaaaaagcactcatggcagaaatatgcatggcatttggtccttcctaaaatcagctgatatgcaatgttttacctgttaactctaaatgatacatcataacaytgagttttctaacaaatgtgttcactttgggcatgtctaaaggccatgtttccctatgtttccactaagaaggcttttagaagaacaattgacatgcatgaacttcagtttttgttcaaatatacctaaaaatgctgacatatactggggcagg

SEQ ID NO: 885979 - DNA, 586 bp, Homo sapiens
aacagggattgcaaagaatgaggaaggattgaagaggtgacctgggcagtgatgcgtcaggagagaccatgtgaaaagaagagagaayacttagacctgagctggcagaaatgataaacttattttccagtcttcctaaagatcactcctgggatcaagaacacctccctccataaattaaggctaattctaatgcaaagattcctgattttatctcaagggagctgatggacatttggaaaagcccagtgaagctaagtagcaattaatgacgagttcactgtaagaccttgggttctcaaatgactaaagagaaaatatcatgccttggaaattaatgactgcattctgttaatcatcacactaacttgctactgaaattttaaaatgccacatttccccagagctgaagctataccctagtgccacttccataatatttactactatccccaatgcggcactgtaaattccactcacaattatttggctcccatttggtaagtgaatagtctctgatactgaaatcgaatttcatggctaataggctctctgattactaggaattgttggtatttaatttaaa

SEQ ID NO: 885980 - DNA, 611 bp, Homo sapiens
atttgtgtctgggttacttgacacaattcatggcagaagtagatagtgaatactttcttcccatatccctgaacagggattgcaaagaatgaggaaggattgaagaggtgacctgggcagtgatgcgtcaggagagaccatgtgaaaagaagagagaatacttagacctgagctggcagaaatgataaacttattttccagtcttcctaaagatcactcctgggatcaagaacacctccctccatarattaaggctaattctaatgcaaagattcctgattttatctcaagggagctgatggacatttggaaaagcccagtgaagctaagtagcaattaatgacgagttcactgtaagaccttgggttctcaaatgactaaagagaaaatatcatgccttggaaattaatgactgcattctgttaatcatcacactaacttgctactgaaattttaaaatgccacatttccccagagctgaagctataccctagtgccacttccataatatttactactatccccaatgcggcactgtaaattccactcacaattatttggctcccatttggtaagtgaatagtctctgatactgaaatcgaatttcatgg

SEQ ID NO: 885981 - DNA, 608 bp, Homo sapiens
tcatgtaaatttgacacaagcatacatccatcactacttgattcattcactcattcattctgtaggcaacttgtcaattttgtctaggtgtctaacactatacaaatactatgcaaaaataaaataaaaaggtatagttctggtcttaaagaagaaggactgagggaaatcataaatatggaattataatgccatgtatagagaccagtgattgttatttataagctattttgagaggtagagggaaacctaaaaacagacagaaggtaccagggaaggcttcttatggtacatgcttgagcaaaatcttaatggtaaatactagttatccaataaagagggaacaatgtactgtaggggaaaaatgtgttattcagggaaaactgcattgtctacrgtacattattccaggaaatctcattccaaccttgcattgagccattttacaaatctgtaagttgtcaatagccattagcaatgcaaaaaataatattcctatagaaatgcaacattctgtctgacaggatttcaattggcttcctttttccaccatggcccaggccagttttccttcaattttcacatttttttcaatattcctaatctat

SEQ ID NO: 885982 - DNA, 586 bp, Homo sapiens
ctcaacaggatggcaattttaggtattaagaagtgtcgcaataagaactttaagtttatatatttttcttccccaatgagagtgagactattgaagagcagaaggcaacaaacgaggcaacaaagtatataagttaggaatgcatttgaactcaagtagcagaaattttgacttctaatgggggtttttgttttgttttgttttgttttttcctcctatgaccagaagtctggaagcaggcagaaattcagtgtttcctaggcatggtgtcatctcttsttcatgtttacaagataatcattgcagttccagacattgcatccatgtttaaggccagtagaaaaaagcaggaagaggtagtacttcagaatttcacttactactcttcttacttacttcctactattctacttactactactcatatgagaatccccactctaatggaagttgagaaaaatattcccagcagttaataatacaacccagccaaaaagagtgcagtgggcagtgagtagtggatgggacaaaagagtcaagtctgcattgcttgcacaacccggatctgagtaaagtctgtgactaa

SEQ ID NO: 885983 - DNA, 639 bp, Homo sapiens
aattgactcacatgtcaattaagtcaccttcttccaaggtggcagaaaggagaagtgccgagcaaaaaggaaagagccccttataaaaccatcagatctcatgagaattcaccatatgtcacaagaacagcatgggggaaaccacccccatgattcaaccacctccacttgatctctcccttcacacgttgggattatagggattatggggattacaattcaggatgagatttgggtggggacacaaagcccaatcatattgatgagatttgttcccaactttgattgcaaacagtattattctcaaattctattttgaagtatgaatgatcagttcactaagatcctttgtgggaaaatctagaaaagtatcttcaaatacattacatgttccaaaggtttgctttcaaaatctggtgaaggttcatctgytcatacattaatcaattatcatactttcttttttagagaacccaagtaagaatttttacatttgcgcttctcacattttaagtcaatgctaactacaacattgttgtccctacctcgaagtgagtttcttaaactatatgatgatttcaatgcagactctacaaaagaaaaacttctgatgtggtcttgagaaatatacttgattaa

SEQ ID NO: 885984 - DNA, 639 bp, Homo sapiens
aattgactcacatgtcaattaagtcaccttcttccaaggtggcagaaaggagaagtgccgagcaaaaaggaaagagccccttataaaaccatcagatctcatgagaattcaccatatgtcacaagaacagcatgggggaaaccacccccatgattcaaccacctccacttgatctctcccttcacacgttgggattatagggattatggggattacaattcaggatgagatttgggtggggacacaaagcccaatcatattgatgagatttgttcccaactttgattgcaaacagtattattctcaaattctattttgaagtatgaatgatcagttcactaagatcctttgtgggaaaatctagaaaagtatcttcaaatacattacatgttccaaaggtttgctttcaaaatctggtgaaggttcatctgctsatacattaatcaattatcatactttcttttttagagaacccaagtaagaatttttacatttgcgcttctcacattttaagtcaatgctaactacaacattgttgtccctacctcgaagtgagtttcttaaactatatgatgatttcaatgcagactctacaaaagaaaaacttctgatgtggtcttgagaaatatacttgattaa

SEQ ID NO: 885985 - DNA, 635 bp, Homo sapiens
agaaaattagagataatgaacagaatatactattttaaaattctataaacacattttctatcaataaaaagtccttttttaaaggaatctacagtctgaccttgcaaaagaaaaaaaacatacgacgttgaatttctgaaacttattcactgaaatatttttttctgacatgaatacttaaagtctccaaatttatactaaaaattcatatgyaaatgaacaatgaaaataaaaattgccaatacctgatacccattttctctttgtatatattaccactctacttgtgatggaaaaataaaagtttcccatcatatgccatataagtttatgatatggtttggctcagtgtcttcacccaaatctcactttgaattgtaataatccccatgtgtcaagggcaaggcgaggtggagataattgaatcatgggagtggtttcccccatactgttctcctgatagtcaataaatctcacaaaatctgatggttttataaatgagagttcccctgcacaagctctcttgcctgttgccatgtaagatgtgattgctcctccttgccttctgccatgcttgtgaggcctcccaagccatgaggaactgtgagtccattaaaccaatttcctttataaat

SEQ ID NO: 885986 - DNA, 635 bp, Homo sapiens
agaaaattagagataatgaacagaatatactattttaaaattctataaacacattttctatcaataaaaagtccttttttaaaggaatctacagtctgaccttgcaaaagaaaaaaaacatacgacgttgaatttctgaaacttattcactgaaatatttttttctgacatgaatacttaaagtctccaaatttatactaaaaattcatatgtaaatgaacaatgaaaataaaaattgccaatacctgatacccattttctctttgtatatattaccactytacttgtgatggaaaaataaaagtttcccatcatatgccatataagtttatgatatggtttggctcagtgtcttcacccaaatctcactttgaattgtaataatccccatgtgtcaagggcaaggcgaggtggagataattgaatcatgggagtggtttcccccatactgttctcctgatagtcaataaatctcacaaaatctgatggttttataaatgagagttcccctgcacaagctctcttgcctgttgccatgtaagatgtgattgctcctccttgccttctgccatgcttgtgaggcctcccaagccatgaggaactgtgagtccattaaaccaatttcctttataaat

SEQ ID NO: 885987 - DNA, 624 bp, Homo sapiens
gtttgctgcaggggcgaggccctcacggagaacctctgctagggcagtgtgggaagtgaaatgtggagttggagcccccacacagagtccccactggggcattgcctagtggagccatgagaatagggccaccatcctccagaacccagaaggatagatccaccgacagcttgcactgtgcatctggaaaagacacagacactcaacaccagcctctgaaagcagctggaaaggtggataaatgctgcaaagccacaggggtggagacgcccaagaccayggcaacccatctcttccgtcagcatgacttggatgtgagacatggagtcaaaggagatcattttggagctctaaaatttgactaccccgctggatttcagacttgcatggggactgtagtctctatgttttggccaatttctcccatttggaatgggggcatttactcaatgcctgcaccaccattgtttctaggaagtaactaacttgcttttgattttacaggctcataggtggaagggacttaccttgtctcaaatgagactttggactgttggacttttggattaaggctggaataagttaagactttgggagactgttggaagggcatgattgtgtttt

SEQ ID NO: 885988 - DNA, 568 bp, Homo sapiens
catactcaatagtgtggtcaagttcagatgtctttccctgaccttccaaactatgtattagcactattccctcccgatcttctaagcactctgacagcatgctacacttgtgcttcagagtaaccatcggattgtaaggaaataaccattatgtaattttctatataatgcatgtctcccttgttaatccagaagcctcatgagaaatgggatcttgctacttttattcatcatggaatgccccccaaaaccagctgtgcctggcaaattggtgagcaatcagtaagtatytgttgaataaaataaaaaaattagggaataagataataatgagtaaataatagaagttgtttctgagagaggtagagaaaaagaatgaaaaagaaagtcaatttaatttttttaatgcactgggaaagcatttagagctcaacagtgtttatggttcccattgttagatgtcaattgtcattcacgataacaggtgaaaaagttgtagcatataaataggtattgtttcataaataggcccatgaggttgctatcctggttttaaaacttctagtct

SEQ ID NO: 885989 - DNA, 629 bp, Homo sapiens
catttcctctatgttaccttaggaattttttgaaatattgtcttattcaccagtgtaagggtagactacttttacttagtaaaagtaatctgaaagaaagcgtacgttagtgaatcagcacaacatgctaaacgtgttgcaaactctaagtgtcactcagagcatttattcattgtaagtacattccattaagaagtttaaaattcaagttaagagcatgtagcttaaaattaaaatgacctaaaaagcattgcagaaaaaaggatggtaactttactggtatcattcacttcaggtgtttgtatcaggaaaccaacacaatgttagttgatcgattattgctttattcagatattccttggtgcatgtttacagaaatgtcatagctcttcaaaaaggctttaaagaatcagctgtcttctyttcatgcacgggtcaaattttatcacttctcattgagagactaaactttcaaatgtttattgagctgtataatttcatgggctacataaaagtgatggttaaaaaatgttaatatatttcatcactaggcatccttaagtttttaagtgttgtaagtcttatttcagaacacactagaatctatatttgcagagaaatgtagcttt

SEQ ID NO: 885990 - DNA, 586 bp, Homo sapiens
tggggggcagacatatagacaaatatgagggaccccacagctagggagacattacgtacaaataaatcacattataggagagagcaatggcacttaataaaaatcatagagtatgctgcgcttatctgacattgattatggtccaagcactgtgctacacatgactcagacatcatcttcattttcccaagccctgtgacatgcatattatcacccctatttcacagatgaagaaacggagcctccgagatattaggtgtcataccaaagacaacataactgggctaattggaattcggggccctccaaatacatagctgaggcttcacatttcactgtcttaggagacatgaaggtaaaggcttccatcagtttacatgttaaaaggagaacaactatgatgcytcagcggtgaccattcctggaggagaaggcatctgagctgagtgtgtaaagatgcacagcatctagacatagaaggctggaggcgaaggacatcccatagtgaccctgcacaggcacggagggcagaaatcccacagtcataactcagaatggcaaggggcttgacttagctggaggccaa

SEQ ID NO: 885991 - DNA, 615 bp, Homo sapiens
ataatccagaatttaagagagagggtaggatggatggctgaacgacttgacagaaatgctgaagaaatttttttgttttgttgtttgtttttctcaatatcttattacgaaaaatttccaataaatagcaaagctgaaagttgtttttaaacagcaaacactcatatacttaccacctagattctacattaatattttattatacttgctttatcatacatctgtacatctatccacctctatctactcagcaactcatcttcctaaagaaaatgaatttcaaggtacagtgcaaacaatatggctggaggcattttaaaaataggaacgtattatattcaatttacrttgtttgttttgcagcactgtaattcttcatttctctttaccttcggtaaagctcaccacacagagagtctttgtgaagatggtgtctttcaataatagaaatcaaggaaaacggctgggttctaagtgtaaatagatgcagagagactgaaataaaaaaatacataagacaatgggaagaacccaaatttattggagtcagggaattagaactagaggtgatcacaagactgtaaactttcaggaatttggagaagtcttggggag

SEQ ID NO: 885992 - DNA, 504 bp, Homo sapiens
acttgaaaattcacacatgatttttaaattatactttaagttctagggtacatgtgtacaatgtgcaggtttgttacatatgtatacatgcaccatgttggtgtgctgcacctgttaactcgtcatttacattagatatatctcctaatgctatccctccccctaccccatgacaggccctggtgtgtgatgttccccttcctgtgtcccagtgttctcattgttcaattcccacctatgagtgagaacatgcggtgtttggttttctgtccttgcgatagtttgctcagaatgaygaactcatcctttttgtggctgcatagtattccgtggtgtatatgcgccacattttcctaatccagtctatcactgatggacatttgggttggttccaagtctttgctactgtgaatagtgccgcaataaacatgtgtacatgtgtccttatagcagcatgatttataatcctttgggtatatgcccagtaatgggatggctgggtca

SEQ ID NO: 885993 - DNA, 558 bp, Homo sapiens
agcaatggggtaaaggctccctattcaataaatggtgttgggttaactggctagccatatacagaagattgaagctggacccctttcttgcaccttatgcaaaaatcaactcaagataagacttaattgtaaaacccaaaactataaaaactcctgaagacaacccagacaataccatcmtggcgtaggaataggcaaagatttcatgacaaagacaccaaaagcaattgcatcaaaagcaaaaattgacaagtgggatctaattaaacttaagagcttctgcacagcagaagaaactatcaacagagtaaacagacaagctacagaatgggagaaaatatctgcaaactatgtatctgacagtggtctaatatccagcatctatataaagcttaaacaaatttacaagagaaaaacaaacaaccccattaaaaagtgggcaaaggacatgaacagacacttctcaaaagaagatatacttgccaccagcaagcatatgaaaaaaaagcccagtaacaccaatcatcagagaaatgcaagccaaaaccacaatgagat

SEQ ID NO: 885994 - DNA, 663 bp, Homo sapiens
ttctttttctactttttaaactgtcctttttcccttttctgtagactctttctcatttcacatgccttaaagtactgcccttgaccatctttttgtgttttatatcttacccccttggcaatcccatcaattttcatggttttaaccagatattttctgacaaatttcaaatataactctctttccagatcggtggcctatgggatcccttgactttattgtccaatggataccacaaactcaaacagcctaaactaattttttcccagtctgcgatttctctttattccctatttattcctacaaaatagacctgcggcttattctagacttctctttttccttgattctcataaccaatcattcactaaacactaacctccctgctacatagaaagtcaaattcattctcctctmtccttttccattgacactttctttagtaaaactctaatcatctcttgacaaaattaattaattgaactggcctttccttctccacttccctcaaccatcaatggccttcagatttgtctcctaatttccaatttgactccttttcttaatctgtcttctccaaagctttccagatgccctttccaaaatataatctgatcttgatttcttcctgcataaaattcttcactggctcaccatgtttcc

SEQ ID NO: 885995 - DNA, 592 bp, Homo sapiens
tgggcaaaataaccagctagcatcataatgacagaatcaaattcatacacaacaatattaaccttaaatgtaaatgggctaaatgccccaaataaaagacacagactggcaaattggataaagagtcaagacccatcagtgtgctgtattcaggagacccagctcctatgtgtgtgcaaagacacacataggctcaaaataaagggatgatttaccaagcaaatggaaagcaaaaaaaaaaaaaaaaaaamaaaccaggggttgcaatcctagtctctgataaaacagactttaaaccaacaaagatcaaaagagacaaagaagggcattacataatggtaaagggatcaatgcaacaagaagaggtaactatcttaaatatatatgcacccaatacaggagcacccagattcataaagtaagttcttagaggcctacaaagagacttagactcccacacaataatagtgggagacttttaacaccccactgtcaatattagacagatcaacgagacaggaaattgacaaggatattcaggacatgaactcaaactgtggaccaagcagacctaatagacatctacagaact

SEQ ID NO: 885996 - DNA, 628 bp, Homo sapiens
ttagctgtattcctaggtatttgattctctttgtagcaattgtgaatggcagttcattcataatttgcctctctgcttgcctgttgttggtgtataggaatgctagccatttttacacattgattttgtatcctgacactttgctgaagttgctagtcrgcttaagaagctttttggctgagataatggggttttctagatataagatcatgccatctgcaaacaaagataatttgacttcctcttttcctatttgagtacctttatttatttctcttgcctgattgccctggccagaacttccaatactatgttgaataggagtggcgagagagggaatccttgttcttgtgccggttttcaaggggaatgctttcagcttttgcccattcagtaagatattgtctgtgggtttgtcgtatatggctcttataattttgagatatattccttcaatatctagtttattgagcatttttaacataaagggatgttgaattttatcaaaggccttttctgtgtctattgagataatcacgtggttttgtctttagttctgtttatgtgatgaattatatttatttatttgcatatgttgaaccaaacttgtaacctggggaggaagcca

SEQ ID NO: 885997 - DNA, 628 bp, Homo sapiens
ttagctgtattcctaggtatttgattctctttgtagcaattgtgaatggcagttcattcataatttgcctctctgcttgcctgttgttggtgtataggaatgctagccatttttacacattgattttgtatcctgacactttgctgaagttgctagtcagcttaagaagctttttggctgagataatggggttttctagatataagatcatgccatctgcaaacaaagataatttgacttcctcttttcctatttgartacctttatttatttctcttgcctgattgccctggccagaacttccaatactatgttgaataggagtggcgagagagggaatccttgttcttgtgccggttttcaaggggaatgctttcagcttttgcccattcagtaagatattgtctgtgggtttgtcgtatatggctcttataattttgagatatattccttcaatatctagtttattgagcatttttaacataaagggatgttgaattttatcaaaggccttttctgtgtctattgagataatcacgtggttttgtctttagttctgtttatgtgatgaattatatttatttatttgcatatgttgaaccaaacttgtaacctggggaggaagcca

SEQ ID NO: 885998 - DNA, 542 bp, Homo sapiens
caataatagcagagagatggcctggcgtggtgggctcacactggtaatcccagcactttgggaggctgaggcaggaggatcacttgaggccaggagtttgagactagcctggccaatatgatgaaaccctgtctctactaaaaatacmaaaattagccaggcatggtggcatgcacctgtagtcctacctgctcgggaggctgaggcaggagaatcacctgaacccggaggtggaggttgcagtgagctgagatcgcgccactgcactccagcctgggcgatagagcaagactctgtctcagaaaaaaaaaaaaaatagtagatgcagatgtaaagaaagcaaaacagtgttgtgagttataggatgatggagtgagggtcagcagctattttagatcactgagggcctgtgtgatgagctactatttgaacaaagacctaactgctgagggttatttgattttataaatgaaaacgatagtttactttgttaacagttaatactctttgcttatatattgtgtcctatgtatatttaataa

SEQ ID NO: 885999 - DNA, 542 bp, Homo sapiens
caataatagcagagagatggcctggcgtggtgggctcacactggtaatcccagcactttgggaggctgaggcaggaggatcacttgaggccaggagtttgagactagcctggccaatatgatgaaaccctgtctctactaaaaatacaaaaattagccaggcatggtggcatgcacctgtagtcctacctgctygggaggctgaggcaggagaatcacctgaacccggaggtggaggttgcagtgagctgagatcgcgccactgcactccagcctgggcgatagagcaagactctgtctcagaaaaaaaaaaaaaatagtagatgcagatgtaaagaaagcaaaacagtgttgtgagttataggatgatggagtgagggtcagcagctattttagatcactgagggcctgtgtgatgagctactatttgaacaaagacctaactgctgagggttatttgattttataaatgaaaacgatagtttactttgttaacagttaatactctttgcttatatattgtgtcctatgtatatttaataa

SEQ ID NO: 886000 - DNA, 589 bp, Homo sapiens
tgaaggtagatgggaattttgacctttgtctgcactgtgaagatcagaagataggaaaatatgcaaaaaaaagctgtccaggagcatagacggaagcacaggttacacagacagacagacagacagacacacacacacacacacacacacacacacacacacacacacccctgcacggcagtctatgaaagtaaatcctgcaaagtgaacttctgaattacatgcatttgttccttggaattscaatgcgtttgagtcagtctaatgatattgggcttttataaaacacctttgtaaaatggaaaccatgcacccattttctaagccacatattaaaccattagtcccttccttcactcataacaggtccctgcatttcagtcctgctctgtctctgattagctttggggccttgcaagttgtttcagttccccaggctttggcccctcttatttggaggtgctactttattaaaatgatatgaactttattccaaaatattcttaaagttgtatctgaaaaatgatgggagtctggagtagataatctttaaggaaattaccagctttaaggaaatttctaaaacttt

SEQ ID NO: 886001 - DNA, 661 bp, Homo sapiens
agtggaattttatctgccattcctctctaatcttgggagtttgcagctgtgagggcttgaaactgaaatgctcaaatccacttctaattagaagatgaggtagggttgcagggtgggatatatacatgtgtatatatatctctgtatatatatgtatatatatgtgtatatatatgtgtgtacgtgtgtgtgtgtgtatatatatatatatatacacacatatatatttttccctctaaggaaatctgagtttcttgtctttgtaactctccagctgctccttgaacttctgtgtggtaactaaccttctacactcaggcagctcctgtcagggtgggcaggagcccgggaatggcgtcagctaactgaaatgcaatctcaagtgagcttgggtgggcaagtgaggatgtaccaccaggaggaggtgtttcttggaaatgaggggtgaaggggtttctggctgagccttgtgcagcagtaaaggagtctaattttatctggtccagggaagayagaactgaacatgtctcttattgggatgggttagaacacgatctaccatctgattggcaaaaaaaaaaaaaaaaatagggaaaagtgtacaagaaccatatcattaggcccaagctagacaaggacaaggacagaaaaactatccagc

SEQ ID NO: 886002 - DNA, 686 bp, Homo sapiens
tcagacagaactgggtgcaaattcttgctccactcctgactatattgtatggccttgggaaaatcaacaatctccttagtctcagcttccacatctataaagtagagctctatcctattaggtgactataaagattaggtgcatcacatacttgatggatttagtacayagaaaatgcccagtagaagctatatacaatcaaataactctttttcttaaaaaagatcttatgatagtctgaagctgcctacttataatgtctgcattggttcaatttctacccacttgaaaaaacagagaccccatcagttccatcttctacaggatgatgcttcaggcattttaagagatttccactggacactggcctttgggagcagaaagcccattttattttgcatctgtttatagatttatgtacaagatactgcttctacatttagaaagcttaagtatctgcttgggtgactcttcaattcttatttctccataggtagaaagcaaaattttgttttcccagataacttttcctgtaattcaattaatataaatgtcatgctttgtaacaagggtatcaatatagaaaaacacaagtttgcctaggaaatctgccgaccatgttctaattatgtttttaaaaattcttgtcaaaaattcctcttctgaactgatgtcctcttgaaagg

SEQ ID NO: 886003 - DNA, 686 bp, Homo sapiens
tcagacagaactgggtgcaaattcttgctccactcctgactatattgtatggccttgggaaaatcaacaatctccttagtctcagcttccacatctataaagtagagctctatcctattaggtgactataaagattaggtgcatcacatacttgatggatttagtacatagaaaatgcccagtagaagctatatacaatcaaataactctttttcttaaaaaagatcttatgatagtctgaagctgcctacttataatgtctgcattggttcaatttctacccacttgaaaaaacagagaccccatcagttccatcttctacaggatgatgcttcaggcattttaagagatttccactggayactggcctttgggagcagaaagcccattttattttgcatctgtttatagatttatgtacaagatactgcttctacatttagaaagcttaagtatctgcttgggtgactcttcaattcttatttctccataggtagaaagcaaaattttgttttcccagataacttttcctgtaattcaattaatataaatgtcatgctttgtaacaagggtatcaatatagaaaaacacaagtttgcctaggaaatctgccgaccatgttctaattatgtttttaaaaattcttgtcaaaaattcctcttctgaactgatgtcctcttgaaagg

SEQ ID NO: 886004 - DNA, 686 bp, Homo sapiens
tcagacagaactgggtgcaaattcttgctccactcctgactatattgtatggccttgggaaaatcaacaatctccttagtctcagcttccacatctataaagtagagctctatcctattaggtgactataaagattaggtgcatcacatacttgatggatttagtacatagaaaatgcccagtagaagctatatacaatcaaataactctttttcttaaaaaagatcttatgatagtctgaagctgcctacttataatgtctgcattggttcaatttctacccacttgaaaaaacagagaccccatcagttccatcttctacaggatgatgcttcaggcattttaagagatttccactggacactggcctttgggagcagaaagcccattttattttgcatctgtttatagatttatrtacaagatactgcttctacatttagaaagcttaagtatctgcttgggtgactcttcaattcttatttctccataggtagaaagcaaaattttgttttcccagataacttttcctgtaattcaattaatataaatgtcatgctttgtaacaagggtatcaatatagaaaaacacaagtttgcctaggaaatctgccgaccatgttctaattatgtttttaaaaattcttgtcaaaaattcctcttctgaactgatgtcctcttgaaagg

SEQ ID NO: 886005 - DNA, 570 bp, Homo sapiens
ggtttacttgttcattccctccccaccagtccagcagcccaccagttcttaaaaatcctctcttggttttagtttaaaggagaaaaagttaaaaattcaaacaattgaaaaaatacatatacatgtttaactcaaaaatgcttcttccrttaaaagcagaatttattaagactgagaaaggagaaggtcaggatcattattgtattattggatatgttgcaagacttctataatacaaccagtgattcttggtctgagagtccactatggggaggaggtcttgtagacacataagagtgctcttaagaggagtcagaactagttagaaaatctaagcgtgggccatatgaaataggatggtatcagggagctgtgtccagacaagcttggaatcttgcatttttctgcttttataagtcttagggaagaaaaagagatagaagaagaaagtaatctcttagtatttccagtagtttttctcaagctcatcctccaagaactctaataactctcacacattttccctcaaaccaaaattttatgggttgaaatatgttcttctgtattata

SEQ ID NO: 886006 - DNA, 574 bp, Homo sapiens
tttattttcaaatacaggcaaagggctattggatctgtgggcccaatagttttccagtccctggtgtagacccacaaaattcttgttcactctccaagcacctgctgtgctctgtgagtcagacccctgacagtcaataccaattccacctcagctttctgaagctttccaaagcaatctggtcacctttgatatctcattaactctccacggtagacttttgattgtctgycttcaccattacttaatatgccttggtctgtgctggctgaccacatccgtgtgtgtgcgtatataattctaagttaaacatacgactcagaaaagcagtgcagtataatataaggaccagggctttggagtcagatagacatgagtttaaattctaagctctatcacgagctatgcttcaggttgctgagcttctctacaactcagttttggcatctgtataatggggctaataatacctcatagcgctgttgtgaagactaaatgagacaatgtatataaggcacacggcacagtttctgatcacacaattaagtgatcaatagcttcttttgtagtatga

SEQ ID NO: 886007 - DNA, 619 bp, Homo sapiens
tatattaaatataattaagatactttaagataaaactgatactatttaactatagtcaatgtacttgaaattatgctttgtttggataaactaaaggtcaaaaaatcacttcatgagtaattgacatttttatgtatttgaatatttgaaactagatgttcaaatactttcatacgaaaataaatataatgttcttgggtcaacagaactgggagaaattcagcagatataaattaaattgtctaaaaattttttaaaataataaaaaagaaattgactctagatattcaaatttkctgcagtcacattccaaatacttggaatgatcggcaactacatttaatgtattgcatttaaatgaatttaatttagtttttaaaaatgtgacatttatcttttgaaacagcagatgaaacttatagcttgaattaagctctccacctaccaagaaaccatgagaaatgagaatgtactcaatagtcacggggtttcatatatgagagtttgaattttatgttaaaatattagaatgattatcataaatgtgactggcttagatctgcagggcatatattcttttatgattgttatttttaaagaaataatgagaaccttccaa

SEQ ID NO: 886008 - DNA, 607 bp, Homo sapiens
ggcacccctgtcttgtgccagttttcaaagggaatgcttccagtttttgcccattcagtatgatattggctgtgggttcatcatagatagctcttattattttgagatttgtcccatcaatacctaatttattgagaatttttagcatgaggggtagttgaatattgtcaaaggccttttctggatctattgagataatcatgtggtatttgtsattggttctgtttatatgctggattacgtttattgatttgcatatattgaaccagccttgcatcccagggatgaagcccacttggtcatggtgcataagctttttgatgtgctgctggattcggtttgccagtattttattgaggatttttgcatcgatgttcatcagggatattggtctaaaattctctttttctgtatattacaaggctacagtaaccaaaacagcatggtactggtaccaaaacagagatatagatcaatggaacagaacaaagccctcataaataatgccacatatctacaactatctgatctttgacaaacctcacaaaaacaagaaatggggaaacgattccctatttaataaatggtgctgggaaaactggctagc

SEQ ID NO: 886009 - DNA, 607 bp, Homo sapiens
ggcacccctgtcttgtgccagttttcaaagggaatgcttccagtttttgcccattcagtatgatattggctgtgggttcatcatagatagctcttattattttgagatttgtcccatcaatacctaatttattgagaatttttagcatgaggggtagttgaatattgtcaaaggccttttctggatctattgagataatcatgtggtatttgtgattggttctgtttatatgctggattacgtttattgatttgcatatattgaaccagccttgcatcccagggatgaagcccacttggtcatggtgcataagctttttgatgtgctgctggattcggtttgccagtattttattgaggatttttgcatcgatgttcatcagggatattggtctaaaattctctttttctgtatattacaaggctacagtaaccaaaacagcatggtactggtaccaaaacagagatrtagatcaatggaacagaacaaagccctcataaataatgccacatatctacaactatctgatctttgacaaacctcacaaaaacaagaaatggggaaacgattccctatttaataaatggtgctgggaaaactggctagc

SEQ ID NO: 886010 - DNA, 605 bp, Homo sapiens
cagggtctcaaatatgtttaaatctgttgcctgatctcatcctcataacaaccatgtgaaataattatcattcataccactactatgccttctatagatgaggaatttgagtttcagaaaggttaaggtgatttgctcaaggtcacccagctcatgagtggccaacttagaatttgaacctagatcttcaggacttcaacacccatgtgctttgcaacaaccatttgtaggaaatacataggaaaggggaattttgcataaagagcacaatgtgaataaagacacaaggtcataaaagttcttagtatgtttagctttaaaaaagtttattaaggaatgaatgagcaattgtctgaatgktttatgaatgttaataacctgcatagagactatgaagttgatgaagaagagttctgaatatgaaggtgaatcttttgactatagggagcaacagggatcaccattagaaggccgcgtgatatgggtcaaactctgagtgtttctagtgtggctcatgttccaacccaaatcatctggaccctaatggtactcaagacccaagccacagctatacaaattcctggctatgtctccattcatggtcc

SEQ ID NO: 886011 - DNA, 557 bp, Homo sapiens
aaaagtggtttttgattttgtttttttgttttcggtgtttttgagttctttttttttttttttttttttttttttttttttttgcattacatgacctgccagaaatttcttttgcgaggatagttttcgatgagtcaaaggagtaagacaagtcaagagaaatttaaacagtgcttatgtgggctctctggatgaaagataaagaggagatgacaaaagaagctggattgctctactggaaytggagaagttgaccaagttgaccaaaaggttcttcccaacattgcctttcttggtagtggaaatacttcttcagaatccatccgcccccttagctcgtgcattaatagacaccagcaattttggctcctgaacacctctcaaatctgcccactactctgtatgtccactgctggaaccctaatccatgccactgttgtcattcatctacactagggcttggcaaacagggtttcctgaggattcattataatagtatgtctacatgtgcctcacacatgtatgtaaacatgtgtgctcacaaatgtataaaacat

SEQ ID NO: 886012 - DNA, 650 bp, Homo sapiens
gttttcagaaatttaattttggtgtgtctagacatagatttctttaggtttaccctacttgggattcactcagtttcttaagtatgtttacgtctcttagcaagtttgggaagttttcagccactatttgtttattcaagttttttttcaattgtgctctctttctcctctcctttgggtatctaataatacaaatcttagactttttgttacagtgtcataggtscctaaggctctgttaatttttttcagtctattatgtctttgatgttcagattcagcattctctattgttctgtcttcaagttcactgattccttcctctgttcccttaattctactgttgaatccatatattgagctttttcttttggtatgatacttttcagttctaaaattttcatgtggcagttatttgtatcttttatttactaactgtgactttcctttctgaggctttttattttttatttgttttagacacatttatatttgcttgttgaaatatttttattatggatttttaaacatctttataagatgcatttaacatattaataatcttgttggtgatggtttaaaaaaaaaatctgcacgttcgtgtttccaggtttctggattcttcagtgcagtgtcttgggtatatgagt

SEQ ID NO: 886013 - DNA, 650 bp, Homo sapiens
gttttcagaaatttaattttggtgtgtctagacatagatttctttaggtttaccctacttgggattcactcagtttcttaagtatgtttacgtctcttagcaagtttgggaagttttcagccactatttgtttattcaagttttttttcaattgtgctctctttctcctctcctttgggtatctaataatacaaatcttagactttttgttacagtgtcataggtgcctaaggctctgttaatttttttcagtctattatgtctttgatgttcagattcagcattctctattgttctgtcttcaagttcactgattcyttcctctgttcccttaattctactgttgaatccatatattgagctttttcttttggtatgatacttttcagttctaaaattttcatgtggcagttatttgtatcttttatttactaactgtgactttcctttctgaggctttttattttttatttgttttagacacatttatatttgcttgttgaaatatttttattatggatttttaaacatctttataagatgcatttaacatattaataatcttgttggtgatggtttaaaaaaaaaatctgcacgttcgtgtttccaggtttctggattcttcagtgcagtgtcttgggtatatgagt

SEQ ID NO: 886014 - DNA, 620 bp, Homo sapiens
tgtaattttgtatcctttaacaaaactctccctatccccactcccttaaccctgcccagcctctgctagcctgtgttctaatttttacttctatgagattagcattttttagcttccacatatgagtgataacacatggtgtttaattttctgtttctggcttatttcacttaacataacgtttgtattcttaaaagattatttggctgatgtctggaaaatggattgtaagagtgcgagagtggaagcrgggagaccacagaggtggtttttgtcttgtaggagagagaggatggcagctggactagggcatcggacatggtgatagagaggaagtaggagacagaagtgctgggatgagtgggatgaatggtatcttgactggtggggagggtgtgttgaggagtcaggctttggacttagtaggagggtggatagtggggctgatccccaagagcccagaaaacagggagagcaacaggctttgagggctgatggggcattttgtttgagacttgctgcaaaatgtccacaaggaacatttgagcaagctgttggttgtgcagatcagagttcagactaaggcagtgacttcagcctcaacttatcagcgacaagca

SEQ ID NO: 886015 - DNA, 591 bp, Homo sapiens
gtagacattattatgtaatacacagtcagtggatttccctctgtctgtctctttacccatctccctgtttctcaggttttctcctccaatccccttaccccttccaggacccaggtctaatctgatttgctgtgtgtccttgggcaaaaatctcttccattctctgggcctgctctctccatccagctagaatgcttcaacaaggctgctggggtcccrtctctcccccttcctctcttggctggccttgctaccctgccatctatccccaggctcattttacaggtcagttccctttaatgagcagggctcagagccttttccctcacaaaatggaaactgcgggttcatcaaaatctcattaacctccattctcctggtgggcctgcaggggtcagacctgtctcagggtggcggtgccacctcccagttggcaggctccagggctgtctggggctagcggtgggtggggctactggtttgctggttccagacaatattcatgccacaacatccagtcctgccaaccttggccacctggaaggaagaggagagagggggccttcagcactttaatttgaaaacttgcca

SEQ ID NO: 886016 - DNA, 605 bp, Homo sapiens
gaatatctaagttagagattagaagctgataatatccactattccattttcccattcctaggctaaaacaggacaccgttagaggatgggaaatgacctaaaacctctgactcatagcaggttctcaattctatttttagagtagttggtaataacagtgcaagtgtaaattctgtggcaaagtgaaagtacaaacaactttactatagcttaggaaaaaaaacaggtctgcactagctacaatgtgagagaggttaaatagaggatagagataaaattgtcactgatactccgaataggaaggaaggttttgatttcacrgaaggggactgggaattgagaagactccactggtgaccctaaagagtacatatataaaaggaagaagaatgtatttgtggtagacagagaagtttgatgcatttgctcttaatttctagtgactatgttcaactgccttgtaaattagaaatttaagggtttttgactgtcatacttgaaatttcttaaaaaagtaaatcagtgataaattcacaactcctaaaatgttagtggttctgataaaagtagtttatgttgattcatgagttgatctgtgtgcctgg

SEQ ID NO: 886017 - DNA, 567 bp, Homo sapiens
gcagctttttaaattgttcacagtcccatttattaccctacattggaaaattaattgagtcatatttgaatacttactcactccagtttgcatgcagattgttgaaaattctctttacatctacaagaaactaacaccattcttgtgtttgccatttttccctctttctctctctcttctccttctgtctctcatacttttctggtgcctgtacttctgtgcccatttttctctgcactgaaataataaatgcttctgtagttttcaaagctctacaggtgattctgatactcagacaacgtgtataacccttagattaatctgttaaccaggcttagtgttaaccaggcttacggatgatatattctattagrtgtagtaagacatgtatgttcttttaatcacatatttaattgtatttttatctccaattgtatcttgttgaaatctattagctgtaagagcgatactcccttatgtattaattcataaattcagttgattgtgtatctactatttattaaacactatgatactatactccatgtcccttctattattagctct

SEQ ID NO: 886018 - DNA, 618 bp, Homo sapiens
cttggacttgtgaatgccactgccttctgaatagtcaattgcatgttacaggcccctgagtctgaatatttccaaaatgaaacttttcatcttgagtctctaaatctatttttactcttgtgatcaattaaagtagcaccaacccagtctcccatgtcagaactcaaggtatcttccactctgacatttctcaaatcaatctgtcctcagttcttgtctattrtaactccacactacctcttaaagttgtccatttatctatcccatacatagtttcttccagagtactggccaccatcatctcttttctgtctccttaataataatgttcagctctcagattaagctccatttcttattcactgtgttactagtaaagctctactgtcttgatcttaaacaactaccaaacttcttcaggtctctgttttctgtttcgcttaaagtgaaaagtaatcatagccaatgaaattagtttattacaagtgaaaaattttgtaatgtgccacataagatatactttataaatggtatttcccttacctataaagctgttccctgtgacagggattataagaaaatcatatagacaaactgcagtgtggtgtttggttcata

SEQ ID NO: 886019 - DNA, 618 bp, Homo sapiens
cttggacttgtgaatgccactgccttctgaatagtcaattgcatgttacaggcccctgagtctgaatatttccaaaatgaaacttttcatcttgagtctctaaatctatttttactcttgtgatcaattaaagtagcaccaacccagtctcccatgtcagaactcaaggtatcttccactctgacatttctcaaatcaatctgtcctcagttcttgtctattataactccacactacctcttaaagttgtccatttatctatcccatacatagtttcttccagagtactggccaccatcatctcttttctgtctccttaataataatgttcagctctcagattaagctccatttcttattcactgtgttactagtaaagctctactgtcttgatcttaaacaactaccaaacttcttcaggtctctgttttctgtttcgcttaaagtgaaaagtaatcatagccaatgaaatyagtttattacaagtgaaaaattttgtaatgtgccacataagatatactttataaatggtatttcccttacctataaagctgttccctgtgacagggattataagaaaatcatatagacaaactgcagtgtggtgtttggttcata

SEQ ID NO: 886020 - DNA, 607 bp, Homo sapiens
acatacagtgtaccatgaatgctgccttcaggactgatagagggcagtggccttgcttaccttctccactgatgcaggaatactccatcctttgggttcccatagcaatttgtatatagttcagcttgattatttttaaattctgctgtattactacttgtttaaaaatttgcrgccgggcacggtggctcatgcctgtaatcccagcactttgggagactgaggcaggtggatcgtgaggtcaggagatcgagaccatcctggctaacacagtgaaaccccgtctcatctaaaaatacaaaaaaaagtagccgggtgtggtggcgggcacctgtagtcccagctactcaggaggctgaggtaggagaatggcgtgaacctgggagggggagcttgcgtcactgcactccagcctgggtgacagtgcgaaactctgtcaaaaaaaaaaaaaaaattgcctgattttcttaagctttttggagcagccactgagacattacactcttttattcttcatactgcatagcacgaggcctggaaaatagttgtgaaataaatccttaacttcagattaaagcgatgaagaaagtttgaactttgatcagcc

SEQ ID NO: 886021 - DNA, 567 bp, Homo sapiens
gcagctttttaaattgttcacagtcccatttattaccctacattggaaaattaattgagtcatatttgaatacttactcactccagtttgcatgcagattgttgaaaattctctttacatctacaagaaactaacaccattcttgtgtttgccatytttccctctttctctctctcttctccttctgtctctcatacttttctggtgcctgtacttctgtgcccatttttctctgcactgaaataataaatgcttctgtagttttcaaagctctacaggtgattctgatactcagacaacgtgtataacccttagattaatctgttaaccaggcttagtgttaaccaggcttacggatgatatattctattaggtgtagtaagacatgtatgttcttttaatcacatatttaattgtatttttatctccaattgtatcttgttgaaatctattagctgtaagagcgatactcccttatgtattaattcataaattcagttgattgtgtatctactatttattaaacactatgatactatactccatgtcccttctattattagctct

SEQ ID NO: 886022 - DNA, 647 bp, Homo sapiens
aattatacaactgtttgagaagccttattaaatttgctgtctctcatgggacttaacagatacttaataaaatattagggtaattaacaagaaaaagaaaaaaaaataggaaaggcaaaagggagtcaatggactcactccagaaaggtgatgagtttaaaagaaagttttgtacagtgctatcaaaggtagagtgagccaaagggaacccttactggttccccaacataaaaggccctgcaccagtwttcagcgtatgcctcagattggggaaattttaaagacatcaaaagccaaaggttataatgaaaaatctgacatttcctgaggcaatgttgaggcaagataaaaattgacaaaagagcctgggtctcttggctcaactctgttcttggaaccctgatatttttccaccaggaaaggtaaaatggtctgagggtagaaaagaaaagctcctgggaccagaatatcaaaatgtacaggttattacagattatgaaatttgagatgtttaaacaggctttatgtaaggtaggcgtgactcttttacctaaatgtcttatgaaaattggtattgtatctaactgggggatgtgtcccgtgtctagtactataaaactgaaggcatataaatctgccctttgaga

SEQ ID NO: 886023 - DNA, 769 bp, Homo sapiens
cctattctctctgatgcctgctatttggagggttcatctgcatgataaaaccttgatctccacaaacctttatcatgacccagacaatcctttctgttgataataactcaaccaattgccaataagaaaagtattaaacctacctatgacctggaagtccccacttctagcagtcccatctttccagattgaaccaatgtacattttacatgtatttgattgatgtctcacatctccctaaaatgtataaaactaggctgtgtcccaactaccttgggcacatgttctcagggtctcctgtgggctgtgtcatgggccattaattactcatatttggctcagaataaatctcttcaaatattttacataatttgactcttttggttgatgccacaattagagcatatattttgatattgtgaaagaactttgtacaccatccatgatagmcagttttcattttataaatataggaattgaaaatgtcagggcttagaaaataatacccaaaaatatgatgctttgacatactgatctagagaatcagccccaatgtctctcacacaatgaggttgttctctgaagtccctttatctacctagaagcctgaccaggcaaagagtaacacaattgcttttgatcccctccctgaaatgtcattaatcagaaaatattaaaattggtattacaaaggaagagactgaaaattaaaaaccacacatagagacaagaggaacttcaaactttgtcccaaaccattgtttgttct

SEQ ID NO: 886024 - DNA, 623 bp, Homo sapiens
gagtttcctttagcacaccattctacggagtgatcagcaagttgattacactagtcagcttccgttatggaagagacagcattttgttcttactggaatagatacttactctagatattgatttgtgttttttcaggcaatgtttctgcaaaaactgccatttgtgtacttataaaatgccttctctaccattatggtattccacacaacatggcttctgatcaaagaattcataatacaacaaaataagtgcaacaataagcccatgctcatgtaactcagtggtctaaattctattggttctgtttgtccaaagaaccctgagtaatacatctagtaaatgattttttcatcacctgttagtaaagaccacaagaagtagtttacaatatacctaaactrtctgatatgggctggattgtgttttcccaaaatttatatgttgaagccctgatcccccagtacctcagagtgtgactatatttggatatagggtttatgaaagtaaaatgaggtcattggagttggctctaatcccatctgactggtgtccttatgagaagaggaaatttggatacaataatagacatcaagaatgcacacacacagaaataaaggccatg

SEQ ID NO: 886025 - DNA, 654 bp, Homo sapiens
aagtgcaacaataagcccatgctcatgtaactcagtggtctaaattctattggttctgtttgtccaaagaaccctgagtaatacatctagtaaatgattttttcatcacctgttagtaaagaccacaagaagtagtttacaatatacctaaactatctgatatgggctggattgtgttttcccaaaatttatatgttgaagccctgatcccccagtacctcagagtgtgactatatttggatatagggtttatgaaagtaaaatgaggtcattggagttggctctaatcccatctgactggtgtccttatgagaagaggaaatttggatacaataatagacatcaagaatgcacacacacagaaataaaggccatgtaagtacacagcaaaaatgcaacaatttgcaagccaagaagaaaggccttagarcaaagcaaacccactgacaccttgatcctgggtatttagcatccagaactatgagaaagtacatattttttggtttaagccatccagtttctgttgttttgttatggaagccctatcaagctaatatactgttctacctcagggtatatctactctccaggtctatatcataacttagtcctcagagaccttgatcacatttcccttccagaagacagtgctga

SEQ ID NO: 886026 - DNA, 686 bp, Homo sapiens
ttgtatatttaaattgcttttttctatttatcccaaatttgtctttcaaatactttatctctatctgacaacctctaacccaaatctctccaaggctgttaacttggattttaatatgtgaaacttattttaactttcaaagtgggtagggactgagggaaattaaaatattttatctctgaaatatattcatctgatgcatttgaaaatgccacttggccgtcctaacagaagtggccttgcaaagctgtcataagtgggaacaatttgcatctgtagagaatttccattaatgcagccatgccctctcccctttctatgccagatccagaagagattgagagtctgacacctttaaaagtctaaaaatagacatttaccatctattctttctaagggtggcttcatcaatataacaagaccaccgytgcttgccaagcctcttctcccctgcccatagcctactttattaaaatctaagcccccattctttctgtaacctcaaaattatataggtttctctcaatcattgggaagttgagtcttcattctgaaggctaccgtgtacacatgttaaatacatttgtatgccctttttcctattaaaaaaggataacggaagtaaaatatttcctctaaagataaggtaatatcaaagcttctcacatcaattgtgcttcttaact

SEQ ID NO: 886027 - DNA, 649 bp, Homo sapiens
ataaattgaaaccctactaaattgttacttcatctgtataagcagaaaagttctaggtcaaattaacaaaattctaacttaaacaataaaaatagcgagttgcaacacctgaatcaattcctagacttgaaccagtttataggcttagtatccctcgattaaagagaggccagatctcttaaaggaagaactctggtacactaccaaaaacatacagcattgagttttttccccagccttccccaaatggatctatggcattttactagggtaaatgtgctttggcaaaaaggaggtaatgaaaacttcaagagttactggaaactgtctctgaactgacactaactccaagatacaccaaatgtcactgtagcccagcagtcagagtcagggcttattgcggtaagatgatcaatgttttagcacaggtttatctcacagtgggcctagtggttccccaaacccatcctgtggttatttcctcagctgcagaattcataaytggaacatatacacttagcagctgaaataattcccatactggttccctgacctgtagcatcaaggccattatggtaggaaaggccaagtggaagccactaaaactacctctacctaagaaagtagtaattcaaaagcaataccacat

SEQ ID NO: 886028 - DNA, 654 bp, Homo sapiens
aaatgtaagtaaagaacaaagttacagtgtgttgcccattgtttaaaagaaagaatgtaaggagatacatttgtattttcttgcttatacataattaaactcaaatatacatatatatataaaacaaagaaattagaatataatttctaaaaaattgaataaatcactgatttctacataagaaacagtaattacatttggtaatgtgatgggaattgggcaaatgaggcacaagggtggaagaggtattattaatggatagtttaattttcgaccatgcgattgaagccctgttacacggtgaattgtgtcctcatayacagcccccgaccccacaaaaaaaagatatgttgacatgttaattcttcagaatgtgatgttatttggaactaaggttcctgcagacatagttcattaaaatgaggtcatactggagtagggtggtatcataatcccatatgactgctgttcttatacaaagaggagaagagacacagacacaaggggagaataccatgaccacagaggcagagattagagttttgctgtcagaagccagaaggcaaggaatgcccgggactaccagaaactagaggaagcaaaaaaaaaaaaaaaaaaaaaaaaaaaaaaaatcactcctacttacagccctca

SEQ ID NO: 886029 - DNA, 662 bp, Homo sapiens
gccaaaatacatttttaaaaacataaataagaaaaaaacctcagtgctaaaacagttaatgtcattggggagccagagagactcacttccaactgcctcagattaacgccaatgttgtttcccttgtacacataacaaaaaacttcctttttcattcctcagtctagtctccagttaatcctgaaattgcatgcaacccaacgtgaatcaaataaaaaaggaaaacagtaattatgctgaatcagacattttatatttatatgttctaaccagagactgarctgcataagccagaactttaactaaattcttttttgaacatgtccagaagatacctcctgtaaactacttgggacaatttctacagtgataggccctgtggctcaattcgaccctccccaagtgaaacacagagccaaattgatgattccaacaaaacaggagatcacagattcattgcaaaatccaacacattacttacggtggggaaggcggaatacaaatcttaaagacacatgctgtgtgtcatatataatcaactcactattagaaagtattgctacctctccaacacacatacacacgtactttttttccacgtagtcataacagcttataggagtcctggaatcctttgtgcatgtacatatgtatgtgtgtgt

SEQ ID NO: 886030 - DNA, 666 bp, Homo sapiens
atttgggccctcaatggattggatggtgcccagccccactgggtgaaggtggatcttccagactcagtccatgattcaaatgccaatctcttctggaaacaccctcatagacacacccagaaataatgcgttaccagctatctggacatcccttaatccagtctagttgacttataaaattaaccatcayggacctgatatctctctctctctctctttcataaacatttactcattttggttgaaacctgtcaaaagtgagatttttctctaatttttgccaattagaaagacaagtgggggtgatgtggagtcacaaacctaggatctgatctaaacattggaccaaccagcgtatggacaaccttccattacatcatatcgtgatgcattctgggctagactgcagctgagttggaataaattgttcctcagcactgctctggcttagaacagtgggcctagaatgaggatgagtaaaaacagcggtgagcttttgttgagctcaatgagggaagaaactttttgtgtttgtaagttctaggagaactgagcagctggaccccactctaaacttaaccagccaaaatcttcaagaagttcaaggaggccataagcttaagatgtgtgtagcgagtggccgggcgcttctcccccattttgcga

SEQ ID NO: 886031 - DNA, 636 bp, Homo sapiens
tttctgtaagtaactacacaatcagttgctctcaaatttagcatgaggaaggaaacacatctattcagtcaaacttatacatccctttgaaggcaacaggtaatgagaaccatatatcctagtgtacttggcactttttccttggctgccaggaagctcagaactaaatttgctttgcgaatgtggtaactgccttactcagttgctctttgttctttctcattgactccctatctttttttttwtaaaaaaaattcttttaaaaatttattatttttagtatgtttaaataacataatctgccttagatacttctgggaaatagactgtatgtataatatgattacatattaaatgaaataatttcctcctccctgggcaggcagcccttactgtgcttttccaggcagccagaaatcctctctttggtcccgttggccctggctcatgtcgagttgggatgcccagcctgcctctccatcagttcatcccgccaacctccttagtgagatacactcgctctgagcccatccgcctctgttcgctggcctttttggcttgagatgttttctatcttttctatatttcaaagctttgtggtaaataatcaattcaaaccagcaccgagtctctctt

SEQ ID NO: 886032 - DNA, 636 bp, Homo sapiens
tttctgtaagtaactacacaatcagttgctctcaaatttagcatgaggaaggaaacacatctattcagtcaaacttatacatccctttgaaggcaacaggtaatgagaaccatatatcctagtgtacttggcactttttccttggctgccaggaagctcagaactaaatttgctttgcgaatgtggtaactgccttactcagttgctctttgttctttctcattgactccctatcttttttttttwaaaaaaaattcttttaaaaatttattatttttagtatgtttaaataacataatctgccttagatacttctgggaaatagactgtatgtataatatgattacatattaaatgaaataatttcctcctccctgggcaggcagcccttactgtgcttttccaggcagccagaaatcctctctttggtcccgttggccctggctcatgtcgagttgggatgcccagcctgcctctccatcagttcatcccgccaacctccttagtgagatacactcgctctgagcccatccgcctctgttcgctggcctttttggcttgagatgttttctatcttttctatatttcaaagctttgtggtaaataatcaattcaaaccagcaccgagtctctctt

SEQ ID NO: 886033 - DNA, 623 bp, Homo sapiens
acatagccacatctattcatatatgtattatmtgtgtctgtttttgcactacaatggcagagttgaatagcggtgacagattttatgatcaacaaagtctaaaatatttactatttgtctctttacagaaaaagattgcctacttctctgctgtgttaaatatattttttctatttcattgatttttgtcctgatccttatcattgctcttttatacttcctttgagtttaatttgctattttctttcaggcttcttgcttgagattgagccttagatcattgatttccatccttagatttttattcaaccattatgtgttctctgagcgcagattaactgcattctataagtttttatactcatattttcattatcattgtttaaaatttttttcttattttcattttaatttcttatttagttcatagattatttacatcttcatctgtttgtgttgctataaaggaatacctgagctgggtaatttgtaaagaaaagaggtttatttggttcatggatcgcaggctgtacaagaatcatggagccagcatgtgcttttggtgagggctacaggctacttccactcatggcagaaagggaaggggagctgatgtgtgcaga

SEQ ID NO: 886034 - DNA, 623 bp, Homo sapiens
acatagccacatctattcatatatgtattatctgtgtctgtttttgcactacaatggcagagttgaatagcggtgacagattttatgatcaacaaagtctaaaatatttactatttgtctctttacagaaaaagattgcctacttctctgctgtgttaaatatattttttctatttcattgatttttgtcctgatccttatcattgctcttttatacttcctttgagtttaatttgctattttctttcaggcttcttgcttgagattgakccttagatcattgatttccatccttagatttttattcaaccattatgtgttctctgagcgcagattaactgcattctataagtttttatactcatattttcattatcattgtttaaaatttttttcttattttcattttaatttcttatttagttcatagattatttacatcttcatctgtttgtgttgctataaaggaatacctgagctgggtaatttgtaaagaaaagaggtttatttggttcatggatcgcaggctgtacaagaatcatggagccagcatgtgcttttggtgagggctacaggctacttccactcatggcagaaagggaaggggagctgatgtgtgcaga

SEQ ID NO: 886035 - DNA, 625 bp, Homo sapiens
tttgataggaatagcattgaatttctaaattggtttgggtagtatggccattttaataatattgattcttcctatccatgagcatggaatgtttttccatttgtgtcatctctaatttctttgagcagtgttttgtaattctcattgtagagatctatcacctggttagctgtattcctggttattttattctttttgcggtaattgtgaatgagattgtgttcctgatttgactctcagcttgtgttttgttggtgtataagaatgctagtaagttttgtacgttgatttttgtatcctgaaattttgctgaagttgtttatcarctgaaggagcttttgggccaagactattgggttttctaggtatagagtcatgtcacctgcaaacagggatggtttgacttcctctcttcctatttggatgctctttatttctttctcctgcctgattactctggccaggacttctagtactacgttgaataggagtggtgagagagggcatccttttcttgtgcccgttttcaaggggaatgcttccaggttttgcccattcagtatgatgttagctgtgggtttgtcatagatggctgttattattttgaggtatgttccttcaatac

SEQ ID NO: 886036 - DNA, 584 bp, Homo sapiens
caaaatctggattactctaaacttgcaagatagaatgatgaattaattcttaaatattgtgtttgcatcaagtttgattttggtttaaggatagttttcatacctagaataaaaaacatttcctcctcaagtggaacatcactccttggttttagccatctttcatcagaatggaactaaaattaaaaaaatgaagttgctctatgatatgatcgtgacaaattttaacagtaatttttttcatatttaaaacttgataaaacttttttctgactgattttgaccatttaaaaagaaagccagatgttctctcatcattcatggcagaaaaaggtttttgtttattacattattayatgaaaatttatgcttatacaattgggaaagtttcaaaaatttaaaggtttgaatatgatacattgcaataattgtgacttaaaattttgtaatgaccaggtgacaccttttatgggaaagtgagaataaattctgatccctattatgcagggaaacagaagagagcattgtttttcatcagggtgaagttggggcaaataggaggggtgaatgatgaggcagacaga

SEQ ID NO: 886037 - DNA, 577 bp, Homo sapiens
agagaaagtgtttattacactaccaggaaagtcctcaattaaagtgcagtacgattgttatcgttcattgatgctaattgatcataaatagagtaattatatgccaagtttgcgtgtgacatttcagctttaaacttgtggtctcaacttagttatcaatagcatcccttttccttcacaaaatgttcccacackctaccttaacgataaggaacaagacaagaaggcaattgttagaactcagtcatcatattagtataggcagaaaagatgatttacagtaaaacatctgcctcagcttgttaaatcctgactgcctaaggaacagggttggtgctagaaccagtgacacgactgagtttctgcaacaagccaagggtatcaaaaagccatgagtatatgacttcagagagatgtgatatttttcgtctccttgaacatttttttcttcaccctccctaatccagagagaaagtggggattagagagctaactctgctgccatttgattatttcaagtaggtatttttgtctgtctacctagaaagaacaaagtcaaatccttttgatatcgaat

SEQ ID NO: 886038 - DNA, 630 bp, Homo sapiens
cccaggcaaaaataactatagtaatagaacatttgatgacatttattgaactcctacatgccacacactattctaagtgttttatatatctcatttaattatcttaacagtcctatacagaggtactcttaactgctaaattttaaaaatgaaaatattaaggataagagaggttatacttgcctccaggtccacagactgttaagttgtggagcataatgtttatgaacacacaaatacaagttctagaatcagagaaactgtactcaaaacttagttctaggccaggcacggtggctcacgcctgtaatcccagtactctgggaggctgaggcgggcagatcacgaggtcarcagttcaagaccagcctggccaacatagtgaaaccccaattcttaaaaatccaaaaaaattcagctgggtgtggtggcgggtgcctgtagtcccagctacttgggaggctgaggcaggagaatcgcttgaaccagggaggcagaggttgcattgagccaagatcgcaccactacactccagcctgggcaacagagcgagaccctgtctaaaaaaaaaaaaatcttagttctagtttttactatccatgtgatcttgaatatgctatttaatgtctc

SEQ ID NO: 886039 - DNA, 669 bp, Homo sapiens
cctatcctaagggagctcaccatcaccttaattagatttttgaaaagatacactctaggaaatttggacttgacaccacccactagtgcccagctgctccctactccgtactggggctgggatgcatggcccaaggaacccatacagctggctggctagttcccgaagccacaagccgcaacagccttccccttccccagccaaggagctttactccagcggacagtaattaagcttagacttttctccctggtggaggaagcagttgcataagaataagagactcttccccaggcatttttaaactgtttcttttcttccctcttctcctcttctccaccacatcagtcaacctttaaaggttttttttttgtttgttttgattttttccttttagaggacatttttactgggccaggcccctcaactatcattgtttgtactctgttaagttttggtygtgaaaggatttgtggcgctagtcttgggcggtggccaatctgctgtgctttgcatatctgtatggtttgtgatgcaagcctccatcttgctttacatcgtgggggcacggcccagtaaccacttggcaaggctttgtttagcaaccctgcctgaggggaggagccctctcaggtttgatatctgcatgttttcctagccctgtctctt

SEQ ID NO: 886040 - DNA, 631 bp, Homo sapiens
tcctatgctcaaaatgttgctggaagaattaaataaatgataaaggtgacctacctaaaacaatgtatgaaatatagcctcagtgcataatatcagaatcaaataacttgcagtatgagtattagattagagagatggggagactagctaggctgctattgcagtagttcaactgagaamgtcttaggcacaaactggggcgataggaatggaaaagaggggacacaagtaagcaatgctaatcttgaaagtggacagggagagaagcaggggaacttaggaagggatctaagatgcctgcagtctctcgtgtagatggctgagaatggtgcaaaaaatgaaacagatagagtaggtgcctgtggaggcatggtgtgcgtgcctgcacttagagacaacatctcaaatgactgttcattctatgatattgtcaatacttatttatgttcttctgtcaagctctatagttggaacatggcatcactatatccttggccaactcctgttggtgagtcctctttggaaatttctagtgagagtgtgatatgagacaaatatccatttttttccccatggttcattttttccttaccttttcctttatttgcctcttcttgtcatcataaggtta

SEQ ID NO: 886041 - DNA, 619 bp, Homo sapiens
attaaactttgaaaagagaagggcttaagaagagataaaactgaaaatgtacaaagaaatgtcaaaaggttattttttgtattagctttaaaactgttggttgaagaaaagttgggaaaatgaaaaaccttattaaacagttacctaaaaatataaaataagtcctagggaatagttaccagaaaggggaagttctgtgactgaggaatgatttaatataataatatagctgaatcaaaggatcagagaggaggctggttggaaataagagtaattctctggaacatgttgacctacctgttggaggatgggaacgacctgtgaggatgggtttggttttaaaactgtttttccagtaatgaagtcctaatttgcatggctgcatcgtcaatttccatatctctggttagaaaactaaaaaggcacagaactcgaagatgtaatggtgcatacgatttgaaatctcatacacrcagggcacagccaaaacctactttttcttttagggaggctgtatattcaacctaaaccctcattaggaaagtttaactatgaatgctaacccaggggtccctggcaatgctgccaccaggagtctgcaagtgtctcaggttataat

SEQ ID NO: 886042 - DNA, 639 bp, Homo sapiens
tttgttaagattaaagcaataccttaagaaaatttcaggccgggcgtggtggctcacgcctgtaatcccagcactttgggaggccgaggcgggcggatcacgaggtcaggagatcgagaccatcctggctaacacggtgaaaccccgtctctactaaaaatacaaaaaattagccgggcatggtagcgggcgcctgtagtcccagctactcgggaggctgaggcaggagaatggcgtgaacccgggaggcggagsttgcagtgagccgagatcgcgccactgcactccagcctgggcgacagagcaagactccgtctcaaaaaaaaaaaaaaaaaaaaagaaaatttcatagtttgaacgaattctttagtgtataagtggttttttactaaccaaaacccaacctctagaaagaccattgtaatttccctttaattatagacaacttgatcacataaaagctttttttcaaaaattattttattatgacttacacaaaccattcatggtatgcgtggactttctggtttgacctaaacatccttgtttcttaaacaaccagttgtttttgtctaggaaaaaatttaccatacaagattccttctcataaaaaaattatttttctttaagctttcttgc

SEQ ID NO: 886043 - DNA, 652 bp, Homo sapiens
cattttacacatggggaaactgagactaagagaataataagtggttgagtgacttgtccaagggcacatatctgctaagtgaacaggtccagaacttgragtgtctgacttacggtataaactgtgctactttctcgtcccctggaagcgctgagccttcacacactatctatggaagaaagtctcattgcctctcacatttacattgtgagctcctctaaacaggaatcatctgtccaagagttctgtatatgtccatagcccagatactgaaaatgtcttaatttgctctgtctccaaccccctttctctctcatcccaatacataatcatcaatggtctgggatctttgaaatttgtcacacaacctctgattcaaaatacttccagtcctttggacctcctataaaagaggtctccatctggaaaggactttgtgtcatttctgttttttctcatcaaacatccagaggacccctagtgtaagtaatgccctgagtcaagggactaagtgtctatgggtattgtcatgaaaggaagaccttcctggactacctagataacacacttttctcccaataccttctctctcattcataattgacctttggatttattttctgccttagcttcatacctttgaggtctccac

SEQ ID NO: 886044 - DNA, 652 bp, Homo sapiens
cattttacacatggggaaactgagactaagagaataataagtggttgagtgacttgtccaagggcacatatctgctaagtgaacaggtccagaacttgaagtgtctgacttacggtataaactgtgctactttctcgtcccctggaagcgctgagccttcacacactatctatggaagaaagtctcattgcctctcacatttacrttgtgagctcctctaaacaggaatcatctgtccaagagttctgtatatgtccatagcccagatactgaaaatgtcttaatttgctctgtctccaaccccctttctctctcatcccaatacataatcatcaatggtctgggatctttgaaatttgtcacacaacctctgattcaaaatacttccagtcctttggacctcctataaaagaggtctccatctggaaaggactttgtgtcatttctgttttttctcatcaaacatccagaggacccctagtgtaagtaatgccctgagtcaagggactaagtgtctatgggtattgtcatgaaaggaagaccttcctggactacctagataacacacttttctcccaataccttctctctcattcataattgacctttggatttattttctgccttagcttcatacctttgaggtctccac

SEQ ID NO: 886045 - DNA, 680 bp, Homo sapiens
ccccacttcttgctatctcttttgcctaataaatgtgaagggctctaaagctcaggccccctgtttaccagaagcaaggagccccctgaccccttctttcaaatatgctctcttgtctttgtcttttattcccatgtttgccccctttgttcagtcccccaaggtctgtgcaggtgacaagtggcgacccagaacagggactccaaggatgtcrgacacgtggcatctgaacacagggactttgaagacgtgaatgaagaagctctgctggagcagaggaattgaaattgacaagatgaacggggaccccaggatgagtctgctggcagcagatagaaggtcagtgccctaaagaggtactgggaacgatataaggtcagtgctctaaagaagtacttggaatgggaagttttctgaatcagggtaacatgaagcagaatttgtctattgaagaaaaacatcatgtgcagttgcttaaagttctgttgagacagtctggagctcaggttaattcgcaggcactaactaacctcctgcagaagccacaaaaggttattacgcataacccatggtttccacaggcaggcactcttgatgtggaaaattgggatagaccaggagaaggattaaaacaggctcatcaaaaaggtcctaaagttgattcttctgttttctccact

SEQ ID NO: 886046 - DNA, 568 bp, Homo sapiens
ccacaaagaaacagggaatgccaatatagatcttgtagcctttaaaaagataataaggaaatactgtaaatacattgatgctcataaatttgataacttagaagaaatgaaacaattcctaaaaaataaaaaaaaacttccaaaacccaaccaggatgaaacagatagtttggtcagtcctaaaatcattaaaatggccaggcacggtggttcatgcctgtaatcccagcactttgggaggctgaggctggtggatcacctgaggtcaggagtttgagaccagcctggccaacctggtgaaaccctgtctctactaaaaattcaaaaattagctgggcatggtggcagatgcctgtaatcccactactcaggaggctgaggtaggagmatcacttgaacctgggaggtggaggttgggagccaagatcgtgccattacactccagcctgggtgacaaagcgagactctgtctcaaaaaaaaaaaaaattcattaaaataactgaattcataattaaaatgctccaagctggataattctaccaaacatttgaaaaacacaacaccaat

SEQ ID NO: 886047 - DNA, 568 bp, Homo sapiens
ccacaaagaaacagggaatgccaatatagatcttgtagcctttaaaaagataataaggaaatactgtaaatacattgatgctcataaatttgataacttagaagaaatgaaacaattcctaaaaaataaaaaaaaacttccaaaacccaaccaggatgaaacagatagtttggtcagtcctaaaatcattaaaatggccaggcacggtggttcatgcctgtaatcccagcactttgggaggctgaggctggtggatcacctgaggtcaggagtttgagaccagcctggccaacctggtgaaaccctgtctctactaaaaattcaaaaattagctgggcatggtggcagatgcctgtaatcccactactcaggaggctgaggtaggagaatcacttgaacctgggaggtggaggttgggagccaagatcgygccattacactccagcctgggtgacaaagcgagactctgtctcaaaaaaaaaaaaaattcattaaaataactgaattcataattaaaatgctccaagctggataattctaccaaacatttgaaaaacacaacaccaat

SEQ ID NO: 886048 - DNA, 605 bp, Homo sapiens
attgtgaggccagcctcagttttcccatcccagaaggggaagatgcccttagaagttgcccctgcccttctggagaccctcttgagactgcaagattggcctcaaggaagaggtcatcaggtctttgccaattggtccctggggcccagagaggggcagaaactagcccaaagtcacacagggatgcttggctgacccagaattggggcaggctttggaatccccacccagtgctctttttgctgcctcaggctgcacttatgctacccccttccacttggaaagccaaggagatgaamaagaagccactgagtctaggggtgatggtggaggatgtgctggaggctgggaaagagagtagtgaggatgctgccagggagctgaggagccagggaggggagggctgtcttagttatgtcaggttggggtctgccacgcacctgtcatctcagtctcatgctctcatcttgaaggaacagcacccagattttcctttagggagtcccctcccaactgcccctaagtccactccccatccccagcttcaaggctcagcccatcagtaaacttcatctccctggctacagtgattggtttaggcagcg

SEQ ID NO: 886049 - DNA, 680 bp, Homo sapiens
atgctatcaggggtctgtgaggtcaaaactcttttcctaataatgctaagatgtgtgtaccttttacactctcattctctcaccagtgtatggtgcagctttccaggagctatgtgcatgggatagtgcaacacggtgtatgcagatgtgtatgcagwagtagtatgaaaatccagctgtctttttttaaagccagacaatgcagggattcacaaaaatgtaaaacaatgtactcttcttacgaaatgccttttgtttggaaatatggtcagttttgaaaacagattatatttatgttaacatgtaatgcattcacaattttaaaattaatatttttaacttttctccattttactaacataaatattaatagatacaaacccacttaaaaagctctttcagatcttcaagaatgtttaagcatacaaagaagccccgagaccacaagggtgagaactaccatcctccccgctctccggatgctcccacagcctgggctccccagtgcaggtagggactccccagagcatgagaccacccctgcctctcttggccccatgacccccctcttacctaactgttccttcacccccagagccagcaccaagcaggagatgcagtacagtgtgcccaggaccatggcagccatcacatatgccctccactggggaacaagaagt

SEQ ID NO: 886050 - DNA, 622 bp, Homo sapiens
tattatatgacacccaactccatagtctacagctgagctatccaatatgatatatattagccacatgtggccatttaaattcatatgaaaattaaataaaattaagcattcagtttttcagtctcaatggccacatttcaggtgcttagttgtctcatgtggcaagcagctactgcattagagggcacacatatagaatatttccataattgcagaaaattttattagacagggctgctttagagtcacactttaaatctctgttcattmtttctttgcccacatattaggcaagacttatgtcctaggtaatatcctgaaatttttcaaagacttattttctctaaagtgatatgcaccatattttgaaaacagtaatgtatttccttttttttgtaaaacatattgcatgtaaaaatacctattgtatgcaaaatacaaatttgtaatttgttatggtggctcagaagtggctaatggtgaagattaaagaaaaaaacattaagccgtaaattctatgaggactgagatcttgatttttttgtttatcataatccaaggacctaaccaagttacttaaatttagtaaatagcccatattttgagtgaatgaataaatgta

SEQ ID NO: 886051 - DNA, 655 bp, Homo sapiens
ttgtaatcttaatgtttgtaaggtatgaagagaaaatgtgtctaatgacacctgaagtcttgccaggtgtgaataattacagttaaggtgctatggatattatttggtaacaacatatattatagaaattgcaattctttgtattgagtattataccaaatgtgaagattggggaaatgtggagaggaaaaataataatcagatcatcccttttattttcaggaatgcaccatatgtcctcatctgaaagtctctgcaggatggtctgactcacgcgagtggttttgagataagttgtgttatacctcaagttaggtaaagtcgagagatgaactaacttaaaaagtagtgatgtttacatagaatctaaattggaaaagacaataatatcagcattagaaagtttgcctttaagtaaaaaaaattattagccataataggttttacattcttcgtaatagaatatcctaaagcaataaaacctccactatgtgaactctaagttctgaayatccgaatttttcaaatagttctgagttatatttaatttgttctttactgactagaacacttcctaatttatcacatcatttttaacctcctcaaacatactgaatatattttttccaggtttattgaggtataattgacaaac

SEQ ID NO: 886052 - DNA, 644 bp, Homo sapiens
atagatttcatctaatctaattcaagcctttgcgcctctcctcttttaaggaagaagcaactgagggatggctagggagggtcataaagcaagtaatgacaaaattaagctaggatacaaatcttttacctgcttatctagtacttttaaccactgccccatgcaccgactggaggtgagttggggtaggggctctgaaaggtttcagagaggtggttacagctctcactgtggtgactgacaactgacccaatggacaggcagtttccttttaagtgacttggtagaaggcctgacatcatcttgcaattgaatgaggggctaagaaccctgctgaaatatatacatatagagagagccgggtgacatctcatatgtacatattggcaggtagwgatggagagatcaacctgagaacaaggtcctgctggaatgagaaagcatggcaaagatgagaggtttggaaaggggccacaggagcattacagtcaatgagactgaaggtccacattagagactggaacaactgaggcacaaatggtgaatgctaccatctgagattcctcagatacattgaggacattctgaatgtgaagggggttgttggaacttggaggcaaaagaggctgctttgctttttaatt

SEQ ID NO: 886053 - DNA, 601 bp, Homo sapiens
acagagaaagctgggcaattggggagtcagatctaggtttgattttccactccttgtcttactatttgtatgaccttgagcaaatggctttcttcaaagtctctccttcctaatccagtgaaaataatgatggggactgcatgacttttgtgaggattgggggtgatagttcacgtgccactgctacatgcttayggtcagtaatagatgagtcaagtgtaaaatgcctgggtaaacaccaacaaccctcatgactttcattgagacaggagttcagagcatggagagatctgtgtgtgtttcataagcccttgccatggagaggtagtaactcagaaagtccattgcatttaggaagttgctttgtgtaagcccaggacattctcttctctgcggctttttgtgggatggtggatatgtaagaattatttgcacattgaatgtgcaatatcaagggttgggcacaaggtggcgcaatggggcaggtttcagcatctttcagaggcgttcccattcagggatgaggagtaaagcattagtggtatttccatatactattttatgtgtgaccccatctgcctgcagtgttagcatcagatgg

SEQ ID NO: 886054 - DNA, 665 bp, Homo sapiens
ttgaggtccttgctgttcctgtgtaggaaagagagcaatgcccttggtcaatcacctaggttcctcctagaagcatctggaggctgcctgggacaagtctgcccagcaaagcctcacaggcaaccctgcacgccctcatctctgtggcgactcaatggaaagacagagtttccaaatacaaagcaagacctattgacagaggcatcaggccaaagccagcagccaccgagcagactgtggaggaggtgactggtcccagggacaccccaccacgaggccacatttttggaatctctgtacacaaactctaatttatagctgtctgggattatcctcccagacagaatacatttgtccagttctggcacagatgtgtttgatgcataatggaaaattaaaagagaggttgcaatttaaagccatygggcaatgggaaaaaatctgcgcttgctcatccatgcccctaacccccaaccacacgggtttcctcctgggtcaaggaaactgtggcttagctgaatgtcatcactgtgtggaagggaatcctcccagcaggctgctgccggctgtgtcagggatgctgtgggtaaggacccggccagggttgatgctgcttgtgacaagagacagggcgatcactgctctggaaagtggcatcggcacag

SEQ ID NO: 886055 - DNA, 563 bp, Homo sapiens
tgatgataacaagaaaggcattacctgacaggcacatgaggaacaagatgtactcctcgtttcttagaaacaccgatggcaaaaatgtgagaatgggaactgcaggaaagagatgcatatgtgaaaaataatgacagaggcttaaggactgatagcaaggtgaaagagattcctgtaaacatgcaaatccctagaagagtaaggactgagctccacatataagattgtagcaagaattcatgwaattacttctaagcctccattttgcatttcttatagtatcacaggtttcatttttatttttggcatttctaataaagttaactaagtgccaagttcatgaagttgattaaataatatgatagagagagagagagtaagatcagacagaaaagattcaagcattgggagtctcttcctgggttgctccagagagtcatgggttttttttgtttgttttttgttttttgttttgagatgaggttagcagctctaatgttacactgcatggttcatagttgcaaacttgaaagccaggatgcaagtagcagctgcattcttgg

SEQ ID NO: 886056 - DNA, 612 bp, Homo sapiens
atattatatagttaaaataggctgttttaggctgataacaacttaaatttgattgcataaaaggactctatactttcacttgacctcccatatcattttattttttattttttattttttttcagatggaatcttgctctygtcgcctaggctggagtgcaatggcataatctcggctcactgcaacctccgcctcccaggttcaaacgattctcctgcctcagcctcctgagtagctgggattacaggcacctgccaccatgcccagctaatttttgtattattagtagagacagggtttcaccatgttggccaggctggtctccaactcctgacctcatgatccgcccacctcggcctcccaaagtgctgggattacaggcatgagccaccgcacctggcccattttgtgtttttgaggtcacaatttacacaatttatattgtgcatccactaacaaattattgttactattataatattattttcttttcattttcataatagcaatataactgacttatacaccatcattagagtattagagtattctaaaattgactgtctacttacttcaaaaagtaagttttctttctaggtttccatgttact

SEQ ID NO: 886057 - DNA, 642 bp, Homo sapiens
tatcttggtttcctccaaatttgaaatgggtttagatactaaaaattctcattccccaaaatgaaaaatatctgtttcatggataatcatggaagttgatgttaaaacaacaattagatctcatctactgtagtagcaaaaattaaaagtcttacaacaccaggagctagttgaaatgcagagaaataaggactctaatacatcttttggtgggaatgcaaattttttactaaattttttatttttaatttttgtgggtacatagtaggtgtacatatttgcaagctacacaagatgttttgatataggcatgcaacatgaaataatcacatcatggakaatggaatatcaattcccacaatcatttatcttttgtgttatgcgcctccaataacacacttttagttatttttaaatgtacaattaagttattattgaatatagtctccctgctgtgcagtcaaataataggtcttattcattctttctacattaaccatcctcatttccaccccctcctgcaacctactacccttccaagcttctaataaccatccttctactctctatgtttatgagatcaattgttctgacttacagattccacagataagtgagaacatgtgatatttgtctttctgt

SEQ ID NO: 886058 - DNA, 642 bp, Homo sapiens
tatcttggtttcctccaaatttgaaatgggtttagatactaaaaattctcattccccaaaatgaaaaatatctgtttcatggataatcatggaagttgatgttaaaacaacaattagatctcatctactgtagtagcaaaaattaaaagtcttacaacaccaggagctagttgaaatgcagagaaataaggactctaatacatcttttggtgggaatgcaaattttttactaaattttttatttttaatttttgtgggtacatagtaggtgtacatatttgcaagctacacaagatgttttgatataggcatgcaacatgaaataatcacatcatggagaatggaatatcaattcccacaatcatttatcttttgtgttatgcgcctccaataacacacttttagttatttttaaatgtacaattaagttattattgaatatagtcwccctgctgtgcagtcaaataataggtcttattcattctttctacattaaccatcctcatttccaccccctcctgcaacctactacccttccaagcttctaataaccatccttctactctctatgtttatgagatcaattgttctgacttacagattccacagataagtgagaacatgtgatatttgtctttctgt

SEQ ID NO: 886059 - DNA, 629 bp, Homo sapiens
ctcacagaatagtgtcctggtgggttgaagaatcattacccatgccagcagggtaacacctcacaagatggggtattatcctacagaaagtaataaatactctcaataggggaataatttttggttctgttgctgtcatagccagaataaagcatccagagccaagggatagaagaaagatttgcacttcttgtgcctcacttataacttttgctttccattcctacaatttggggatctgttagtttagtgacttgcrgggaagctacgctttggggaggaatgcttccacgaggggccacaacaaccatcatgctgaactggaccatctggtcatttcagattccttatgcccctgagaaaacaggacaagaaaagaggcagtcaccaaactgaccatagtatatgatcctgattgtcagagaaagataggattgccaacaatgggagcatgcagtagtaagaattaggaaccgcccctcgctcagtggctcctacttctgccatatctagtagtaaaatcagtggaaaacttctgcagccccatacataccaagagctcatatccctcaaaactaaatattggggcaacccaccagggtgaccagtgaagggctggctgaaggcaa

SEQ ID NO: 886060 - DNA, 629 bp, Homo sapiens
ctcacagaatagtgtcctggtgggttgaagaatcattacccatgccagcagggtaacacctcacaagatggggtattatcctacagaaagtaataaatactctcaataggggaataatttttggttctgttgctgtcatagccagaataaagcatccagagccaagggatagaagaaagatttgcacttcttgtgcctcacttataacttttgctttccattcctacaatttggggatctgttagtttagtgacttgcggggaagctacgctttggggaggaatgcttccacgaggggccacaacaaccatcatgctgaactggaccatctggtcatttcagattccttatgcccctgagaaaacaggacaagaaaagaggcagtcaccaaactgaccatrgtatatgatcctgattgtcagagaaagataggattgccaacaatgggagcatgcagtagtaagaattaggaaccgcccctcgctcagtggctcctacttctgccatatctagtagtaaaatcagtggaaaacttctgcagccccatacataccaagagctcatatccctcaaaactaaatattggggcaacccaccagggtgaccagtgaagggctggctgaaggcaa

SEQ ID NO: 886061 - DNA, 632 bp, Homo sapiens
cagagggcctacaacatccttttgaatgcatcttttttggtaaagtaagtcgctaagaccagcccagagtcaaagggtaggggattatattccacctcctgatgtgaggagctgcaggccaaggcatggagggaagagacagggggcagccctcccccaagcctattcaccacaactgttttctatgaagagctctgaaaacattgctacataagacaaaaagcagacctgtgccrcaaattacaagccaacggaggctgagactcccacctctacagtgatcccagcctggctttggtgccctacaggatccaaaaagcacaatcatgtttctatacctggaggaaggctccaggtactaggagaagcaagagtgcctggcagctgtaagatatgacaatacccagtagaaaaagttttcatggtgggccaggccacaaagggaaagcacattcagagacatggaggcctcagagtagacaccactgtaagggccacagctgtggaagtgaaggagatagacaagtagctcctgagttcatctgagaaatctcttagaacttcccagaaataactcagcaggactttgtaagaggagaaggacatgagacctataattccacatagagata

SEQ ID NO: 886062 - DNA, 528 bp, Homo sapiens
ttgtgaccaattaaaacaaactgacaaaaaaaaagggtatcctggagcatacaaattctaaatctaaattgaatggaactcaaagagggcttcacattgaaaataaaaccatgggtatgtaagtgaattgtaacaaagctactacatagcaacattaaggtggcagagcagaaagggggctaagacagctatctgtcattttataccatttttttaagaaaagaaaaactataaaattatgaatttgggttctaattgagatataagacaatgataattgcartaactgttaacatttacagtgcttcagtcctgctattgctcattcatgcctaataagtgaagagctggaactgaaagctttcttatatttattcccattgcagtctccctccagagtgtggattcatgtgtaacaggagggataagtgtttaaagaggtcttttctacattttttacttccataagcagtctctgcagtgtgagttcttgtatgaactatgagtctgaggcaacactgaggcttt

SEQ ID NO: 886063 - DNA, 528 bp, Homo sapiens
ttgtgaccaattaaaacaaactgacaaaaaaaaagggtatcctggagcatacaaattctaaatctaaattgaatggaactcaaagagggcttcacattgaaaataaaaccatgggtatgtaagtgaattgtaacaaagctactacatagcaacattaaggtggcagagcagaaagggggctaagacagctatctgtcattttataccatttttttaagaaaagaaaaactataaaattatgaatttgggttctaattgagatataagacaatgataattgcagyaactgttaacatttacagtgcttcagtcctgctattgctcattcatgcctaataagtgaagagctggaactgaaagctttcttatatttattcccattgcagtctccctccagagtgtggattcatgtgtaacaggagggataagtgtttaaagaggtcttttctacattttttacttccataagcagtctctgcagtgtgagttcttgtatgaactatgagtctgaggcaacactgaggcttt

SEQ ID NO: 886064 - DNA, 528 bp, Homo sapiens
ttgtgaccaattaaaacaaactgacaaaaaaaaagggtatcctggagcatacaaattctaaatctaaattgaatggaactcaaagagggcttcacattgaaaataaaaccatgggtatgtaagtgaattgtaacaaagctactacatagcaacattaaggtggcagagcagaaagggggctaagacagctatctgtcattttataccatttttttaagaaaagaaaaactataaaattatgaatttgggttctaattgagatataagacaatgataattgcagtaactgttaacatttacagtgcttcagtcctgctattgctcattcatgccyaataagtgaagagctggaactgaaagctttcttatatttattcccattgcagtctccctccagagtgtggattcatgtgtaacaggagggataagtgtttaaagaggtcttttctacattttttacttccataagcagtctctgcagtgtgagttcttgtatgaactatgagtctgaggcaacactgaggcttt

SEQ ID NO: 886065 - DNA, 573 bp, Homo sapiens
aaataagtaagagctaggagaccacatgattttctagttttcagcccctattgaagttccctgtagattattttgcttattcccaatgttccaggtgtttctccacattgtaggcttgtccttctacctactcaaggccccagatccagcaaatgtcctcagagatggactcygctgctaatctgtgatcacctaggaaaggcttatttttctctgaaatttagttcattgtaactttaggcccatagtgttttgatggctttaaacaaaaaaaaaattttaagttcatccaatgtcttctcgttatggcaggagcaattgcccttggtaactttattttaattggaagaagaatctctaatgtaggcattgtaatgaggtttttggtctttgaccttactggagcagttaaattcaagtctatttcctatattattcatgtattgaaggatcaaatgagaaaatatatgtagagtgtataaagtgtctaatgtacactactgatatacagttgtattatgactacacactgaaaacacataatcaaccagattgcttcctgagacctagagc

SEQ ID NO: 886066 - DNA, 576 bp, Homo sapiens
atatatttaatttctagtagaagctacttctgtcattgtgaactggttacaaaccttgaatgctctagctattttgaggagcattaataggcattacccaaagaagatgatatattccctagacagcaagaactcttattcctgttaatcttctttttgataaactctacagtctctttgtagtaaatccaggttctgtgggatgtacaaaacaatcccccatamatttaaatttatacctatgatcatgtgtaatgaaattagccctcaagagccaacttgagaccatgttcagaatggaagcttcagaaacctatggcacatgaatataagaccattttagacacagtccccaaattacctctgaattcagtgggaaaaaagtgacaaggaacaatatttagggcatctaggatagtgctaccttctcgtgcctaacataagcaaattaaaacctcatactaatgctctgaagcctaataataactagtaaggttcatgtctgtcaaaaagccactgcaggctactgttaaaaccagctacacaaccatctgaaagccatttgcctccctctag

SEQ ID NO: 886067 - DNA, 549 bp, Homo sapiens
aaatgcctctgcggaaaggtggatccaaagtgggtcttctaagggaagctgcagaatgtttctccctcagcctatagtttgacagaatgctaagatatcaagatgaaactctgaaaacccgaggatttttcatggatttcattattctattgaagacctacaaaaaaaagtggctgataaatatatttttagaaattgctttagtatgatttttattaatttaaattaacatttatttaattaactacataaaatctgtgtataaaagaggcaaaagattattcttgctctcagccagacagttgctgataaggtagtttcgacaggaatctcatagaakaagagggccctgactcaacaaccatcaatatggttggaatgtggtatttgctcttcctggaaacaatgcttctcacttatagagtttatattcaatgtggtgttaatacatagacctcatccaactatctgtctgtgaaatctgagttcctactcaagtcaatatcctgtaatatgctaaacaaaaaacctcctgtattagtttcctga

SEQ ID NO: 886068 - DNA, 549 bp, Homo sapiens
aaatgcctctgcggaaaggtggatccaaagtgggtcttctaagggaagctgcagaatgtttctccctcagcctatagtttgacagaatgctaagatatcaagatgaaactctgaaaacccgaggatttttcatggatttcattattctattgaagacctacaaaaaaaagtggctgataaatatatttttagaaattgctttagtatgatttttattaatttaaattaacatttatttaattaactacataaaatctgtgtataaaagaggcaaaagattattcttgctctcagccagacagttgctgataaggtagtttcgacaggaatctcatagaataagagggccctgactcaacaaccatcaatatggttggaatgtggtatttgctcttcctggaaacaatgcttctcacttatagagtttatattcaatgtggtgttaatacatagacctcatccaactatctstctgtgaaatctgagttcctactcaagtcaatatcctgtaatatgctaaacaaaaaacctcctgtattagtttcctga

SEQ ID NO: 886069 - DNA, 671 bp, Homo sapiens
tttacaatcagagctggtgactaatgagggtgcctctcctgactcctatccctcttgctaaccttcctcagaggagtaaagttcattgaggctgagtatcttccagactcctattttcttccacataaaactatacattttgtgaaaaaattggatcagggattttactctctcaggcattaactagtaattcattcactttaagaaaagtgcaaggagaggggacagaatgaaaattgtaagctaccctttggatgggcttatgaaaggcccatttactcacagactataagaaatggaatgtgyatattaacaaaaagcaaactggaatcagccatgaagttgtgaatgtaggagaggggattctccatcttattttgtttttccttttaacttaagagccaattttgctaaggaagccaaaatccctgtctgtctggcccatcataatcggatgtatgtagaaggtagacagacaaggcacatgacaatggcacagatgccgttgggtttatgtctgtcaaagggggagaaattgttcttttaagatccagattttgaaggcaaataaacaaaaatttcagtcccaaacccacctcctcctcattgtgtggtctctagtaagtttctgaaaatgtttaagcttggctttgtcagctagaaagtggcaa

SEQ ID NO: 886070 - DNA, 671 bp, Homo sapiens
tttacaatcagagctggtgactaatgagggtgcctctcctgactcctatccctcttgctaaccttcctcagaggagtaaagttcattgaggctgagtatcttccagactcctattttcttccacataaaactatacattttgtgaaaaaattggatcagggattttactctctcaggcattaactagtaattcattcactttaagaaaagtgcaaggagaggggacagaatgaaaattgtaagctaccctttggatgggcttatgaaaggcccatttactcacagactataagaaatggaatgtgtatattaacaaaaagcaaactggaatcagccatkaagttgtgaatgtaggagaggggattctccatcttattttgtttttccttttaacttaagagccaattttgctaaggaagccaaaatccctgtctgtctggcccatcataatcggatgtatgtagaaggtagacagacaaggcacatgacaatggcacagatgccgttgggtttatgtctgtcaaagggggagaaattgttcttttaagatccagattttgaaggcaaataaacaaaaatttcagtcccaaacccacctcctcctcattgtgtggtctctagtaagtttctgaaaatgtttaagcttggctttgtcagctagaaagtggcaa

SEQ ID NO: 886071 - DNA, 609 bp, Homo sapiens
ataactggcaaccttctgtgatcttggacagtcattttagctcccatgacctatctcttcctctgtaaactaagagggctcgattagattatctctcagacctctttcacgtataggagtctaaatctaagccaggtgtggtggctcatgcctgtaatcccagcactttgggaggccaaggcggagaatcatttgagctcaggagctcaagaccagtytgggcaacatagcaaagccccatctctaaaaaaaaaaaaaaaaccttaaaaattagccgggcgtggcggcaagttcctgtagtccttggcgggaagcagggcacaaggactgaggtgggagggttgcttgagccagggaggttgccactgcacttcagcctatccaacctgaggcagagcaagaccctgtctcaaaaaaaaaaaaaaaaaaaagtgtaagtctagaaagtagagtaaggttttgaggaatgttttgttgacaacatatttttgcagaaataggtttactttgtaattctgaaggacattttttcataagtatttatcatcattacagattattttgtcttctgtgagatacattcacaacccccacattttcaatttccat

SEQ ID NO: 886072 - DNA, 637 bp, Homo sapiens
ctagcttattcatattaacaaaagtttctctaacttttcatggtttcattatttaccagaattacttatttgtaaaaaattatcttttattctcaattgccacatagaagagcatccacttcaaaaaaggccttggatgtctctatttcctcyaccattccaactactttcttttgtatcttctgtttatatgtaaacctaagttgaaatttttggaggttcaggatgatcactaatcaaatattgtatgattctaacatgtcgtaggtgttcattaattttcactgaacaaaacttggctattatttgaatgcctaatgtatttataatactatccaagtgatctcagtaaatacagagatctaaaatttactccactctcttatccccacagtactaacatattagttgaaataatagctaatagctaacattgaaaatccactatgtttctgtcactgttttaagtattttctatacattaacgattttaatattctcaaccatgccatgaggtagagtctattattattttcatcttatgaatgaagacaccaaagcacagataaattaggtgatatgactgagatcacacagctggtggatatcagagataacatttagacccataaaattt

SEQ ID NO: 886073 - DNA, 638 bp, Homo sapiens
ttgagacgtggttgatggagtcagaagagctgataaatgtcatatcaaaacagagagaaggggatagagccaatttgaagaggtaatttaatacacattataaacacaattctactaatttgaaaatattagagtgtacactaaaaaatattttgtggcattatctttttgatcacattgctatgcattttcatacatatcctttttatttcacagaaatgggtactatttcatctttattacataatatattctatatattcctaaatattaacacacaatattctatgttataatatttaatgtatcttcctgcatggtattagattatggtgatataycataatataaactatccccaaaagttgaggatttgggttaattttcaatttttcattattataaataatgccacaacaagtaacagttcactttaggtcacaagctggataatataattccagccattaaaaaaataataaataaataaatatatatatatagtatataaacacaatgtatatgtattgtgtgtttatgtagtgtgtgtttatgacatttaagtgtcacacatacattttaaaaactggaaagcaagatattaaatattaaataactagcagttccaacttctagtt

SEQ ID NO: 886074 - DNA, 560 bp, Homo sapiens
attgttccccatgtgtgatgaggagctgggatatttatctactaactcccatttgcacttgggcccattgggcactcctagactgccccacgcataactgatcatgctcctgcagccaaagaaagtccttaagcagagaatccaaggtgcttgcagtaagaaaccattggcatgtgcaggaatactgagtattgatgatatgtaaatagggcatcaatcgtgtctgctatatggggaaaagtaaagggtagcagagtaggggctgggggatgagaaagcaaggaatgaggagcactcacttggggaggactgccaactgtgtagccaggtctcaatgaacaaaagtaggcattctgttgaaactgctggggaagtctataatataatacctctmccatttatcttaattgtctttagatatagaatgccttcaaaatcataagggccaaaacttatatttatcaaccttcctgtcccgtattgagggaataatagagtacatccatatagcagaatattctgaatctgtttaaaattatgatgcatagtttcaataaaaa

SEQ ID NO: 886075 - DNA, 570 bp, Homo sapiens
cccagggcatggtttgcaactggctgcgttggtcatttttatgaatcgatttgtgcaaacccatggcaagctttcctaatataaacaggtggaaagagagaagtcagaggggctggcctcagtaatccagacagcaaatcttacagggaagaccctccttatatcctggggaaattggtatatgagaagttaactgggtttttaccctctgaaaaggaaatttctataagaaagggaagcatcactgcattgcttgataacatytgttttatcttgcttgttttatctgactttctcccatggccaaggaaacatgatgaaagaaccaatttctttcctcttttagaagctctgatcatggaggagaccatatctgcaagtcatctaggactcagctcttttagagctatccatggactgggagacccttctcccacttcaaggagcccctcttttgtaccccccaaacttcctggcttacaaaatttgctgccagatgtggtggtgtgggagtgagggtgggtggcataggtcatgttggtaaaaggcctcccataggcgggaaaactg

SEQ ID NO: 886076 - DNA, 580 bp, Homo sapiens
aaacttactggcttaagtcaacaacacttattttcttcatgaaatctgcagttttgacaggcccaacagggatagctcgctcaaactgtacttgtcatcagctggaacgttcagagtctcactcacatgtcaatgccagctgtcagctgggacctcagttggacacgtatgtggggcctctccacatggcctgggtttctgcacacattgttgctggtctccaagggtgagcatcctgaaagagaaaaagtggaattgtagtgctttttatgacctaacttcaaaagtcactaaaaattcctttggttgcattctactcatttgaggcatttataaagactgtcaaagttcaagagatggggaaatagactcttccttttgatggagagtgtcaaggtctggawgagaatatgggactgcatttactgctgtagtcatgtttggagagtataatcctccattcatacctaacttcccacacgaagcttctctttctggagcttactttcaaacacttgggtttgtgattttgttccagatcagaattggatccttatgctatgctacccaacttccagag

SEQ ID NO: 886077 - DNA, 680 bp, Homo sapiens
ctgagtaacagtctggcagttctttaaaagttaaaaatagagttactgtttgtgtgtgtgtgtgtgtgtgtgtgtgtgtgtgtgtgtgtgtatttgagacagggtctcactctgttgcccaggctggagtgcagtggcgcgatctcagcccactgcaatctccacctcccaggttcaagcaattctcccacctcagccttagaattactgtttgactcagcaattccacatctaggtaataatcaccaaaaaagtrgaaacaaccccaatgtccatcaactgattaacagatacacaaaatgtggtatactccatacggattatcatttggccataaaaaggaatgaagtactggcttatacattctaaacatgaatgaaccttgaaaacattttgctaagtgaaagaagcccatcacaaaagaccttatattttatgattcatttatatgcaatatccagaataggcaacatcatagagacagcaagtagattagtggttgccaggcaatcggaggggagagaagggagatagcaaatgactgttagtgggtacggagtttcttttgggggtaatgaaaatgttcgggaattagtggtgatggttgcacaactctgtgactgtactaaacagtattgaattacacaccttaatatattttataatatatgaagtacatc

SEQ ID NO: 886078 - DNA, 680 bp, Homo sapiens
ctgagtaacagtctggcagttctttaaaagttaaaaatagagttactgtttgtgtgtgtgtgtgtgtgtgtgtgtgtgtgtgtgtgtgtgtatttgagacagggtctcactctgttgcccaggctggagtgcagtggcgcgatctcagcccactgcaatctccacctcccaggttcaagcaattctcccacctcagccttagaattactgtttgactcagcaattccacatctaggtaataatcaccaaaaaagtagaaacaaccccaatgtccatcaactgattaayagatacacaaaatgtggtatactccatacggattatcatttggccataaaaaggaatgaagtactggcttatacattctaaacatgaatgaaccttgaaaacattttgctaagtgaaagaagcccatcacaaaagaccttatattttatgattcatttatatgcaatatccagaataggcaacatcatagagacagcaagtagattagtggttgccaggcaatcggaggggagagaagggagatagcaaatgactgttagtgggtacggagtttcttttgggggtaatgaaaatgttcgggaattagtggtgatggttgcacaactctgtgactgtactaaacagtattgaattacacaccttaatatattttataatatatgaagtacatc

SEQ ID NO: 886079 - DNA, 632 bp, Homo sapiens
tgtgactagtttatccctaagtcaagttgttttctatttatttgttttcttttggtttggatcagattggtttgtacattatgtggttaagagcgtctgctgggcttctagtactggccatcaccactagtagctatgatacagggaaagttatgtccctctctttgcccaggttacccatctgtaaaatgggaaaatttttgaggccatcactaaatatcagtagactaaaggactaaatgacctcttaaaaattcagggttcaagacaamctatagaatgggagaaaaattttgcaatctatccacctgacaaacacctaatatccagaatctacaaggaatttaaacaaatttacaagaaaaacacaaataactgcattaaaaagtgggcaaaggacattaacagacacttctttgaagaaggcatttatgtggccaacaaacatgaaaaaacgttcaacatcacttatcgttagagaaatacaaatcaaaaccacaatgagataccatctcatgccagtcagaatggcgattattaaaaagtcaagaaacaacagatgctggcaaagttgctgagaaaaagaaatgcttttacactgttggtgggaatgtaaattagttcaaccattg

SEQ ID NO: 886080 - DNA, 600 bp, Homo sapiens
tctgaccccacattttccttctgcactgccctagcagaggttctccatgagggcgctgcccctgcaacaaacttctgcctgggcatttagatgcctaaaacttaccgcatatgtgtactgggtcccaaaaaaaaccctagtacyttcaaggaaagataaggtttcatgaagcaatttgactcaataattaattgttcctacccggtgatggaatacctaggttgccttgaaaatattaagccaatcatttggagagtttgaatctcttgaatgtaatagttaaaggtagataatatttatgtctttgggcaagtgtaaacagggtcacagaattaggggattcaagaaatggacattgaagtatcaccacccattcaaagcccttgcctgaggaagggatacattgaaaccacaacatactggttttttttttttcctttcctgtatatttatattagttggctcttaaaatgtggtgcccagaaggcagcatgggcatcaccagggaacttgttaaaaatgcaaattatcaggcccctccccagacttactgaatcagaatctctgaggttgggactcagaaacctgtattttaacaac

SEQ ID NO: 886081 - DNA, 614 bp, Homo sapiens
cttcaacataaattggatcagataataaaaataatagcaaagttcttttcatgctgtatccttaattcttcaccataatcttaggaagtgaatgtattaattatcttttgctatataacaaattactcccaaaacttggcggcttaaaacaacaaatattatttcacaatttctgtgggtcaagaatttggaagtagtgactctggctcagggtctcatttaaggtggtagttcaggatgccagtcagggctgcaggcactgaggctgcttcytcaatggcccactcacatggctgttggctggaggcctctctttctcaccacacgggcctcttcataggactgcccgagtgtccttacagcgtggcagctggcttcccccagagtgaacattctgagagagagagaaagagagagttagaaggcatgctgtcacttccactgtatcccattcaccagaagtgagagactaaattcaccaaacagaaaagtgaaggagaatgaggctccagttttttgggtgagagttgaagaatgtatggatattttgaacaaccacaatataattcttcttttcacagaagcacaaaaaaatttatttaacttgtccaagt

SEQ ID NO: 886082 - DNA, 648 bp, Homo sapiens
gctgttctgtaattgttccaatataaaggagtcaaaacaatttcttaatggaagtattaagtagtgctctatgttgtcaactaatttatttcccatttcaaacattagttgacatgttttcatttctcttttggaaggaaacaactaaatatgttatcaatccatcatttacttgtacaataaataaagttctaaatcactgcacagtgtaaaatggcaaatagacttccccataacacaaagccatcctgaaaagttttgttcattttagaagaaaaaattttaaaacctgagcaccataggatatgaattttgtaaataattatgaaaagaaaacaacaataataaaactctactaatcttagctcgatcttataaaaagttccataatgagtaatcaaattttatttccaattaaatatgttatcacccagtagtatgccataccagtttctaattcatacttcaattatcttctaatttaaattaatgactataattgckgttataaaacaacagctctatagcctgctattcagaccagtaaataagagtttaagggcttgtgatagcaaatgaagtttcttattggattttaagaaaaatttttataaaaatatgtgaggttattcaatagaatcacattta

SEQ ID NO: 886083 - DNA, 676 bp, Homo sapiens
aaaggcaattccatatggttggaggatagaaagatagtgacaggagatgaggtgggagaagttggcctgcaggatttgtattccataataagaagcctgaattttatgcaaaatacaacaaagcagttaagcagcagagtgacatattcaggtatgcatttaagaaagagcactctggctgcaggaggggacagataagacatgtggcaaggctgaagctaaagagaacagtaaacaatggtcatcatccagattagaaatggagagagcctaaatgaaggcagcagtaatataatgaatattaagaaagtcaaggaggcttagactattcctatctacatgcagcttggggattaacctcagatgttgatcatgcttgccaaattattaataagacaatatctcaagacctgccttgataatctcctttcagtcttatgatatgaggttaaaaacaaggcaaataatatatcttggattctatcctaaagggatcaatgtaagaaacctggstaaaattctgacaccataattgaaatccaggaacagaggcctatgctacatcacatacggagagcagatggctcagagtgatcatctcaagaacttctcgttgggcaacgtgacttttgcaaaagaactaggaaagtgttcctttgggccatgatgatttatc

SEQ ID NO: 886084 - DNA, 585 bp, Homo sapiens
gattaagggtggatctgccttccccagaccactgactcaaatattaatctcttttggtaacactctcacagacacacctaggatcaatactttgtatctttcaatccaatcaaggtgacagtcagtattaaccatcataatatgtaaacgacacatggtcccattcataggaaattttagaaacacaaaattatagtctttctaaagcagatcaatagttttctacagtggaaggaggggaggtgttggagaattttacaaggtgatagaaatgttctacctcttggttagtaagaagattgcattggggctatgtatttgtcatactgcactgaatgatacacctaaaatacatccacttgattacaygcaaatcatacttcagtaagtgtcattaaattatttcctttcttatttggataggatgaggagaaatcacatgagattggttttatctctattaccagcaatttgaattagaattgaccttctgctgttttttttgttgtgagctttttcattagcactctcttgtgcattatcagtctgttttctaacctgtgagggtgtcagtggcagaggtga

SEQ ID NO: 886085 - DNA, 625 bp, Homo sapiens
acgttggaaaaagggactcctgggcctaggaccacatggtccctgacactgaaaagttcattgcggtttgaggcacctgtgtggagtgggctgtacattggagaggcaataagccaagtatgctggggctgactacacatcaaagggattcctgctattctgaagtcagtcaggtgcacttggaactgtccgtggtgctgacyggcacccccataagcctgtcctgcagaatgtctggtctcactactcaggacccagacaagattgtctttgtggtgacagctactcaaatggcccatacccagatatggtccttgaggtgactttcacttgtgcctatatcacttgggtgagtataccagaccctcccccaccacaatgggcctgaccaccatatagagatcaagactgagccagaaagaaaattatagatgtttacattgtctcagtattaaaaaaacctactgatgttttgattctaggattaaaaacccaagttttccagaatcagagctaacgcctgcttgatttctctgtgactgaatctgggctgttttgggactgaacagaagctctcaaaaggatataatctacttgattggatcaattagttgaattattgcac

SEQ ID NO: 886086 - DNA, 642 bp, Homo sapiens
tcccccaccacaatgggcctgaccaccatatagagatcaagactgagccagaaagaaaattatagatgtttacattgtctcagtattaaaaaaacctactgatgttttgattctaggattaaaaacccaagttttccagaatcagagctaacgcctgcttgatttctctgtgactgaatctgggctgttttgggactgaacagaagctctcaaaaggatataatctrcttgattggatcaattagttgaattattgcacatacatttagtgtacatttgtaatggataagcccttagaagagtgctgcatggatacagactgagttaaggattgtagaaaacagggagtaaggatggacagtcaagctgtgctcagcttctactgttgcaagaaaaaaacatgggcacaaaataagtaagaaaacatatatgtgtgatgtgtagagattaaatgtcaaaccatgtcatgctgggatgagctatgacccagaggaaaattgtgtaagcagtatgaaaatcaggactcacctatgggtatgtgatatttctttatatcagaaggggtctggctagagataggatggatgggctatttgtgagacagaatggcaagaacaacagtgtttataaaaatatttttga

SEQ ID NO: 886087 - DNA, 603 bp, Homo sapiens
ctcttgagtctctagggcattttacagtaaagccacatattttctgaagttaggtcaagactgagcatatgaaattcctcaagtgtgaaattccacttaaccccattaatgcttataaccctgagtaggtattgtttataattcactcctggttaccagtgggtatttgcatttgccaaatcttttcaatcctatctcaaactaagtttattttagggaaaaaaatttgccttcctgtcaaaaagctgagaagaaccaatctccccctcccattcctatggtttgcacatttggctgtagctctggggtgkgtgtgtgtgtgtgtgtgtgtgtgtgtgtgtgtgatgttattctgaatttcatagtacttatgatagtaaaaccttacgtttataagggcctttacagtttaccaaaggtttggaaatggatattactcagcatacctatttttttttccttatatgtggcaaagaaagtggggatggtatacaggtttatatgtaatctgtagatacttttcttcccctgggaaatttctacagctcttatacagagatttcatacatggttgatgctgaaaatattaaagtgattatttga

SEQ ID NO: 886088 - DNA, 614 bp, Homo sapiens
aactaaaagccaggtacttaattttcacactaacctacacgttgatactgcttcatcattatcagtgttattattttagaatcaatgcaacaggcacgtgacaaatatcatagattatggaaacagtagatctttttttttgtaaaagtggtaccattttaaatttatttattgctcttaagtatactagataaatcacttaggtgtctataaatctcatagwtccctttagtctccaagttttggataacaaaggtgctttggaatattccataggtgaacaaatgcatcagatttatggaggatttacctagagggagaaatgaaaagcagtgacccaaggaagacagggtggttctctaacctgtacttggagttgttggtggtcttagggctcgattgcttgttgttagaacagtctgggttgtgttttagtacagcctgaaggttcctattttcttttctctttctctgactcactgcctagtcattagcagaaagatattttgcgctggggcctagggcaaacagggatgaggggtatgaacctttcatttacattaagcagagtaaagtaaatttaatcactcctaaatcatgctgtgctatagcat

SEQ ID NO: 886089 - DNA, 657 bp, Homo sapiens
cggcttcactgcagggcaggatgtccttgtggttgcagcaggtagttttgggggctatgtgctttgtttttcacgtcaggtgtgtgtgtgtgagagagagagcgagcaagagatcaagagagtaagagagagagcaagagtgtgagagtaagagtaagagacagcaccagatccccaaccactcaacaaaaggccttttcttttctttcttttgttctaatctgattgtttctaatcaaattgggttggttacatgcccatctctgaaccagtaattccctatggcccttattcaaatttcatttcagtaaggcttaccctgatgactgagtctaaaatcacaagtccagcttggtagctttgtttctctctagttcacttactgtcatctaagcaatgatgcactttaccgttttctctgtttgcttatttttcataatcttcttaagtgcggagattgttttattgatacaaaatattttacatatttatggcrtacatgagagtgtttgttacatgcatagaatgtgtaatgatcaagtcagggtatttgggtatccatcaccttgagtttttctcatttcgatgtgctgctatcttttcaagtcctctcttctagttactttgaattatataagatattgttgctaagtatag

SEQ ID NO: 886090 - DNA, 667 bp, Homo sapiens
tttagctcccacatatgaataagagtatgcgatatttgtctttctttgtctgatttgtttcacttaacataatgtcttccagttccatccatgttgttgcaaatgacaagatttcagtattttatggctgaataatattccattttgtatatataccccattgtctctctccatccactgatcagcatttaggttgattgcagttgcttcttgcccttggaaatctcagtaatatactatttcctctatttttggatagagggatccagtgcgatttttgcatcmcattatatttatatttttggttttttgatgacacttcatattgtttttcatagagactgtattaatttatattactgtcaacagttcctgagcattctcttttctctgcatccttgtcagcatttgttattttctgactttttgataacagccattctaactggggtgagataatatctcctggtggttttgatttgcatttccttgatggtgagtgatgtggagcacttttctcatgatgcacccaatttgtatgtcttcttttgagaaatgtttattcagatcttttgcccattttttaatcagattatttggttttggctgttgagttgtttcagttctttatatattctgattcttaatcccttattggatggatagt

SEQ ID NO: 886091 - DNA, 693 bp, Homo sapiens
gtatattttttgaggttaccatgaggcttgcaaataacatcttataacccattattttgaactggtaacaactttacactgcaaaaacaaactaataagcaaaaagaaaactaataaaaaacccacagtttaatttcatttcctcaggtttttaactttctgttgtttctatttatatcttatactgtttgtatcttgaaatattgttgtcattattatttttgataggttcatctttmagtctttctacttaaaatatgagtagtttacccaccacaaatacagtgctgtagtattttgtgtttttctatgtacttactattaccagtgagttttgtaccttcagatggtttcttattgctcattaacatcattttctttcagattaaagaactccctttagcatttcttgtaggacaggtctggtgttgatgaaatccctcagcttttgcttgcctgcaaaagtctttatttctctttcacatctgaaggatatttttgctggaaatactcttctaggatagtgtttttccttcagcactttaaatatgtcatgcaactctcttctggcctataagatttcccctgagaagtttgctgccagatgtaagggagctcctttttatgtgatttgtttcttttctcttgtcgctttcaggattctttcattgtccttgacctttgggagtttga

SEQ ID NO: 886092 - DNA, 693 bp, Homo sapiens
gtatattttttgaggttaccatgaggcttgcaaataacatcttataacccattattttgaactggtaacaactttacactgcaaaaacaaactaataagcaaaaagaaaactaataaaaaacccacagtttaatttcatttcctcaggtttttaactttctgttgtttctatttatatcttatactgtttgtatcttgaaatattgttgtcattattatttttgataggttcatctttaagtctttctacttaaaatatgagtagtttacccaccacaaatacagtgctgtagtattttgtgtttttctatgtacttactattaccagtgagttttgtaccttcagatggtttcttattgctcattaacatcattttctttcagattaaagaactccctttagcatttcttgtaggacaggtctggtgttgatgaaatccctcagcttttgcttgcctgcaaaagtctttatttctctttcacatctgaaggatatttttgctggawatactcttctaggatagtgtttttccttcagcactttaaatatgtcatgcaactctcttctggcctataagatttcccctgagaagtttgctgccagatgtaagggagctcctttttatgtgatttgtttcttttctcttgtcgctttcaggattctttcattgtccttgacctttgggagtttga

SEQ ID NO: 886093 - DNA, 572 bp, Homo sapiens
tccctttgaataaactttctacccctatcactttctctatttccttcttaaggccaataacttttagatttgcccttgtgaggctattttctggatattgaatgtgtgctttattgttttttattcttttttttttcttttgtctcctctggctgtgtyttttcaaatagcctatcttcaagctccctaattcttctgcttgatcagttctgctactaggagactctgatgcattcttcagtatgtgaattgcatttttcaactctagaatttggcttgattgtttttaatcactttaatctctttgttatatttatctgatagaattctgcattccttctctgtgatatcttgaatttctttttttctcaaaacagctactctgaattctctgactgaaaggtcacatatggctgtttctccaagattggtccctggtgcttggtttacttcatttgacaaggtcatattttcctggctggtcttgatgcttgtagatgttctttggtgtctgggcattgaaaagttacgtacttattgtagttctcacaacgtgggcttctcaatctgtg

SEQ ID NO: 886094 - DNA, 534 bp, Homo sapiens
taaaaacaatacaggcattttaaagttgggactgacatcctaattccagtaatatgcctaagccaatgaccttgcttttttttttttcctggtctctggagatctaaaagccctcctaccctaagatgcacaccatgttgctatttcacggataaacacttatcaggcaacagacactcctttttcagttaagaaacaaagttatctaaagccacccagaattatctcagcacccaaggttgaaacacatgcaaggaagtcaggcctcaggactgtcctgctgtcttaactaacccaagacacacgcctgctgaactggcaagtttctcttgctaytctgcaactctgacccagttgtgaactcagatgctgtttcagattaatctggaagctcagagtggtttgaagcattcccataataggattttgctttttccttaaaaaggattggtggagtatgctataaagtaaaaaccgcagaaataagcaggatgtacacaggtagaatcaagacaactgatcttcaacatagag

SEQ ID NO: 886095 - DNA, 622 bp, Homo sapiens
aaaatacaaatgataaatattgtataattatgtacaaaatgaaaaccttttaaactctgaagacaaactaaaatttactagtttgaatttaaaacattattatataatagcagatagttctcttcagaaatttatctctagcttcctgtaaaaggtccagtcaaatcatgttggctgtttttggcagatttcagcctcgcctcaataccaatttttatttgaataactgattcscaacatttaagaagaacttgatgctgaactaagtaacctaagctggattcagggccattggcaggcaggcaggcaagcaggaatttttcgtattgcagacagcccctggtggtcatcatctatacatcggatctctaaggacgtgccggaaaaaaaaatctgtgaacacaatcttcccatgctgtattcacatgctctattcacatctttagtttacccaggttgttagagccttgggtaagatgattaaaggcttcacgatggaaatttctataacaaaaaaaaaggaaacttaaaagattgatttaccacaaactatttactgggtatttaataatgcctaatatgcctcataatgcctagtatgcctagtataacagtggctaca

SEQ ID NO: 886096 - DNA, 603 bp, Homo sapiens
ggtgcccaggaattggaggttatagtgagctatgatcataccactgcactccagcctgggcaaaaagaaagagcctgtctcttaaaaaaaaaaaaaaaaaaggcataaaaataggaaagaaataaccaccgcactcctgtcaagactgaatgctgaattgttttttggcaggggaaagcttgagaggatatgaagattatatcaactgtcttagcctacatgcctagaaggatggtagtaccattaattgatagatgttaatagaccaatttggcagtaaataatagaaaaccataaagaatgatttaaaatatagggctattttatcttgccccccaaaaagttgctgatgatatagttgcttaacgttctgtcagtggctcattggctaagaggttcaatggtgttacagccagctacccttggcctttgtctcatgactataaaatgactrctgcagtttcagacagcatgtaataagaagggaggaaggagtgatgtttacttcatctgcccttatctaaggaaaacaaaaacttttacaaagatgcccctctttcctcctcccctactgctgcagattcgcttttatgactcactggt

SEQ ID NO: 886097 - DNA, 667 bp, Homo sapiens
cgagccactgcccttcagactgcgagagaggcaaaaaaaaaaaaaaaaaaaaaaaaaaagagagagagggagaaacaaaaaaggccatcacataatggtaaagggaacaattcaacaaggagagctaactatcctaaatatatatgcacccaatacaggaacacccagattcataaagcaagkctttagagacctacaaagagacgtagactcccacacagtagtaatgggagaccttaacaccccactgtcaatattagactgatcaatgagagagaaggttaaccaagagagagaaggatatccaggacttgaatgcagctctgcaccaaggggacctaatagacatctacagaactcttcaccccaaatcaacagaatacatattcttctcagtaccacattgcacttattctaaaattgacgacataattggaagtaaagaattccttagcatatgtaaaagaacagaaatcacaacaaactgtctctcagaccacagtgcaatcaacttagaactcaggattaagaaactcactcaaaactgcacaactacataaacgctgaacaactgctcctaaatgactactaggtaaataatgaaatgaaggcagaaacaaagatgttctttgaaaccagtgagaacaaagatacaacgtaacagaat

SEQ ID NO: 886098 - DNA, 667 bp, Homo sapiens
cgagccactgcccttcagactgcgagagaggcaaaaaaaaaaaaaaaaaaaaaaaaaaagagagagagggagaaacaaaaaaggccatcacataatggtaaagggaacaattcaacaaggagagctaactatcctaaatatatatgcacccaatacaggaacacccagattcataaagcaagtctttagagacctacaaagagacgtagactcccacacagtagtaatgggagaccttaacaccccactgtcaatattagactgatcaatgagagagaaggttaaccaagagagagaaggatatccaggacttgaatgcagctctgcaccaaggggacctaatagacatctacagaactcttcaccccaaatcaacagaatayatattcttctcagtaccacattgcacttattctaaaattgacgacataattggaagtaaagaattccttagcatatgtaaaagaacagaaatcacaacaaactgtctctcagaccacagtgcaatcaacttagaactcaggattaagaaactcactcaaaactgcacaactacataaacgctgaacaactgctcctaaatgactactaggtaaataatgaaatgaaggcagaaacaaagatgttctttgaaaccagtgagaacaaagatacaacgtaacagaat

SEQ ID NO: 886099 - DNA, 639 bp, Homo sapiens
caattttaagtttaccaaagtaaacaaaaattcatgaagatgagtattgccctctcccaaaaaaggtttaaagattagttgaacttccctcaactacacctaaagcaaaggggaattttagtaagtgtgtgtaccttgtttctttcagacgcatctagaatgtttttctttcaccgtacctccaaaagaggcaatttagaaagtattaagtagtgacttttgttcagttccattttgtgtgtgtgtgtgtgtgtgtgtgtgtgtgtgtkaaccttgctttaaaacagtagcgtatactatggtcattgaacttaatctctctggtgttagaaatttactttacaaaattgtgttaagacttttggaaaaagaaaatgaaactgctgtggtaaaaaccaagtttgtttcaaaaaagtaggcaattatttggctgttatattttctttgaaaactgcaataatttatatatttgtattgctctgcttgggaactgtatatatgcttgtctactatttttaattttacaacaataaaataagtattttgttatctgctagcttgagtggatgctttgaaaagtagctatatttttttaaatagtgggtctatatggttttgctttgcaggtttagggagtct

SEQ ID NO: 886100 - DNA, 639 bp, Homo sapiens
caattttaagtttaccaaagtaaacaaaaattcatgaagatgagtattgccctctcccaaaaaaggtttaaagattagttgaacttccctcaactacacctaaagcaaaggggaattttagtaagtgtgtgtaccttgtttctttcagacgcatctagaatgtttttctttcaccgtacctccaaaagaggcaatttagaaagtattaagtagtgacttttgttcagttccattttgtgtgtgtgtgtgtgtgtgtgtgtgtgtgtgtgaaccttgctttaaaacagtagcrtatactatggtcattgaacttaatctctctggtgttagaaatttactttacaaaattgtgttaagacttttggaaaaagaaaatgaaactgctgtggtaaaaaccaagtttgtttcaaaaaagtaggcaattatttggctgttatattttctttgaaaactgcaataatttatatatttgtattgctctgcttgggaactgtatatatgcttgtctactatttttaattttacaacaataaaataagtattttgttatctgctagcttgagtggatgctttgaaaagtagctatatttttttaaatagtgggtctatatggttttgctttgcaggtttagggagtct

SEQ ID NO: 886101 - DNA, 639 bp, Homo sapiens
caattttaagtttaccaaagtaaacaaaaattcatgaagatgagtattgccctctcccaaaaaaggtttaaagattagttgaacttccctcaactacacctaaagcaaaggggaattttagtaagtgtgtgtaccttgtttctttcagacgcatctagaatgtttttctttcaccgtacctccaaaagaggcaatttagaaagtattaagtagtgacttttgttcagttccattttgtgtgtgtgtgtgtgtgtgtgtgtgtgtgtgtgaaccttgctttaaaacagtagcgtatactatggtcattgaacttaatctctctggygttagaaatttactttacaaaattgtgttaagacttttggaaaaagaaaatgaaactgctgtggtaaaaaccaagtttgtttcaaaaaagtaggcaattatttggctgttatattttctttgaaaactgcaataatttatatatttgtattgctctgcttgggaactgtatatatgcttgtctactatttttaattttacaacaataaaataagtattttgttatctgctagcttgagtggatgctttgaaaagtagctatatttttttaaatagtgggtctatatggttttgctttgcaggtttagggagtct

SEQ ID NO: 886102 - DNA, 639 bp, Homo sapiens
caattttaagtttaccaaagtaaacaaaaattcatgaagatgagtattgccctctcccaaaaaaggtttaaagattagttgaacttccctcaactacacctaaagcaaaggggaattttagtaagtgtgtgtaccttgtttctttcagacgcatctagaatgtttttctttcaccgtacctccaaaagaggcaatttagaaagtattaagtagtgacttttgttcagttccattttgtgtgtgtgtgtgtgtgtgtgtgtgtgtgtgtgaaccttgctttaaaacagtagcgtatactatggtcattgaacttaatctctctggtgttagaaatttactttacaaaattgtgttaagacttttggaaaaagaaaatgaaactgctgtggtaaaaaccaagtttgtttcaaaaaagtaggcaattatttggctgttayattttctttgaaaactgcaataatttatatatttgtattgctctgcttgggaactgtatatatgcttgtctactatttttaattttacaacaataaaataagtattttgttatctgctagcttgagtggatgctttgaaaagtagctatatttttttaaatagtgggtctatatggttttgctttgcaggtttagggagtct

SEQ ID NO: 886103 - DNA, 633 bp, Homo sapiens
tgaataatgttcattgtatttagcaaccagaaattcatggagtacagttttaatggacctgtgggagcaaaagtagatcacaacagattgtaatatggatgcaacgtagtaccatgatttgaatgtgttccctgaagttcatgtgttggaaacttaatcccaaaagcaacagcatcgagaggtggagtctactaagaggtgattaagtcatgaagactctaccctcacggatgaattaatgttatgsacggagtgggttagttatcatgagagtgcctttgttataaaagcaagttcagccccctcttgtttgcttgctcacatcctcttgctctttccaccatgttatcacacagcatgaagtcttgctaccttgccagatgctatcaccatgcccttggacttcccaacctccaggattgtaagccaaatcaataactgtttgttattaattatccattctgtagtactctgtgatagcaacataaaatagactaagacaggtaggatagtggatttgaggtatgatgtctttaaaattttatgaagtgaagttgaggtaaagaggatgttgggtcaaggttatttttttaaggttgggaagtacttgaacatgaataaatactaagagga

SEQ ID NO: 886104 - DNA, 608 bp, Homo sapiens
gactgaatctggttaaactgcactttggcaatgataacagcatgttcccacaacagtattttccaacctcggccacactgtcctcaaatatgcagacttaccccatgctatcccccaggattgtggcaggccaggcttcactaacgcaggcctccgtgacaactgtttcagcactgactgagtggttaagttaaatattaaaagctaaaaaagccagtgcccttatacaaaggctggaatgtaacaaaagcccattaagagtttttcccagacctttcctgggccttaaagcgtgacaaaataatgaaggaattcctaacagtacccatttaggtttaaacacgttttactgggggtctgaagaaactccccaaacctccgtgatttagcaggagacargataaaggtaatcaccccagcacctggacccatttagagtaaatttactgaggctctagaagcaggtcttcaggcctcagaccttagttatagatgaaaagaagttaatcacttatgtctttagatgaatgcacacttacacgtagacatatagcttagaaggtatataagctctgaaaagctttgtaattttgagttggtctggcgat

SEQ ID NO: 886105 - DNA, 642 bp, Homo sapiens
aaagagaacaatatcagcctttagatagtgtgggcaaaactgagagtcacttccctttcagctcagctttgatttcaagttacttaaactctacctgaaaacgcttttgtgtcatatacttgtacgatgtaaatatcatccaaattaaaaatgttaaagcctcaatgtcttctttaagtatttatgaaaataaaacaagaaactatttctgattatattatcaatattgaaaaggaatggtcagtaaatatatgacattttatagtctttgatcaagaaaagaggaaggtaatttgaaagtgtttgtgttgtatttctaaccttatctgctggaatttatgtgttatctgttggaattgccagcayatataaggctatatgttttaaatagctgatttgttaaagagccatcgaaaatatgagtttgaaaataacaaaggaatttaatactacttaataaatattttagggttaaaaataagtgttacattttctttagtggcatatttaaaaagtttcatctcttatttatatctcacagtttcaacactttactgcaaactttaaatactcatggcaggaacttagcatgaacaaaacagtttgcatgtccttatttccatgataaacaaattttcccaa

SEQ ID NO: 886106 - DNA, 671 bp, Homo sapiens
agttagttgatgcagtttctttgtagcatcgatgctctttacaatttggcatgtttttgtagtggctggtaccggttgttattttccatgtktagtgcttccttcaggagctcttgtaaggcaggcctggtggtgacaaaatctctcagcatttgcttgtctgtaaaggattttatttctccttcacttatgaagcttagtttggctggatatgaaattctgggtcattctatgtaaccaggaaatttcctcttattttactaagaaccatgactttctctgcttaaggtgttacttgttttttcccataaaatatggtatacactcataatcttgaatacgtgcttttcctgtgtgatgaaattcaagtaccttttaatcagctttgacttctaacttatttaaattagcttcccaggaagggaaacaataacactggagaaacttttttttatctttgtggtaaacggcctaaaaaacaaagactttgcagttttatcagataatttcctatgtttcatgttctctttgttgagttttttgattagttaagaaaactgagctttaaaaagtttaagtctttttttttttaacatctgtataactttccgtattgcttttaaagtatttcattatcactttgggtaaaaaaatgactataattttacaga

SEQ ID NO: 886107 - DNA, 602 bp, Homo sapiens
atagttgtgataaacacttaactaaatgactgttttatttgctttcttagaaattagaatgtttttgaaatgatttgttttttttcatctagctttacaagctatccaggaaaactgagtcaatgtcttattttttctttctacatatttttctgaagcaagcagatatgttttgcaaaaataatttacaggttgtattttattttattatttttatttttgccaagcctgtgtatcattatgtattgagtgagacttccaagagtgtcaaaattgaatagttagtggtgaaatttaccaaacgcagttagctgatggaccctgagggcctcaaataaaaatatccaaggaaaacctcttgaagcgaacttttgtgtttcttcatgatggatgtrttctttgagtatggcatgttcaggtttccagagccctgtctgaagatgaggagacttaaagaggctaccaggttaatccctccctgtaggccttggcatttctttctcagacctcctcgcagttgagcatgttggcaccatctcaatgcctacttccttcccacctcaggctggattagagaggattctctgtgatagacactcatg

SEQ ID NO: 886108 - DNA, 616 bp, Homo sapiens
tagtggctcttaaaatttctgtttgctggtgacatgtgtcacttctgcccacttttcacaagtcatacgaccaaggctgatattagtcagtgagggagtataatccttcctgaaagctgggctgtaaacacttgccaaaagtaacgccatctactacagtatctttatgatatttctgagaaatcgagccaaaattttagtcaaccggttggtgtaaactacttatacagatgttctgtacatattattattgtttagtcttcagkccctgaggattctgacgaaagtgctctaggaatctagtacattaagtcctgacttaatactgttaataggctcttggaaactgactgagtgaaaagatgaatgaatggggaaaccaatcttcccacaggctacttggtataaacaagagttaagttcctacagcatattttgatcacaaaaacatcagcaaacttctaactaaagactaaaacacttctaattttaaatattataataaatgtgagcaatgtatacatttaagaaagagtgataaaaacaagtaagacaattatttacccatttatttcagttcagggttgtgggtgtccaaaacctatgcagacagctt

SEQ ID NO: 886109 - DNA, 614 bp, Homo sapiens
cttttgtctcacagctctgaagattctttacttcatcttgacttcagatagcttgacgactatgtgccttggtgataatctctttgcaatgaatttcccaggagttctttgtgcttctggtatttggatgtctagatctctagcaaggccaaggaagtttttctccattattccctcaaattggttttccaaattttcagacttcacttctctctcaggaacaccaattatttttaggtttggctgttttatgtattcctttatttcttggagactttgtttattttattatttcttttttctttgcctttgactgattgggttaataaaagccttgtgtttaagttctgaaatactttcttctacttgttctagtctattgttgaaattttccactgcattttkttttttcttaagtgtgtatttcatttccagaaattcctattacttttttctttatgatatctatttctctggagaaaaatttattcatatcctgaatttttttcttaatttctttaagttgcttttcacttttctacagtatctccttgagtagcttaataattaactttctgaattctttggcatttcagagatttcttcttgatttg

SEQ ID NO: 886110 - DNA, 614 bp, Homo sapiens
cttttgtctcacagctctgaagattctttacttcatcttgacttcagatagcttgacgactatgtgccttggtgataatctctttgcaatgaatttcccaggagttctttgtgcttctggtatttggatgtctagatctctagcaaggccaaggaagtttttctccattattccctcaaattggttttccaaattttcagacttcacttctctctcaggaacaccaattatttttaggtttggctgttttatgtattcctttatttcttggagactttgtttattttattatttcttttttctttgcctttgactgattgggttaataaaagccttgtgtttaagttctgaaatactttcttctacttgttctagtctattgttgaaattttccactgcatttttttttttcttaagtgtgtatttcayttccagaaattcctattacttttttctttatgatatctatttctctggagaaaaatttattcatatcctgaatttttttcttaatttctttaagttgcttttcacttttctacagtatctccttgagtagcttaataattaactttctgaattctttggcatttcagagatttcttcttgatttg

SEQ ID NO: 886111 - DNA, 597 bp, Homo sapiens
aaaagagctgttcatggcctaagctggttgtgtcaggacataattggttaggtgaattggtgagagctctcgcctacccctaatttttgggttgggaaggtgggcatttggttaggagaggatgacttccccatgcctggcaaaggacctgtattctaattttgtcctaggacccacaatttatgtgtctttcctggtctcgtctagtatgctatagacagtccctcttagttgtgactttgacaaatcctgtccctgagacatcttctaacagagasaggagaggaatactgacaaatgtatcttgagctcttaaaatttgtgacatcctgtgcctaacacttgctattaacaatctcatttcattcttacacaaccatagcatagaaattctccagttagtaccattttatagatgatgaaactgaagcatgaacattccagaaatttcacaaagtcttatagcccagaggcttcatatctaaaattcaaaccaagaatccttttatcagaaatccgtaaagttctgcgtcatgtcagatgtgagctggaccaacaccaaaacagaaaagaagtttcacatttcagtttgaaatg

SEQ ID NO: 886112 - DNA, 597 bp, Homo sapiens
aaaagagctgttcatggcctaagctggttgtgtcaggacataattggttaggtgaattggtgagagctctcgcctacccctaatttttgggttgggaaggtgggcatttggttaggagaggatgacttccccatgcctggcaaaggacctgtattctaattttgtcctaggacccacaatttatgtgtctttcctggtctcgtctagtatgctatagacagtccctcttagttgtgactttgacaaatcctgtccctgagacatcttctaacagagagaggagaggaatactgacaaatgtatcttgagctcttaaaatttgtgacatcctgtgcctaacacttgctwttaacaatctcatttcattcttacacaaccatagcatagaaattctccagttagtaccattttatagatgatgaaactgaagcatgaacattccagaaatttcacaaagtcttatagcccagaggcttcatatctaaaattcaaaccaagaatccttttatcagaaatccgtaaagttctgcgtcatgtcagatgtgagctggaccaacaccaaaacagaaaagaagtttcacatttcagtttgaaatg

SEQ ID NO: 886113 - DNA, 641 bp, Homo sapiens
taaaatatttaagaaggattcttatagcagctctagggaattggacctgagaagtatttttttctaaaagagaaggtaaaattggttgtgcaactgataataccacccattcacatcctaagaatatcaacttctaatttttcttttttatgtttttgcctgcatattgtaattcattattaagtaaggagattttttaaaaatacattsttataatctccttgttaatgcagtttttctcattaatgaacaggaaaattcactttattgatataatttactattcactttttcttaactgtttcaactagtttgccatcaagggtttgtcctgtcttggtcagtctcattcatatgtgattgactacagatggtattaaatagacagatggtattaaacaaagactagaagctagtgatcattaagttattcaatgctcctactttcaaaggggcagtttttcactacactgtcatcctttttataatataaagttgcatatatatccatatatgttatatatatatacccatatatctctgtatgtgggtattcctatatccatatctcatatctccatctatatgtatatgtgtatttctatacacccaatagccagagagatacatataggtagata

SEQ ID NO: 886114 - DNA, 611 bp, Homo sapiens
agatatcaggacattttttttaagaggactggcatggttgcttatggttgtaatcccagcgctttgggataccaaggtgggaaggttgcttgagctcaagagtttgagaccatcctgggcagcattgtgagactctgtctctactaacaataaaacttaaaaatttagccagcatggtggcacatgcctgcagtcctagctacttggaaggctgaggccaagggattgcttgggccaaggtatctgaggctgcagtaagccatgattgcaccactgcacttcagcctaggcagcacagtgagaccatctctcaaaaaaaaggaaacaaaaacaaacaaacaaacaaagaaaacaccaaccaaccaaacaacaacaacaacaacaamaaagacaaatgatatcaggggaaattccttagaaaggaattaaaattcaaagggtgattattcaagtacaaaatttcataaaaataagttcctaaacaaaatatagactagtaacatttttacaacagcaacttaaatatccatttgagaaattctccattcatacaacacctccactgtatgaatgctgagccagaaagtagcctaccattacagcttagctct

SEQ ID NO: 886115 - DNA, 693 bp, Homo sapiens
tgattttttaaaaaatgtttaaacattaactattagtcccctttgtattagtgaggcttctgcaaagaaatagaaccaatagttaatctctcaggattattctaagaaattggctcatgcaatcatagaggctgacaagcaccaagatctacaatcaatctgaaaacccaagagagctgatagtatagctccagtccatgtccaaggcttaagaaccaggagagtgaaagtgtagttccagtctgagaccatgtaggattkagacccacgaagacccaatgtttcagtttgagtctgaatgcaggagaaaaccaatgtccccacttgaaggcactcaggcaggagaaattccctttactcccaggagggtcatcttttttgctctattcagacattcaactcactgaataagccccactcaccttgaaaaaggcaatctgttttatttggtctaccaattaaaatgtaaatctcatccagaaacaccgtcacccccacacctagcacaatgcttgaacaaatatttgggcactctggatcccggtaatgttgacagatgaaataatcatcacattctgcaaatgcatttctctgtagtttcagtattttactcactcaaactgtagttgtttttgagataagagtcaataaaggtcatgcaagggcatttaatcagatatcttaattttaaat

SEQ ID NO: 886116 - DNA, 693 bp, Homo sapiens
tgattttttaaaaaatgtttaaacattaactattagtcccctttgtattagtgaggcttctgcaaagaaatagaaccaatagttaatctctcaggattattctaagaaattggctcatgcaatcatagaggctgacaagcaccaagatctacaatcaatctgaaaacccaagagagctgatagtatagctccagtccatgtccaaggcttaagaaccaggagagtgaaagtgtagttccagtctgagaccatgtaggattgagacccasgaagacccaatgtttcagtttgagtctgaatgcaggagaaaaccaatgtccccacttgaaggcactcaggcaggagaaattccctttactcccaggagggtcatcttttttgctctattcagacattcaactcactgaataagccccactcaccttgaaaaaggcaatctgttttatttggtctaccaattaaaatgtaaatctcatccagaaacaccgtcacccccacacctagcacaatgcttgaacaaatatttgggcactctggatcccggtaatgttgacagatgaaataatcatcacattctgcaaatgcatttctctgtagtttcagtattttactcactcaaactgtagttgtttttgagataagagtcaataaaggtcatgcaagggcatttaatcagatatcttaattttaaat

SEQ ID NO: 886117 - DNA, 592 bp, Homo sapiens
agagaggatgtaggggtacacagtaatattgatgaggtaaacaagtgaattcttaatcaatagtggtcattgtcctacttcttcctaaaaggaattaatttccaaccaaacctggataatatttcttctgtttttattcttcacatgaatagatagagttacctctaagagttatagagttgggaattttgtccagccctgacatttattgaaacaaatgttatctatcaactcagtgatataaattttaattttcaataaatgagaatctcttaaagaaataatggtagtaataatgatgaaatatctttgcaaaagatatcaaagtttcagattgtataatagtttgaacatcaagttgatcatttgaaaaatttcgttaagtattcaactttgtccaaaggatgtagacctgtattaggagacataataaaatattatcaataataawtgtgccttatttgaataaattaatatttgagagcctttctgactgacaatgtcagcaggaaaaatggaaatgaaacatttgcattagcagattcagaagtgctagaaaaggtacaaatacggaagctggggaatttcacgg

SEQ ID NO: 886118 - DNA, 493 bp, Homo sapiens
tatttgaatctatttgggcaaactgagtattcattttcctttccagatttggaaagttttctatcattgtttctttaaataagctttctgcttttgtctctttctgctccttcttaaactttcataatgcatataatgcttctctggatggtgtttcttaagtcctataggatttcttsactcttttccttatgttttctattcgatcctctgactacataattttaaataacctgtgttcaagctcactgagtctttttttctgcttgagtaagtctactgttgaatcactctattgaattttttagttgagtctttgtattcttcagctccgcaattttcatttaattctttcttatgatatctatctcattgttaagcttcacagtttgtttatgtgaacataaacaaattttgattttattttaattgtctgtcttcccttattggtcattatcttctttcagataatcatttgaatttttttggcagg

SEQ ID NO: 886119 - DNA, 589 bp, Homo sapiens
ttttataattaattagaacttgaggaaattattcatcttctagatcttgtgatagtttaatttcagaatcctgtgatattgcctgacagttgtctaagcaattataggtttaagctctgaaacttgtactcatgagtctgttacttaaaatgtcaacgctctgttgttgtatcctttatacatggctctgagaatatccttaattgaaaattcagtttctggcctcaagtttagaacagcaccttcagacaaataccagaggaaatggtgggttgaatgcttacaagaagcaacaaaaggaagacgatctctttcttctgtatgtgaggatgtagcaagaaggcagtaagagtgtccccaccrgacaacaaatctgcaggcaccttgatcttggacttaccaggctccagactatgaaaataaatgtttgttgcttaagcccccaccctagcctatggtattctgttacagcagctaaaactgactaagaaaccaaggcatataaaattctctttcctcaaacattctacaactacctatatgaactcaagtttcattttcatagtgatcttttatattcttaagcaac

SEQ ID NO: 886120 - DNA, 580 bp, Homo sapiens
ataaacataaaaaaagctcatcattactaattatcagagaaatgcacttcaagaccacaatgagataacatctcacaccagtcagaatggcgattattaaaaagtcaaacaacagatgctgtcaaggccatggagaaaagggaacacttatatactgtttgtgggaatgtaaattagttcagccattgtggaaagcagtttggaaatttctmaaagaacttaaagcagagctactatttgacccagcactcctattactggatatatacccaaaggaaaataaatcattctaccaaaaggacacatgcacttgtatgttcattgcagcactattcacaatagcaaagacatggaataaatctaggttcctgtcaacagtgaactgaataaagaaaatttggtgcatacaccccatggaaaactatgcagccacaaaaagaacaaagttatgtcccctgcagcaacatggatgcagcccttagagatcattattctaagcaaattaacacaggaacagaaaaccaaataccacacattctcatttataagtgggagctaaacaccaagtacacatggacag

SEQ ID NO: 886121 - DNA, 580 bp, Homo sapiens
ataaacataaaaaaagctcatcattactaattatcagagaaatgcacttcaagaccacaatgagataacatctcacaccagtcagaatggcgattattaaaaagtcaaacaacagatgctgtcaaggccatggagaaaagggaacacttatatactgtttgtgggaatgtaaattagttcagccattgtggaaagcagtttggaaatttctaaaagaacttaaagcasagctactatttgacccagcactcctattactggatatatacccaaaggaaaataaatcattctaccaaaaggacacatgcacttgtatgttcattgcagcactattcacaatagcaaagacatggaataaatctaggttcctgtcaacagtgaactgaataaagaaaatttggtgcatacaccccatggaaaactatgcagccacaaaaagaacaaagttatgtcccctgcagcaacatggatgcagcccttagagatcattattctaagcaaattaacacaggaacagaaaaccaaataccacacattctcatttataagtgggagctaaacaccaagtacacatggacag

SEQ ID NO: 886122 - DNA, 602 bp, Homo sapiens
accagaaaaacaatgctggtaatatgacaaaacaagattctttaacacccctgaaagatcataacagctcatcagcaatggatccaaaccaagacaaaatctctgaattgccagaaaaataatttagaagattgattattaagctactcaaggaggcaccagagaaaggtgaagcccaagttagataaatcaaaaacatgatagasgatatgaaaggaaaattcttcagtgaaatagatagcataaataaaaaacaatcacaacttctggaaatcagggacacacttagagaaacgcaaaatgcactggaaattctcagcaatagaatttaacagcagacgaaagaacctcagagcttgaagacaggcttttgaattaacccaatccaccaaagacaaagaaacaagaatttaaaaaaatgaacaaatgaacaaagcctccaagaagtttgggatgatgttaaacatccaaacgtaagaataattggtgtccctgaggaagactcttcttcctcatctaaagtttagacatctaaaagtttagaaaacatatttgagggaataatcaaggaaaacttccccagccttgctagagatctagac

SEQ ID NO: 886123 - DNA, 570 bp, Homo sapiens
caaaagtccacagtccaaagtctcatctgagacaaggcaagcccattccacctacaagcctgtaaaatcaaaagcaagttagttacttcctagaaacaatggaggtacaggcactaggtaaatacagctattccaaatgggagaaattggccaaaacaaaggggctacaggccccatgcacgtctgaaatccagcagggcagtcaaatctaacagctccaaaatgatctcctttgactccatgtctcacatccaggtcatgctaatgcatgaggtgggttcccatggtcttgggcaactccacccctgttgctttgcagggtacagcctccctcctagctgctttcatgggctggcattgagtgtctgtggcttttcccgatacacggtgcaagctgttggtggatctaccattccggsgtctggaggatggtggccctctcctcaaagctccattaggcagtgccctagtatcaactctgtgtgggagccccgaccccacatttcccatacccactgccctagcagaggttctccatgagaactctgcccctgcagcaaacttctgcct

SEQ ID NO: 886124 - DNA, 604 bp, Homo sapiens
tattgaggtgaaattgatgcacaagaaggtaacattttaaagcgcacaatttgattagttttgacatatgtatacaactatgaaatcattatgacaataaggataataaacatttctatcaatctcaaagatttcttcattcccctttgtaatttatcccttattctacctacccccatttccatgaatccactaatctgctttctgttattttagattatttcatgttttctagaatcatataatatgtactcttttactatgtagccccttttacttctttcattaagcataattattttaagattcattcatttgcccattactttgaaaatcaggttgtttgccttattattcagttgcttctaycactctttttattactgagtactattatattgactagacataccacagtatgtgtatacattcagttgcaaatagatgtttgtacagttactagttttgggctataacatactaagctgtgataagcattcgtgaacatgcctttgtattggcatattcttgtatttttctaggtaaatacctaggttgacctaggtttagagtgactgagttgtatagaaggtgtacatttagc

SEQ ID NO: 886125 - DNA, 671 bp, Homo sapiens
gtctttcaactttgtttttgattttcaatctttagctattttagcactttcgtatttccatataatttcataataaaggcctgttgggattttcactgggattcattgaatctacagcaggagtcagtaatgtacagtccatgtgtcaaattcaccccagagtctgttcttgtagtgctttcaagctaaaaatagctataattacacttttaagtggttgcaaaaaacaaacctaagcaaaaaacaaagaatgtataatagagacgatacatagcttgcaaagcctaaaatatttactatctggttcctcacagaaaaagtttgccaacctttgaccttggtcaacctggaaagaatttaacattttaacaatattggatcttctgattactggctgtgctacatttctccatttatttaaggcttcctttattttgaggataatattttgtagatttcagtgtakaaaccttccacaagttttgtcaaatttcagtcttacgtatttaatatttttatgtttttgtaaatggtattgggtttttttttctatttcattttctgggcttttttgccactatatttagttttgtagtattgaaattgagtcaagtgattttgctaaactcattcattagttttactagctttttaaaaaaataaaaaatttt

SEQ ID NO: 886126 - DNA, 594 bp, Homo sapiens
tgaggacacccatggctggacaaggagaacatggtggcgccagaggcttggatattccaagaactacaaagcctcaaagagaatgtcacagctctggcttggggagcccctaggtctgggcttcacaaagggcctcagctcttctcgccttctcattgcccgcaatgtggtgagcagggagcatgtttcagccttgtttgtgttacagcttttttagccccaccattcagtgggtcccaagttcttgtctcacatccaggaagaatgagatatgcagacaactggagggtaagcaagtcagagaggaacttcactgagtggcagaacagttctcaggagatctggagwgtgtagctccttcctgaaactggtagtcacaatttctgtgcggtcctcagtggagaggagacccagagtgggtagctccattctgcaggcaggtcatcccatcatctgcagagccctcagcagagaggacacccacagttaatagctccaatctgcagacaggtcatcgcattgtccaagtctggctgagtccagggtttttatgggcttcagagggaagaaaatgcatgctgattggtccatggg

SEQ ID NO: 886127 - DNA, 628 bp, Homo sapiens
gggaggggctgctgggaaagtctgtgacatgttctggacatgtttacaaacaaaggtggttgaattgactcacaattctgcatggctggggtggactcaggaaatttacaattatggtggaaggggaagcaggcaccttatttacaaggcaacatggaaaagaaaaaaaagraggaacttccaaatacaaaaccatgagatgtgagaactcactcactatcacgagaacagcatggggtaaagtgcccccatgatccaatcaccttcctctcttgacatgtgaggattacaactggagatgagatttgggcagggacacagagtcaaaccatatcagatactatagatatacaatttcccaatatcttgtagggcaagcttcttccctctccctctcttcatgaatgtctttcaaatcttctatttctttacattatctctacttgagtgattaacataaaaattactgtggtttaatatttgacaacactgaagaaatattgaaatttaagttaacaagggaaaaatttaaaatatatgttatataccttaatttgtttatatatatacatgcatatatgtatgtgtaaatatatatgtgtatatatacatatgtatgtgtgtgtat

SEQ ID NO: 886128 - DNA, 534 bp, Homo sapiens
ggcatggtggcgggcacctctaatcccagttactctggaggctgaggcaggagaattgcttgaaccggggaggcggaggttgcagtgggccgagatggcgccgttgcacttcagcctgggcaacaagagcaaagttccatctcaaaagaaaaaaaaaaaaaggaagaaagtccataaaccccacccatgttcaaggggaggggcatctcacattgrccgggcacggtggctcacgcctgtaatcccagcactttgggaggccgaggcgggcggattacctgaggtcaggagttcgagaccagcctgactaacatggagaaaccccatctctactaaaaatacaaaattagccgggtgtggtggtgcatgcctgcaatcccagctactcgggaggctgaagcaggagaatcgcttgaacccgggaggcggaggttgcagtgagccattgcactccagcctgggcaatgagagcgaaactctgtctcaaaaaaagaaaaaaagaaaaaaaaagaaatggctacaggatgtccctct

SEQ ID NO: 886129 - DNA, 631 bp, Homo sapiens
gtcttgctgctcctccacatgatctctctttctctacgtggctagattcagcttcttcacagtataatgatcccatggtagttagacttcttacatatggtgggtggctcttaacaggaagtgtaccaagtggcaaaggcagaatcttcagttatttaaggccttgtctcataaactttaaggcactgcatcacattgtgtttgtcaaatcaagtcacagggccaccccagattaatgaggcagggaaaattatttcttcctctctgctgaatggcaaataatttgtggttaccttcaattcaccacacccattstgcctcgtgaaaaactgagtctagatcaaagtaactagccaatctaaaagaggggctattaaacagttaaaacaaaacaggcaaacacagatgataacagatcactttctggagatccataagaacaaattcaacatgatgccagatattttctaaaatgtacaaaaatggcagaaacaaaacacgtgtataaactcttgtataatcactgtgaccaattatattaaaataactaggcaagagaaaaactaacaactatctagtgcagcacactgcaggcaattaattctatattatggcaatacaaaagcctata

SEQ ID NO: 886130 - DNA, 653 bp, Homo sapiens
acctcgggtgttcacagtattttgttgcccattttctgtttagtgactacttttcaggatcaagacagatgggtaacttggtatggtggcttggggacaaaatagaatgatccatgccagtatctttggagtgaagccttggtagtcctatacagttcgatacgttaaaatattaactcatttattcattaagccttgacttactacttggcatgtgagaggcttgctttytccaactgtaaattgggaataataccagtatctccttgcattcattatgtgatttaaatccacataactgtgtcaagcacagtttcattttccctgtcataacacttatcactacctttatattttacaatatatttatttgtatatgggctgtcttcccctaccagaatgtgagctctgaggaaagggacttggtcttgtaaatttctgaatctccggagcctataagagcagaggtgctcaataattattggttgagtgaattaatgaatacttaataaacaacattggccctaactccagactaatgcttatcatattctaatcttcatttctaatctttctgcttgaatgaccaatagctaccttaacctaatgtccaaacccgaactctccatttccactgcattcccatttcccca

SEQ ID NO: 886131 - DNA, 653 bp, Homo sapiens
acctcgggtgttcacagtattttgttgcccattttctgtttagtgactacttttcaggatcaagacagatgggtaacttggtatggtggcttggggacaaaatagaatgatccatgccagtatctttggagtgaagccttggtagtcctatacagttcgatacgttaaaatattaactcatttattcattaagccttgacttactacttggcatgtgagaggcttgctttcyccaactgtaaattgggaataataccagtatctccttgcattcattatgtgatttaaatccacataactgtgtcaagcacagtttcattttccctgtcataacacttatcactacctttatattttacaatatatttatttgtatatgggctgtcttcccctaccagaatgtgagctctgaggaaagggacttggtcttgtaaatttctgaatctccggagcctataagagcagaggtgctcaataattattggttgagtgaattaatgaatacttaataaacaacattggccctaactccagactaatgcttatcatattctaatcttcatttctaatctttctgcttgaatgaccaatagctaccttaacctaatgtccaaacccgaactctccatttccactgcattcccatttcccca

SEQ ID NO: 886132 - DNA, 585 bp, Homo sapiens
agcaagaaggcttgagaattcttttaggttgaattttgattgtcccaagtctaaacacaacacaacacacacgaaaactcatgcaagtatgtggcacattcagcacccactgtattctttcatctaaagattataaaggagagtatattaggaacaaaaaccggataaacaatggaaataagtcaacacatactgtaggctcttgtaaggattggcagtggaggaagaagtacaagggaatttcatgatgagccctgatctcaaggaacttccatctagatccagaggaaaggttaatctacatgaaacatgtagagcagttaattgccagaattaatctgggttcttataaaaatttagattcctgggcttaccaccaacttactaaatcagaatccgtggygatggggatcagaaatctctattttttacaagctcttccagtaattctgataatcaggccagtttcggaaccatctaagagacaacacaaaaagtacttaaaagagtactagataatttggggttggaggtgaatcaaaatgatccaggaagctagagaataataggatcagttaggcagga

SEQ ID NO: 886133 - DNA, 595 bp, Homo sapiens
aactctccacaatcataaggtgatacttccaaagcaagtgcccaaaattcttcagttggttcccatttcttttaaggaaaaactcaaacattttggcataccttacaaggtgtcttatgatctgctccagcttacgmctgtcatcatgtttttttgccactcccttcattgcactctatgctcctgtcttactgaactgctctccaaacccaaccagtctatgcacttctcccctccctgcctttccttggcctggaacactatctactgttactctgccaacttacttagttaatttttacttaccttgaatttcttttgaaaattgatctccttcaagaagccttccctaactcctcaagtttgtgttatgtgtccctcttatatagggtcctgacatcaactaagctacaatatatcccatttactagtgtagctgcagagcctaaaagagtgcctagcacatactgtattaggtgtccaataaacatctcttgaatgaactagatttttaaatttattttattgaataaatgaataaacaaataaatgaatttaagttactattggaacaaatcaaacccctcatacatgg

SEQ ID NO: 886134 - DNA, 716 bp, Homo sapiens
ctatatctaggaaaccccacagtctcagcccaaaaggtacttaagctggtaaacaacttcagaaaaatctcagcatacaaaatcaatgggcaaaaatcaccgacattcctataaaccaacaacagtcaagactagagacaaatcaggaatgcaatcccactcacaattctcacaaaaaataaaatacctaggaatacagctaccaagggatgtgaaaactctctacaaggagaactacaaaacactgcccaaagaaatcagagatgacacaaacaaatagaaaaacattccatgctcatggataggaaaaatygatattgttagaatggccatactgctcaaaacagtttatagtttcaatgctattcctattcaactaccattgacattcttcacagaactagaaaacactattttagaattcatatggaatcaaaagacagcccaaatagccaaggcaatcctaagcaaaaagaacaaagctggaggcatcatgctatctgacttcaaactatactacagggctacagtaaccaaaataacatggtactggtacaaaaacagacacataaaccaatggaacagaatggaaagcccagaaataagaccacatacctacaactatctgatcttcaacaatcctgacaaaaagaagcaatggggtaaagactccctattcaataaatggtgctggaataacaagctagccatatgca

SEQ ID NO: 886135 - DNA, 561 bp, Homo sapiens
tgctactaaattcagcctcagagatatttaacttttcactttggctcaccttgcgccagactcactgtcttggccaataagctacccagccataaacaagggaaccagggaaaacagtctgttaatactgcttttaagcttgagaaagcctgtcagaaaattcatgactttgaagataattgagctccatgaataccaaagtaaatgttatcaaaggtattatctcaattsataatctcccaaattagataaatttctaagagcctttccactgggacaagaattattcaaatttagccccacaacaggctatagcgtaaagatagggccccatgcctaccatatggtctcttaaagtagaaagaccaaattaatgtggtggatgtgagtaggctctttctagctctgaagaaagatctctctctttctctcatttgtgttcttattctacttggccgcaatctaataatttctttactcagaagattttgtttgttgccagttccccagctatcctctcattgggactatcatttcttctgaaaacaaccctctctttct

SEQ ID NO: 886136 - DNA, 587 bp, Homo sapiens
ctcatagaaagtcctggaggaaaaacagcttgaccaagacttatgtttgtgtggtctgctttaagaaaccaatcagtaatacacttatttattgcaatatgaatctttcagaagaggaaaggaagatagggaagtgagtaagaagagatagctgagtactaggtgagagaaagggaatattcaagttgaatttatggagctcccatccatgcataccaggatcgttccataagccatgtcatctgctccttgtgagatatcagaaagataaagacaagatgaacttgagggaaagagtgagaaaytgatgggaaacaatctagttgagcagttaatagcataagctttgaaatcagactcaggttccagacccagctctgccacttcctagcttaagacaagttaattagttctgtgttgtccagtggaactttctgcaataatgaaaatatcctttatctgagctgtccagtagcttagccaccagccacatggggctattaggcacttgaagtatggctagtgcaactttggagttgaaattttaattagcttacatttaaatttaaagagccacatgtggctac

SEQ ID NO: 886137 - DNA, 673 bp, Homo sapiens
aggcttggctaatataactgcatttggtcctcagaggactcagagtcagatggaatattctgtggtctcgtagtttggtctagcctgccttggcacttgaaatccctttggttaaggtattctattgggtaaaggctttgcttttagttacccattaaaatacaagtgtgccagaactgtagtcaaaagcaatcacataacaccttgacttactgttttcctacattgggttctgaggacctgggaccatgtcagtttggatttggaaagattatatagagaaaggtctgaatcatggaggatctgctgcccagggcaaagtatcacaaagtgaatcagtacaacagtcctgtgcatttgtagaggaaacaagaaaaaaaagacttgaataacracattaaacaataccagttttaaaatttaaatttgtttctccttcactgtgggacttttcttgttgcttcattgtctcacaatggaaggtccaagatagaggatgcagaatgacaacatgaagctgttctaactcccttcataatcaactgattgaaaagattggtaataaacaatgaaaactttttcattggactgattctcttactgaggactttatttggcctttaagtattttctagccaaccttctttatatggatattttaattgtctctgtg

SEQ ID NO: 886138 - DNA, 532 bp, Homo sapiens
ctttcatgagtattaacagctccatttactgcacactatgtgccagatattcttgcaaatgctttacattattagttacagatgcagaaactgaggtacatagaggttaagtagctttccaaaggccacacaaataatggcagaacgagggtttctaaaggcaggctggttctaaagcatatgggcttaacaattatgctaccccatatttatttgcattatctattcttatccccgatcccattttaacaggaattttaatccttaaatgggaaaatacaactacagggctaagtacctttactgtttcctcaagaagccagaagttaatcatcttccattggtattgccasaataaggtttgtcagggcaactgaagaggtatgaacagtagttaaagcacacttctttgccttctagctcacaggatcactcagatttctattgagaacatcacaaggggaagtagggggaaaactatcatattaactcttcaaaattggtagggaggatacactgtgagtacatatgt

SEQ ID NO: 886139 - DNA, 616 bp, Homo sapiens
ttgttttttctgtactgttttcctaatgacccaactttcagctgcacattcacactgctatatgagggtgcatttcagcagctgattctatagtaattatagatattaaggattcagcacactgaggaaatatctcagtgagagacatgagacacaattagaagatactatatataaacacaggtcacatttttataaattatatctgatatggaagaaatggacaagtagtggaagaagacagagatatcacctgcagagaaaagggaaaagctaataacaacaaacacttgctacgctccaagtactggatttattatattaatttattatatggatttattgtrgctaatataaacaaaaacccttggatatagttattattactatccccatttcagaggtgaaaaaactgagacatagaatagtaaattgactttccaaaactcataggattgataagtggtagagctggtacttgaactcaggcaatcaggtctgcagtatgctcttagccactctcttatacgtctctcatggcaaaaagtgtaaatattaaaacataattcaaaaaatttttattgagcacctgcacagttctaccactgtgatgaac

SEQ ID NO: 886140 - DNA, 616 bp, Homo sapiens
ttgttttttctgtactgttttcctaatgacccaactttcagctgcacattcacactgctatatgagggtgcatttcagcagctgattctatagtaattatagatattaaggattcagcacactgaggaaatatctcagtgagagacatgagacacaattagaagatactatatataaacacaggtcacatttttataaattatatctgatatggaagaaatggacaagtagtggaagaagacagagatatcacctgcagagaaaagggaaaagctaataacaacaaacacttgctacgctccaagtactggatttattatattaatttattatatggatttattgtggctaatataaacaaaaacccttggatatagttattattactatccccatttcagaggtgaaaaaactgagacatagaatagtaaattgactttccaaaactcataggattrataagtggtagagctggtacttgaactcaggcaatcaggtctgcagtatgctcttagccactctcttatacgtctctcatggcaaaaagtgtaaatattaaaacataattcaaaaaatttttattgagcacctgcacagttctaccactgtgatgaac

SEQ ID NO: 886141 - DNA, 649 bp, Homo sapiens
tctttatccactctttcattgatggggatttgggttggttccatgattttgctattgtaaactgggtgcaccaaaatctcacaaagcactgctacagaactcactcatgtaaccaaataccacctgtaccccaataacctatggaaaattaaaataaaattttaagaaaagaagtaagctaagaaaaaagagagggagggargaggtgggtactacaccttggcagagggaactgtgtgtgcaaaggtgggagataagagaaggcaaagaacactggagaaatggaaaggaattcagagtggttggcgcatagaatgcgaggatgaaacagagaggtaaacaagagcctgaacaggaagaacatatgaatcatgtttagaagtttggactttatcctcaaggcaagaagagtagctgaattatttttaagaaggagctttaaaattctatacatcttggactttataaaaaacagaatagttaaaagaactgttctaaagttcttttattctctgtaacatactctactccaaaaaattgaattaaattgcaaaataagtaaataaaaataaaaatacaacttctttagattctgataacctcctttcctccatacacagccagatgataatcattgcagtagggaacc

SEQ ID NO: 886142 - DNA, 649 bp, Homo sapiens
tctttatccactctttcattgatggggatttgggttggttccatgattttgctattgtaaactgggtgcaccaaaatctcacaaagcactgctacagaactcactcatgtaaccaaataccacctgtaccccaataacctatggaaaattaaaataaaattttaagaaaagaagtaagctaagaaaaaagagagggagggaagaggtgggtactacaccttggcagagggaactgtgtgtgcaaaggtgggagataagagaaggcaaagaacactggagaaatggaaaggaattcagartggttggcgcatagaatgcgaggatgaaacagagaggtaaacaagagcctgaacaggaagaacatatgaatcatgtttagaagtttggactttatcctcaaggcaagaagagtagctgaattatttttaagaaggagctttaaaattctatacatcttggactttataaaaaacagaatagttaaaagaactgttctaaagttcttttattctctgtaacatactctactccaaaaaattgaattaaattgcaaaataagtaaataaaaataaaaatacaacttctttagattctgataacctcctttcctccatacacagccagatgataatcattgcagtagggaacc

SEQ ID NO: 886143 - DNA, 649 bp, Homo sapiens
tctttatccactctttcattgatggggatttgggttggttccatgattttgctattgtaaactgggtgcaccaaaatctcacaaagcactgctacagaactcactcatgtaaccaaataccacctgtaccccaataacctatggaaaattaaaataaaattttaagaaaagaagtaagctaagaaaaaagagagggagggaagaggtgggtactacaccttggcagagggaactgtgtgtgcaaaggtgggagataagagaaggcaaagaacactggagaaatggaaaggaattcagagtggttggcgcatagaatgcraggatgaaacagagaggtaaacaagagcctgaacaggaagaacatatgaatcatgtttagaagtttggactttatcctcaaggcaagaagagtagctgaattatttttaagaaggagctttaaaattctatacatcttggactttataaaaaacagaatagttaaaagaactgttctaaagttcttttattctctgtaacatactctactccaaaaaattgaattaaattgcaaaataagtaaataaaaataaaaatacaacttctttagattctgataacctcctttcctccatacacagccagatgataatcattgcagtagggaacc

SEQ ID NO: 886144 - DNA, 566 bp, Homo sapiens
tgattttccttgtagaggactttcacctccttgggcaagtgtattcttagctatttttttggtagctattataaatgggattgcctttttgatttctttctcaattagttcattattggtatatagaaatgctactaatttttgtatgtttattttatatcctgcaactgtactcaaattatttattagatttaagagtttttgttggaggctttagttttttagttttttttcagatataagatcatgttatctgcaaagagagacaatttgacttcttgttttccaatttgaatacctttwatgtctttatcttgtcttattgctctggcttggatttccagtactatgtcaaaagagtgttgaaaatatatatccttgtcttgctccagttcttagagtaaaggctttcagcttttctccatgcagtatgatgctagctagctgtgggtttgtcatatatagcctttattatgttgagatatgttccttttgtgcttagtttgttgagagttttaatcatggagggatgttgaattttatcaaatactttttctgtatctatt

SEQ ID NO: 886145 - DNA, 622 bp, Homo sapiens
aaccattttaaaatagtgtttttggaggagtgaatctatgtgaaacttctgtaagctatttgtaggacagccgtgaaaatcctccatgttctatgcattggattttttttcctccttactcacaaggatcatcttcaggttaatrtcacagaaattgggacaacttagtgttcgagaaatagagaaatagctcaaggagctattagataccaacccataccatgttgttttctgagggtgggagaaactagaagaaagtttgacattactctcattccatgagacaacctcaagaacacaaacccaaactatccaggtaggacttttagtttagggagaccaccaaaagaactggagcccatttcctctggtgattcaacaagattaacagcccctcctgaagtttttgtccagtggcctagaatctaaatatgtgctcatacccagttctttgtcttcaattcccgagtcttctgtgtgactcattctgaaagtccaggtgtggaagggagaggcgcatggaggaaaaagccaggctcagaatttatatttgtttaatgccacatgttcccaaactatttctgggctgtttcaaaaactggtctgcacagatattaatctc

SEQ ID NO: 886146 - DNA, 640 bp, Homo sapiens
tttccatgcctttctctttaactgatctcaggcaaaatgtttgtcctggatgtacaatacttaaaagagttgatttaaaatttcctgaaaataagttcatctcagcttttgtgtgagaaaggaagttctatgttggctggtgaccatttcaaagctaccctcagtctcacaattagtgtgcttggcaaygctattggacattggaatgcaaatgttcacatcccaccttgagcttgcaggattttgatgcatttcctttttgttggacaaaatagtgagtattccctaagattacttccagttgcaacctgaacaaagagaaatgcatctaaatatcctgctccaaagcctttgaacttcaccaatgcataactcatgggacacttatcagtttgtataaatgctcacagtatggtgtttctttggatgggagtgttttcagactaagataacttatcacctcaagtcaatactatacagaggttgtacttgagaaatttgttttaaattcattatcattaacatgcaaggcagctgcaggaaattatacaacttgcaaagcatttcaaaacatgttcacatactgatatctgggctgtttgatccagaaacaaagggaaatcatgatctttctggctac

SEQ ID NO: 886147 - DNA, 609 bp, Homo sapiens
atgtttaaacacttgaggaactgccagattattttccaaagcaagaataccattttaagtttccactaccatataagggtatctcattgtggttttgatttgtattttcctggttattaatgacatggaggatcttttcatgtgcttatctttggagaaatatctacttagatactttctctttttgaaaattgagttatttgtatttttattattgagttgtaagtgattatctatctatctatctatctatctatctatctatctatcatttatcatctatctgtctatatctattttctagataccagttccttcttagatatataatttggaatattttctcccattccatgaagtatttttttactttattatccaaggtcatgaagatttatccctacattttcttttaagagatttacagttttagctcttgcakttaaatctttgatccaccttgagttaaattgtttatattgtatatgtatgtggttatccagttgtcccagaatcacgttgaagagactattctttcatcattgaatggtcttagcatgcttgttgaaaatcagttgaccacagatgtgtgggtttatttcttgactc

SEQ ID NO: 886148 - DNA, 606 bp, Homo sapiens
cctcttttcccatttgaatgctctttacttctttctcttgcctaatttctctggctaggatatccagaactatgttgaatagaagtagtgaaagtgggcatccctgccttattcttgttcttgggggaatgctttcaactttttcccattcagtaggatattggcataggtttctcatctatggcttttatttttttgaggtaggactcttctatgcctagttttttgagaggagagtttttatcataaaggaatgctggattttgttgaatcctttttctgcatctatagagatgatcatatggcttttgtttttaattctgtttatgtgatgtatcacatttattgacttgtgtatgttaaaccatccctgcatccctgggttgaagtccacttgatcatgatgaactatctttttgttgtgytgttgaatttggttagctagtattttgttaaggatttttgcatctatgttcatcagggaaattggtctgtagttttcttttttttgttatgtccttttctggttttgataatagggtgatactggcttcatagaatgatttagggaggattccttctttctctatcttttgaaatagtttc

SEQ ID NO: 886149 - DNA, 412 bp, Homo sapiens
gagatggccggatcatagtagttctattttaatttttgaggaattgccatactgtttctatcatggctgaactaatttacattctcaccaacagtatgcaagagttttcttctctgcacacactctccaacactagttaaatatcattgwttttataatagccattctaactggtgtgagatgatatctcactgtggttttaatttacatttctcaggagaatagtaatgttggatttttttcatatgcctacagccatttgaatgtcttcttttgagaaatgtctgttcagatatttggcctgtattttatattttgggttgttttctcactatggagttgtttgacttccttctatattttatatattgactttttatcagatgtatggtttgcaaatattctcccattc

SEQ ID NO: 886150 - DNA, 634 bp, Homo sapiens
gacagtgatttaacatcttggtctagtgtcagaaagggcccaatatatgacaagggtctttgtaggacatatgacaatggaagcaagatgtgggagtgatgggaagatgtaactgtgaggaaaggaatgtggcagcaaggaacagagcctctagaatacacacagctttgctgacacctcttatttaaggggtaaaacatggtgctttcrtatacatagacatagtgtaatggttattacagtcaagcaaatgaacatatccaccctctcacatagttaccgtgtgtgtgtgtgtgtgtgtgtgtgtgtgtgtgtgtgtgtgtgtagggcatctaagatagactctttgagcaaaaatactgaattcaatgcaatgctattaactctagtcctcatattgcacattagatctctggacttcttcatcctacctttctgcagttttgtatcttttggcctgcatctccccattacctctccgacttcactcctggccaccaacatgtcatcctctatctttgtatatctgaagatttttctccttgattctgtccagtaacatgattttggacttctgacctccagaactataagatgatacgtttcttttgttttaagatgctaagttctgata

SEQ ID NO: 886151 - DNA, 634 bp, Homo sapiens
gacagtgatttaacatcttggtctagtgtcagaaagggcccaatatatgacaagggtctttgtaggacatatgacaatggaagcaagatgtgggagtgatgggaagatgtaactgtgaggaaaggaatgtggcagcaaggaacagagcctctagaatacacacagctttgctgacacctcttatttaaggggtaaaacatggtgctttcgtatacatagacatagtgtaatggttattacagtcaagcaaatgaacatatccaccctctcacatagttaccgtgtgtgtgtgtgtgtgtgtgtgtgtgtgtgtgtgtgtgtgtgtagggcatctaagatagactctttgagcaaaaatactgaattcaatgcaatgctattaactctagtcctcatattgcacattagatctctggacttcttcatcctacctttctgcagttttgtatcttttggcctgcatctccccattacctctccracttcactcctggccaccaacatgtcatcctctatctttgtatatctgaagatttttctccttgattctgtccagtaacatgattttggacttctgacctccagaactataagatgatacgtttcttttgttttaagatgctaagttctgata

SEQ ID NO: 886152 - DNA, 597 bp, Homo sapiens
tattattctgaatacaggcagttctcacttttcatggcaatgcaggattgtaaaaatgaccgtgcaacctgaaacctgggaaagcaatctccatatccaattggaaaaacaatgatcattctgtgacttttacaattttttgtcaaaatattagaaacaaagttacaaaygtaggaggcaataaaaatgtaatgaaataaacatttattagtgcactgtaattcaaagcattagaaacattgagagttcaagtgttttattgatttgtaaaaatgtatcaagagtagttggatcagtgcttgccaccttcttgtgcatttctgatatggagcaagcattgtttctaccttggtgtttcatcatcttcctaattttgaatttgtttccaacatcttatcctttgcaatttgtttgtttgtttgttttttaaattatactttaagttctaggatacatgtgcagaatgtgcaggtttgttacataggcatacatgtgccatggtggtttgctgcacccatcaacccatcatctacattatgtatttctcctaatgctattcctccccttgcccccccaccccccaacaggccccggtgt

SEQ ID NO: 886153 - DNA, 597 bp, Homo sapiens
tattattctgaatacaggcagttctcacttttcatggcaatgcaggattgtaaaaatgaccgtgcaacctgaaacctgggaaagcaatctccatatccaattggaaaaacaatgatcattctgtgacttttacaattttttgtcaaaatattagaaacaaagttacaaacgtakgaggcaataaaaatgtaatgaaataaacatttattagtgcactgtaattcaaagcattagaaacattgagagttcaagtgttttattgatttgtaaaaatgtatcaagagtagttggatcagtgcttgccaccttcttgtgcatttctgatatggagcaagcattgtttctaccttggtgtttcatcatcttcctaattttgaatttgtttccaacatcttatcctttgcaatttgtttgtttgtttgttttttaaattatactttaagttctaggatacatgtgcagaatgtgcaggtttgttacataggcatacatgtgccatggtggtttgctgcacccatcaacccatcatctacattatgtatttctcctaatgctattcctccccttgcccccccaccccccaacaggccccggtgt

SEQ ID NO: 886154 - DNA, 657 bp, Homo sapiens
aatttaggactatttagaagtataggctgtcgttggcggcagcagtatattctgaaatgtctcatagatatatatttttgaataaagatggtgttgttgaacaacattgtgtgattttttttttaaactaccctgttactgaaaacagtgcctttctttgtaagcagtgggtgattagtaatcaccaatagagaatgtgctgtyggcacagaatcttgtcccttgggagtttttgtgtctgttagcggcacataaatactcagcatttacgtagtattttctggttctttccaggggcttaattagctttaattaggcagtccacacagtacccatgagaggtgccgccatagttttaccctcattgtacagaagtgggaactgatggagagagattaaatgactcttcccccatacttcacagccaatctctgacagattaaaacttggaagttctttgattttagcgcctttgttcacaccagtaggcctcctgagagcgatttgattttggcagtacacggaaagccacgctgaacagtaaaaagacgaaaaatgtgagataattgcgaacccaagtggtatgtctcttaaaaacagtcatggctttgctttgtccttttcacttgtacatggagtgaaagcatattgactgtg

SEQ ID NO: 886155 - DNA, 611 bp, Homo sapiens
tttcatgtaatcttaagtgtcacatgcccaaaaaggcctctaccaaccatcttatccaaggttaggtaacttttatcagaacatcttgttatttctgcagagcacattccatgtaatcattcactcactcgttttcttgcttgcctcccccatcactatacagggttaattacaagtctgtccttgttccttcacatctgttgttccagcataattaatagcattctctttcactttcagaaatgtcctaatttargctaggcatggtgactcacatttgttaatcccagcactttgggaggccaaggtgggaggattgcttcagaccaggagttcaagactagcgacatggtgagaccccgtctctataaaaaattagtcaggtccgtggtggcacgcacctgtggtcctagctactcaggaggctgagatgggaggattgcttaagcccaggaggccggggctacagtgagttgtgtttgtaccactgccctccaacctaggcaacacagtgagactttgtctcaaaaaaaaaaaaaaagtgtcctaatttagatgataaattatatgactatctataatacatcatttatacataaaatagtgcctgg

SEQ ID NO: 886156 - DNA, 615 bp, Homo sapiens
cccagtgctccgggaagtacctgtccctctaaagagacagtcactactttggatagatgttggctgtcctccacaggcttacagatgcagcttcacagcacatgagagatagaggaaaccgcagacctcagcagggaggccagccctctcattttactgcaagggaaacatatacagaaaagggaagggactcagccaagcatgttttatttgagaagccgtgctattgtctgtctgctggagctgggaagatgagcgtgycctcatgggagcctggtgggatagacagatgcttaaactaacaatgtcactgtagtgtagtcagtggccgtaacttgggctggggataggcaaggctatggggacgagaggaggcagtgctgtgggaccctttgtctctctcgtgcttggggatgaagaacaacagagctttctggatacagacccttggaagaagtgtgtggcttagggcacaaggtcagctgccatgggtccatgggttcaagtcccaagttcattaggttctttgagcctcagcttccatctctgaagtccccaccccatagggctgtttgtgaggctgatataaggaatgcacaagtgcttagcacaaag

SEQ ID NO: 886157 - DNA, 687 bp, Homo sapiens
ttgaaaatttctctaagaagtagagacaagtggaaaaaaaaaaccctaagttttagaatattatcaaatgtcacttaggtcaaagaaaaaactcgaaaatgacaataggttttacagatatatatacgtgttggaagtgcattggatgaagcctgcaaatatatacattacactggtaagagcagtattctggaatggtggagaacagccacgagtttaaatggacatagtattacctgatgttataaattttacaaagtgaatatattcatatatgatttgtacacttataaaggtaaaataataacaataaatgcagttataatctgtcaggtgttgactctgaatcttcattttctttcaaataaaattattcatttagaaaacaaacttattgtgtgtctactctgatttactttcatatgacatctttcaacagaattttttcactgaaagggaaattatgtttttattttgctgatgatgaaagtgaggtttggcttaagtgacttgctcagttagtaaggcmcagagccaggattgaaaaccagctgtttgcctccaagttcagttctctttcaattaatccagcaagtctttactgagcactgtgtatgtcccaagctccatactaggtattggggatgcaacaggagacaggatagacgtgctccctgttttcatggc

SEQ ID NO: 886158 - DNA, 582 bp, Homo sapiens
ctttccactcctctctcaggagagagcacagagagtagcctggctgtttatgtgagaatgcaggcaccaaaagcctagtaagcaagtaagatcacatggtcttgcattcaagtcttgtgtaagctatacattcctgagcttttaagaataacagacrtgggtcttctttttttatttaaaaacatttttattcttaagagagacaaggtctcattatgttgcccaggctggtctcgaacttctgagctctagtgatcctcctgcctcaacctgccaaagtgctaggctactggtgtgagccactgtgtctgacccagacatgggtcttctatggctgtacactccccagcttcgcctttagatccaaggcctgggcagaaaactagcagtgctgtgaaggaacatacggccagacaccaagccaagtgcctcagggctctgttttccttcctggcttgcccatgcacatttaacttctgccacttcagacctgcctggatcctcagaccaggccccgttaaggtcatacccttatctatccacctgtgctggcaaagtaaactctgctggacttttaccttg

SEQ ID NO: 886159 - DNA, 646 bp, Homo sapiens
agagataagatgataaaactgaggcccagagaagtgatgtaactctctcaaggcacacatctattaagcgacaaagactctattgaaaatctttctctctgcgtttgttcacactatctcctcaggcagggacttgcctagctcagatcacaaaacccacagggtcagcaatattttcccatcctggccaattgtatgtacagcctccatccttaagttacttgaggcacatggccctctcctgcaactgaagagaagtgtgactgagtctgcagctgaattcttccatctccttctcatcttttacatctcactagaaccctgcaattagcttgtgagacagggcaggatggtgaatatcaacatctcatatttacaaatgagaacacttaggctgggagctaagcgacttccttaaaatcatgaagtaagtggatattggcggtggaaaccccaccttcctgaaaccaagaatatcactgcrtcacttgaatttttatatacttgagtatttgagcatcaattcgctatccctatatatatatatatcccctatctataatagatagatgaagaaattaaagctcagagacatgaagtaactctcagaagttctcacaacttagaagagcagattagaatcaaa

SEQ ID NO: 886160 - DNA, 599 bp, Homo sapiens
aatatcagctgggtgtggtggtgcacacctgtagtcccagctactcgggagccaggagaatcacttgaacctgggagttggaggttgcagtgagccgagatcatggcactgtacacaagactccatctcaaataataataataataataggaagagtatgaccattttttacttcaattgtaaacttccattttaaacttcaattgtaggtgtatctttataacagatttgaatacaaacataaataaatacacacacagaaaaatagaagatgcatcaaatgttttaggtagctcaaaggagtggaagataagaattttgtgaactccatamttctgtattgtttcaatattttatactgttttgtattttttaaaaggccttatatgaaataaaaaacaaaaacaaaacaagcaaaataaataaaaaggcctcatcagctttccccccaaatccacacctcaaatcttcttgactgttcattctaagcccaaagcctccacttccagttcaacaacccctacctaacttcaggccttattagtctcttgcgtcctgcttggtttctgtcctagcactgctccacctggtcatcccag

SEQ ID NO: 886161 - DNA, 598 bp, Homo sapiens
agaataattactcaagatcgtccaagattttgttctgcctttcttcactaaataccatttccttttttgagataaggtcttgctctgtcacccaggctggagtgcagtggtgcaatctcagctcactgcagcctcaacctcccaggctcaaggaatcctcttacctcagtctcttgagtagctgggactacaggcatgcaccaccgtgccagggtttgttgtgttgttgctgtttgtacagacagggtctcactatgttgctcaagctgcctttgctmttaaaagtttttttaaaacattaactttggaaaaccctcatgccatctcatcattacagatatactataatgtatttttttaaatttccctattgtttgatactcaggttcctcttccaaccacaacaataaacaatattcaatggacattctttcatataaactttttattcacccacaaatatctatgtgtctattatgtgtccaccctagcattaggttctaggaattcaatggtgagcaaataattatgcggtctttgcccttgagaacttataccaaagcatttaaaatttcaaccttgaaagtgcttcagatga

SEQ ID NO: 886162 - DNA, 598 bp, Homo sapiens
agaataattactcaagatcgtccaagattttgttctgcctttcttcactaaataccatttccttttttgagataaggtcttgctctgtcacccaggctggagtgcagtggtgcaatctcagctcactgcagcctcaacctcccaggctcaaggaatcctcttacctcagtctcttgagtagctgggactacaggcatgcaccaccgtgccagggtttgttgtgttgttgctgtttgtacagacagggtctcactatgttgctcaagctgcctttgctattaaaagtttttttaaaacattaactttggaaaaccctcatgccatctcatcattacagatatactataatgtattttttwaaatttccctattgtttgatactcaggttcctcttccaaccacaacaataaacaatattcaatggacattctttcatataaactttttattcacccacaaatatctatgtgtctattatgtgtccaccctagcattaggttctaggaattcaatggtgagcaaataattatgcggtctttgcccttgagaacttataccaaagcatttaaaatttcaaccttgaaagtgcttcagatga

SEQ ID NO: 886163 - DNA, 596 bp, Homo sapiens
acacaggtttgaggaccatactttgagaagcacaaccccaagttatctgagctgttcttcactcccagaaaatcaacttgccttattccagaggtcaacactcaaactctaccctcaactcctaaaaaatcaaattccagctattagaacttcagcagtaggaaacagtctggtgcctactatacatagatatacaaatgaaggaccactaaatagagaaggctgagcgggtcctctgagcgtgatgataaagctgaaacattttaaaaacagccttagggatgaaaatcttcaaagcaacataaacataaatttaaaaatggctaaacagagtctacatttataacatttgcttattaacttccttttcttccttcacagactttcaaaaatccctatggctggaaaaggcttggaggtttctctctccattacsattcatgcacctgcttcctcttctgcaaccacccctaactttcctgcagaactaccattagataaataaagtttattttatttcaagatttttaaagacaggtattttgtgcttctttattttcttttttcttttttttttttaattgaggggtcagggg

SEQ ID NO: 886164 - DNA, 615 bp, Homo sapiens
gttatctaggagtggaatttccaggtcatatggtaaacattcgtaagtcttactgaataaaaattaaaatttttattgcctgcccaactttcccaaaaatttaaattaagccttcactccaagcaaatcatattcttggtattatatacatcaccttaataaaggttagaatctttatggaccagcctttcaacaaagttaaacaaaagtagcacagcgctgaatggcaaccaaaggtgatcacataagtagtctgatctttacttgcatcccttgaggaaaacttgtggtaaactaagttatatcccaacactttatagaatcttcttcccttttatttctaatttttctaacctcccctacaaaaratgaacactctcttcgctcacacatgcagcatctcatctgtttcctcctctttcttcttctccagtcctttattgtgtcctctatagagcttctctgacttgtccgtgtgaaaggcactgtgtgcagaaaccagggacatgcctctaggtcttcaacaccaaaacttgctttcagaaaaataattgctcaaccagtcatcccattgaaaaaatatttgtaagccagtttctttcacagcttagaggg

SEQ ID NO: 886165 - DNA, 610 bp, Homo sapiens
tagaaagttctcaatacatatttgtcaagtgaataaagataatcttatgaggtggtatagtcttagactctacttagttttcaggtaagtaacaatactaaatttaaactaattcaggcaataataagtaaacagatgaggtgactctctctcttcatcatcatcatctcaggccattttcttcatatggatggcttcccgatgaattatgtaaacattaccagtttattttccacccttccattcacccatctatccactcatccattcatccacccacccatccatccatccatccacccatccatccacatatccatctatcaatccaaccatctaccccactcatccattcattaatccatctatccatccatcaatycaacaacttatttattgaaccacacttctacgtttaagcacttttatcagagctgtacatggagcaataactaagactatatcagataagatgtttttcccgcccactcacataaaatatgacaaagaagtgggagatatgcgagagaaaaggcttctaagtacaggaaatgacgaaaacaaatgttttgatgaaaagctgtgctaaatgtgtttaaagaacagcaag

SEQ ID NO: 886166 - DNA, 610 bp, Homo sapiens
tagaaagttctcaatacatatttgtcaagtgaataaagataatcttatgaggtggtatagtcttagactctacttagttttcaggtaagtaacaatactaaatttaaactaattcaggcaataataagtaaacagatgaggtgactctctctcttcatcatcatcatctcaggccattttcttcatatggatggcttcccgatgaattatgtaaacattaccagtttattttccacccttccattcacccatctatccactcatccattcatccacccacccatccatccatccatccacccatccatccacatatccatctatcaatccaaccatctaccccactcatccattcattaatccatctatccatccatcaatccaacaacttatttattgaaccacacttctacrtttaagcacttttatcagagctgtacatggagcaataactaagactatatcagataagatgtttttcccgcccactcacataaaatatgacaaagaagtgggagatatgcgagagaaaaggcttctaagtacaggaaatgacgaaaacaaatgttttgatgaaaagctgtgctaaatgtgtttaaagaacagcaag

SEQ ID NO: 886167 - DNA, 613 bp, Homo sapiens
tgaataagcttatagtgctgctttggagaaagcaaacagcctgaaaacaccttgagctttggagaaagaggggagaaatatattttacttaagacaggactttaaatcaaatacatatgaggttatgaaggaaaatgaattaaataacgtgacagtgagatgtttatagtgctgtctggtggccagtgaaaggtgactccttgatatgcttctgcccatctgttttcattttccttggccatattctttccatgaccttgagatagccatgtagccttctgtcttggcgtttttggttagacatctatcaaataaaaattattatttcagcccctgttttctttagatgggtagagaataactcaaaaatgaaaytctagacctgaaaaatcatttaagaaataattctcaaatttgcctcttctctccacctacaccactacctctgtaatcaagctaatcatctctcacttactgtgtgccttagcttcctgactggtcttggtgattccattcttgtccccagcacacttgatcttcatattgtcactggcgcaaccttaatataattactgaactcttccatttaacacacctcaatggcttcccagtt

SEQ ID NO: 886168 - DNA, 624 bp, Homo sapiens
ctttgcatagcagctgctttctccatcattataattcagttcaaatagttactcttaagagaggacttccctaggtatgtactactggctatttactctgtgcaatgggtggctcacaaaatccctgaataattaacaatcggtttccatttgattatttatattctattccacggcttatttactttatagaatttatccaaacctgaaagtatcttgtttatctattagtttacccttgtaactcctgtcttctcccactagagtgtgggccccatgcagtggtgggctactgctagctcatacaggctcatgagagctgattgtcaaatatgaggaattttcgtgagctagttttacacttgaagcttgaaattggtcatggcagatatacttgcaacayggaaattggcaaatgctacaagtaaggactttttttaaacaaatttcccagtgagttggcccactagtacaccactggccccatgaaagcagagatcttctttcctttttccctcttgcactgttagcaccaggttgcagttagtaagttgttggatgagcgcatgcatgactattattactttagacaactccttttttgtctcaaaaacaaaattcaaa

SEQ ID NO: 886169 - DNA, 567 bp, Homo sapiens
tacttagagttctatcagaacacatcatacccattcatttaatgtctacgcttttgtactgcaatggcagaagtaagtagtcataacagaagctatgatgaagggtctccaggcctaaattatttactgtctggccctttactgacaaattctgccaatccctggcttagaaaatccattaacttttgaaaaggtagtaaaacacaaaagcacaggccatcctaatactcttagttgcatgttgcaaacaaacatcaatcagcagactcctcrgcacattgtctatttatagtccttcctttagtggtcccagaaagatattattctgtggctgcctactcctttcttgttttcatacttagcaagcctgagacatggtgagggtacagagcttctctaccggctctgagatgagtcccttcacctgcttttggccatttgctctcaacacacctgattgtacaggtggactccatccacctggagcatttgttggcttcctaaacataatctgaagtctaaatggatggatatgcctctttctcagggcaaggactaatatgaggg

SEQ ID NO: 886170 - DNA, 642 bp, Homo sapiens
gctgtgactgattcatgactgaagttcccatgaggactaacaaacttgtgtggggaatgaggaaagagagtagcccttagcatttgaatgatataacacaacgatatcaatttagggaaaactgaagcccataatacttwgcatttttataatggaaaagtgaaatcctcccagggttaaaaagccatatatatgatgtgaatgggaaggctctagccttcatttgttacgttataataggaaccccacgtgcccctctctcaaatttcactttgttcactttcacagagtgaaattactgtgctacaaaactgtcccaagggactaactcccgaaatgtgtctgctgagctactacggagtcacaaatgacagagaaaatgctttgcagtatttgttggaagccaggcactgccagattcaatgcaattgcagaaattcattacacatccaaatctctaaaatgccgagtagaaaattacttacatcgagcctcagcagtaggaaaaggtgagtctggaacaatgtccaggaatgaaatgacctcattcaatttagcgaatattgaccaaattcccaccacgtgctaggaactagaaatgtaaatattaagtcaaataatgctgagcacctactgtgtgct

SEQ ID NO: 886171 - DNA, 642 bp, Homo sapiens
gctgtgactgattcatgactgaagttcccatgaggactaacaaacttgtgtggggaatgaggaaagagagtagcccttagcatttgaatgatataacacaacgatatcaatttagggaaaactgaagcccataatacttagcatttttataatggaaaagtgaaatcctcccagggttaaaaagccatatatatgatgtgaatgggaaggctctagccttcatttgttacgttataataggaaccccacgtgcccctctctcaaatttcactttgttcactttcacagagtgaaattactgtgctacaaaactgtcccaagggactaactcccgaaatgtgtctgctgagctactayggagtcacaaatgacagagaaaatgctttgcagtatttgttggaagccaggcactgccagattcaatgcaattgcagaaattcattacacatccaaatctctaaaatgccgagtagaaaattacttacatcgagcctcagcagtaggaaaaggtgagtctggaacaatgtccaggaatgaaatgacctcattcaatttagcgaatattgaccaaattcccaccacgtgctaggaactagaaatgtaaatattaagtcaaataatgctgagcacctactgtgtgct

SEQ ID NO: 886172 - DNA, 635 bp, Homo sapiens
ttttccagtggatgatcagctacagaatctctctgaaatcagagttccagtaagtcactaccaatcaagtggagctagcaagactttaacaccggcaactcagagaaagctgcccaggtaaacagaattatgtaaattggcagccttttcctacttgtattatttttaatattaaattttgcagattatatacaagatttgtttgtaagatttaacttrtaacctgcttaaagaaaaaaaaattctgaaaacaaccaaatgggaattttttcttaaagtcgaaatcattttacttatttcaacctctcactctaatatccttgtaaagttcacaaaagcctcaattcagccatagattcagaagctggatcacctctgagctctacagagaacaaacattctctttgttttgggtggggtagtttttcaagatttttaaggaacattttaaatggctccaaactttatataataagctttatgatgaaatatctggctgtattatggcgctgactcttttgcctattaaatcatattctctttactccataccagtaaaatgtggtgctatggctctctaactttagcatggagagttacaaacatggttgatctatttcttgcactttgagcaa

SEQ ID NO: 886173 - DNA, 696 bp, Homo sapiens
accagcatggctggaatagaataaaggagtagaaaggcagttggcaaaaataagccagacagaggggatgccaggaaatgggtggggaagagctgtcagccattgtaaggcttctgactttttctctgcaacaggaagttgttgctaagacctcacagactattccatctacttcacaatcacaaaagcaaagacatctctgagtgagagattgacagaaggaaaggacagggaataggatgaacaaaaatcaggaaaatgttgtcttgacagcttaattgttgctttgcaattttcctcccttatcttacttttacccagtgcaatttgataccaaagtttttcaagtgagtttcatcaattccttttatttctttatcacaatcamatgaacctaggcaccaagaccacaggctgatcaaaataacagagaaagaatgtaggttttttaaaatatgaaaatgtggttccatttttggattcattcacttaggttaatcttgattatggttatttggtgagaaatcaaatatttttgaaggccagaagggaatgtctatttggataaaacatgttgaactaaatatggttcaccaaattattatatttacacattgtccacacaagaaaaatctgaaatctccagtttcggcgatcaactttttaacctttcaaggaaattttcctgtagaaaga

SEQ ID NO: 886174 - DNA, 696 bp, Homo sapiens
accagcatggctggaatagaataaaggagtagaaaggcagttggcaaaaataagccagacagaggggatgccaggaaatgggtggggaagagctgtcagccattgtaaggcttctgactttttctctgcaacaggaagttgttgctaagacctcacagactattccatctacttcacaatcacaaaagcaaagacatctctgagtgagagattgacagaaggaaaggacagggaataggatgaacaaaaatcaggaaaatgttgtcttgacagcttaattgttgctttgcaattttcctcccttatcttacttttacccagtgcaatttgataccaaagtttttcaagtgagtttcatcaattccttttatttctttatcacaatcaaatgaacctaggcaycaagaccacaggctgatcaaaataacagagaaagaatgtaggttttttaaaatatgaaaatgtggttccatttttggattcattcacttaggttaatcttgattatggttatttggtgagaaatcaaatatttttgaaggccagaagggaatgtctatttggataaaacatgttgaactaaatatggttcaccaaattattatatttacacattgtccacacaagaaaaatctgaaatctccagtttcggcgatcaactttttaacctttcaaggaaattttcctgtagaaaga

SEQ ID NO: 886175 - DNA, 622 bp, Homo sapiens
gctaaaatggacttaagttcttagctttgttggttaaggcactatttttgtgctggttggcctcctgccaggaggtggcgctttccagaaagtatcagctatggttgtatagggaggaacaggcggtgggcaggaccctagaactcccaagaacgtatgccttttgtctttagttacggggtgggtaggaccattattgggggccgagcyagacgtgtatgagctcagactctccttgggtgggtcttgctgcagctgagtatttggggtgtctcccaggtcctgcaggaccaatctgcttcctttagtgggtctgtgagttctctcaggtttcctgattgattcctgcagtcattctggagcaaatatttatgatgcaagactccacatgctgctctgtccatctgagtcagagccgctatctagtcctgcctgccatctgccataatcaaaatagctcgtcaatccctgacttttgataactgtatgaaccagtaattaatacatccttctgttgcttgaaatgagctgaccacattactctttagctcccctaaaacccttcataagaatttgatgccaaccaaagaaaatagatattataattaagaagattttctaa

SEQ ID NO: 886176 - DNA, 636 bp, Homo sapiens
tattcagataattgtataatatcaaagctgaagaggtccgtggtaattatccagtcccgctatttcattttgccaataaagaatttgaagctcagagaagttaagtaattaaatctgcattatctaataaatcagtgtcagagtctgaaacagaacccagagttctgactctcagtcttcgtcctcttctgctacaccatcttgccccctgacatcattgcataattttatctctggccaatcatcttgattatcacaatctttgcccttgaaaaaaatcctgatctgttaacctggcargtgctctcccataagcatagtcaagtggtgtcacaattgctgtttacactaatcataatgtactattcccatgagaaacttatacataaaatgtgaagtactctgtctccatattctcagttttaacctgacacaccctcctccaccaatcaaataatactcccaaagttccattggaacttctggactgtagctataaaatacatgagaaaagatgccggattttataaatatgtgcctgtaacatcacactagacccacctgggtgtcaacattttccccctatttagaaggccagaaataaatgtacatgggaaaagaatataggtagaattt

SEQ ID NO: 886177 - DNA, 601 bp, Homo sapiens
ctgccattacagattaacacagaatagttccatttctctaaaaatctcctgtacttcacctattcattatttcctcataccctccccttgtctgtaacccctgcaacagctaaatttttactgtctatacacttttgcctttaccagaatgttatatcgttgaatttatacaatatgtggcyttttgagactggcttctttcaactagcaataaaatgcatttatggtttctccatgtctattcatgacttgatagctgaagtttttaacacttaataatatgttgttttatgaatgtaccccagtttatcccatccacctattgaaggacaccttggtttctttgaatttttggcaaatgtgaataaagctccaataaatatctgggtgctggttttgtggggatatgttttcaaattatttgggtgaatgcctaaatgtgtgattgctgaatcatgttaagatgtttagctttgttagaaacttccagtctgtcttcaaaagtgactgtaccctttttcaattccacctgcaatcaatgatgctcaatattctcaccagcattttatggtgtcagtttttttgtactttagccattcta

SEQ ID NO: 886178 - DNA, 603 bp, Homo sapiens
gaactttccctatcacagcctaaaaagcactcagacatttttatcagcattccaaggcaaagattcattggatagagtattttttccccaacgtaatccagatctccctttagaagacgctgggaatttacacgagaaatggggcaggccaygagcaaaacaaaaaaatgactgatatccttcttcggctttcatgaatttttcttttagctttggcccccacctctactactgatcaaaattccagggcttataaagtgctggtgctcagctaggattacgttaggataacagaaagttgagtcactacaggaagacactgaagttggcttaaaggcttaattatctccacccagacctacatttatgcataaaaagctaccaagctaggtaaatctttaacagtagcatggcaggctgtgccacacaaagaatcttaagtcatgtaaatcaaattataaagaagatttctgccttgatatttccagaagaccagtcttgatcaaaatctcaggtgtccagttttggagcttcccatgtggtgaaatatttgacaaccagctttgagggctcgttgcttccctttgaaaacaccacagacct

SEQ ID NO: 886179 - DNA, 603 bp, Homo sapiens
gaactttccctatcacagcctaaaaagcactcagacatttttatcagcattccaaggcaaagattcattggatagagtattttttccccaacgtaatccagatctccctttagaagacgctgggaatttacacgagaaatggggcaggccatgagcaaaacaaaaaaatgactgatatycttcttcggctttcatgaatttttcttttagctttggcccccacctctactactgatcaaaattccagggcttataaagtgctggtgctcagctaggattacgttaggataacagaaagttgagtcactacaggaagacactgaagttggcttaaaggcttaattatctccacccagacctacatttatgcataaaaagctaccaagctaggtaaatctttaacagtagcatggcaggctgtgccacacaaagaatcttaagtcatgtaaatcaaattataaagaagatttctgccttgatatttccagaagaccagtcttgatcaaaatctcaggtgtccagttttggagcttcccatgtggtgaaatatttgacaaccagctttgagggctcgttgcttccctttgaaaacaccacagacct

SEQ ID NO: 886180 - DNA, 603 bp, Homo sapiens
gaactttccctatcacagcctaaaaagcactcagacatttttatcagcattccaaggcaaagattcattggatagagtattttttccccaacgtaatccagatctccctttagaagacgctgggaatttacacgagaaatggggcaggccatgagcaaaacaaaaaaatgactgatatccttcttcggctttcatgaatttttcttttagctttggcccccacctctactactgatcaaaattccagggcttataaagtgctggtgctcagctaggattacgttaggataacagaaagttgagtcactacaggaagacactgaagttggcttaaaggcttaattatctccacccagacctacatttatgcataaaaagctaccaagctaggwaaatctttaacagtagcatggcaggctgtgccacacaaagaatcttaagtcatgtaaatcaaattataaagaagatttctgccttgatatttccagaagaccagtcttgatcaaaatctcaggtgtccagttttggagcttcccatgtggtgaaatatttgacaaccagctttgagggctcgttgcttccctttgaaaacaccacagacct

SEQ ID NO: 886181 - DNA, 625 bp, Homo sapiens
tatgtatttcagggcaaactaatgtcaagggagggaaggcagttcctgtctttttgctattttttaagcaatcctctccaatagggctgcttctgaaaataagtttctaattaaacttcccatactatattgcagttaaatagggtaaaatttgctgtttgatgtattgagaaagcatgcaaacattagaaggcaatgtgaaggttgctagaagcaatgtgaaaccacaatttcctaggcattacgagtaattattagcaggcaagttgttgagttcaaccagaaaatgctttagttgtatcttgttgtatatcaggaacagcctaggtttgcattccatgtaaaaggagaagagaccactgttccagttggttttccaaatagaagtgaagaaaccatgaagatgtccctatatccagtcccttagccaggaycagttcagttggagcatggacagtcaaggaggctggagttctcccagtaaaggatagtgtaaggtttggacagtgtgcctttttactaattttggcaagaacatcttccagtaacagaaaagatattatacatatggtaagtagatggttaaaatccagtcctgactctgccttgtccttttttgaatggg

SEQ ID NO: 886182 - DNA, 649 bp, Homo sapiens
cttgactctgggatacagatctattttaataatgacatgtgtcttcttatcccttgttccagcctttttgttttccttatatattattgttattaaacatactattaattccacttgtttattttgtttctgtctccccccactaagttgtaaactctgtgaaggtaaggatttttatctgttttattcacagttgtatatttagtacttagaacacgggtgtggcatatagtatgccctgaatacatgtttgttgaataagtgaattccataatgttaagtattagatgtgatatcaagtaaccagcaatcatccactgtatttacaccaccaggtcgagtgctcaaatacatcaaaggaatgtgtgactgccagtgtcagcytaaggcacctactttccagagataagaatggaaccaactcttactccttgcttaaaggaagcccatcatcatttctcctagatcctagggagaaggaggatctattcccatggttgcctctcactctgaacatctgcttctcccttggtcttgggtcatcttgccatatccccattctgaaccagaaggatccagattttgcattcatctacagtcacccacagggtgttaatggaagattaaggagataattcaggacacacac

SEQ ID NO: 886183 - DNA, 660 bp, Homo sapiens
agtgaggccagatgaagtagaagtaaggtctgcaggctggagtttcatccagagaaatcttcttggctgtgaatcagtacaggagcataaggtggggacagtgagggatagtagtaggaatggcaacagaaacaaaaagaggagaaagggtagcttctaggaattgcttaaagagcacaagaagaatgtggaagttaataaaaggaaactattggtggtgacagaagccaatgatgttggaggctcttgttaatggaaagctaccttgagaattgagtataagccctaagctttgcattttttaaaaatggaaagcagccatttcatatttcaagagtgttctcccttaagaaaatgaatggtatacaagctatttctattgtggtctgtgagccacagcttcctaactgtgtaaaagcaacacttggctgaacagtgactacaagaagaaaaaaaactaccacttttacagcacaatgaaaagaaygaaaaaaaaggaaaatttcctttgccatggaatttcctgctggatagaattattcacccatccttttcttctagctgtcatgactagttagggtgtagaacaggtaccacctctctttggtataatgccacactgaattaatccaacttggagtcatggatcatgggagccta

SEQ ID NO: 886184 - DNA, 566 bp, Homo sapiens
cagaagccagcagaggcatccaagagttgaatttctgtgggtcaactgggaccaaatgccctgcataagtagcagagtaccacaggctcaccaactgaacttcataaaactggagcgagctgggtgggatttcactgttcatgaggggagactgaagaaggctgaaattcttgcctgaaatggtgactgcagatagttgactggttgacagagtgacatatagcagccatgcacagaacttgtggaagcctaagactggctcactgatggaatcactactcccctaatagctatggagcagaagttatgagacccaatataagttctggttctggactgagaatccatggggactcaggtgggggcaactgcaaaacaaccagggagaaatgagcaagagaaagacagagggaaattttaaaagayctttaagataaatatacaaaataaaatttcaaaacaaaggacaaaaattaacaaaagaaagtgaataacagcaaacaagtaagagatgaaatgactcttgagagaatgaaatggtagcctactcaacataatttttaaaa

SEQ ID NO: 886185 - DNA, 588 bp, Homo sapiens
atgttcatcaccacaccgttcacaacagcaaagacatggaatcaacctaggagctcatcaacagtggactggataaagcgaatgtggtacatatacacaatggaatactagaatgaaataatgtcctttgcagcagcatgtatgcagcgggggcccttatcctaagcaaattaatgcaggaaccaaacactgaatactacgttttcacttttaagtgggagctaaacattgagcacatrtggacataaagatgggaataacagacactggggactactaaagggaggaggaagggaggtgggcatgatttggaaaactgcctattgggtactatgcttactacttaggtgatcagatccctactccaaacttcagcattgtgcaatatacccatgtagcaaacctgcacatttaccccctaaatctaaaataaaagttgaaattattttaaaaaatttttaaaaagaatctttagtcttttccatggtaacattctatgaacttaatgtccgcagcccctatgactttcatttcccccttctttcctaagatggcttttcagtatagaaaaagattctgtgtgtagtt

SEQ ID NO: 886186 - DNA, 658 bp, Homo sapiens
ttatcaaaaataatctaaaattatgaggaagtagaataaagtccctccatagacctgatttgcctcctttcaccaagagaatgttacagattggatggatatggaataaacactgttggtcctgtatcaatggctagagtttaatttgaatataatagtgaattatgcttaatgacattaaaaattggccaggaacggtggctcatgcctgtaatctcagcagtttgggaggccaaagtgagtggatcactaggtcaggagctcaagaccagtctggccaagatggtgaaagcctgtctctacaaaaaatacaaaaaattagctgggcatggtggcaggtgcctataatcccagctactagggaggctgaggcagagaactgcttgaacccgggaggcrgaggttgcagtgagttgagattgcaccactgcactccaacctgtgtgacagagcaaaaccccatctcaaaaaaaaaaaaaaaaaaaaaattaacaactaaaatcttggtaaccaggtagccctggcctgttcctcagtagctccctgagtgcaccacagacaaggagctttgaaattctactccaaacaccagagagcacacatcttcgaatgcagtactggggactcttcaagggtcaatatgtatgggcatcaaaaa

SEQ ID NO: 886187 - DNA, 503 bp, Homo sapiens
gccatgatatcaggatttttgagaatttcaatgggattaaatctggcaccatttctgctggtatctttctttatcaaggatgaagtgcatacattacttgatggatacagagtagaaagaaaatcaatttagagaaatttggacaatatgttattttgatttccttttcactgcctcagttacaacttttggatggtagggaagtgcagagccgggatttakctgaagtgcaaaatttaagaaggtgccaaaaaatcgagtaatcaagaaatatagtattttaatgcaatttttaattatagtaaaagcatttaacataaaatataacatcttaattatttttagaatacagtttaatagtgttaagtacattcttattgttgtcaaacaaatatccagaaatttttcacttgcagatctgaaaccctacacccactaaacgtgaactccctttttttctcctctccacagtctctggtaaccaaagttctgctttcagtttc

SEQ ID NO: 886188 - DNA, 643 bp, Homo sapiens
tattgagttgaaccatctttatagagaaaaaacttgatatgtctgtaccattttttgacatttgttttctaaacagtctgaggataatcagcaacaagtattttccaagaaccctcagacagtttggtaggattagagacatgccaaactgacagcctcttagaattaatggttctacctggagtaagaatgccacctcaaaaatrttttatgaacatatccacttatttttttagttaaaacattcttatgagcttgtaatgtgtgccaggcattgttcctgaaacttgctttagagaagataacagataaaaattcttgtcgtcttggagtttacattcttcgaattagaaggggagacatagagaagacaataaacataatacttaaatcttattgtgtattacaagatggaaagttccaaggaaatcaaagtagggcagggtcaggggtattgagagttaggagggtggtgcgagtagactgcactcttaaattggtgctcctttgcatagcaattcttaaatacccctttctttgccttctgtaggagtctacaaagtatttttttcttctgcaaagatccagaatataaatattttaaactttgtgggccatatagagtctctgtcacatttttttt

SEQ ID NO: 886189 - DNA, 613 bp, Homo sapiens
tttgctaaatagaataattttgctctatggctcaggaaaaaaagagcaggaattggtaataacttccttctaatcattatatcattttttttatggcaaaggagaaattttcaaggccttgaatactaataaggtgccatactgctgacaggaaccatgtatagtgagaggagttcatacctaacttctgggcaaacttycctaaaaaagccacactcttccatatgcatgagaaaagaggaggaggaaactcttagatacaacctgaatattggtccctgtctcctgctttcataactcttctctctcctttcatggacctcttttctattttctctcagtagctcagaataccatctaccttcctatttaaaacctatcttgctcacctcttatcttccaactctatacttaagtcaagaagatttttaggatattctggaggtgcaaaccttaggcctccaaaagagcaaaataatctaaataagtgaatgagtggatgcatgggtgaatcaataaatggatgaataaatgaataaataaaatatgttccactctctcttcagccaatcccaacaaaacagaaataatacaataaactttcattcacctt

SEQ ID NO: 886190 - DNA, 613 bp, Homo sapiens
ctcacacctgtaatcccagcacttgggggggctgagccaggtggatcacttgaatccaggagtttgagacccagcctgggcaacacaatgagaccccatctcttaaaaaaaatgtataaatgaggcaggtgtggtattgtgcatttatagtcctagctacttgggaggccaacgtgggatcacttgagtccaggaggagttcaaggatgcagtgagctatgatcataccactacactccagcctgagtgacagagtgacaccctgtctcrgaaaaacaaaaacaacagcaaaaatacaaaccaaaaaacagaaaacaaaaacccaacctattgtgtctaattttttaaagatctctcaaccttgcttaagtgaccaacacttaaatcttctctaattgtttagtttacatttatttcacctcacaaaataaattgcaagattcttaagaactatatttgtcactgcatgattataccatcatcatcatagtcatcgtatcattcttatcttcatagctaacagttgtatagaacttaccatttgctgaatactcttctaagaacattaagcatataaactaatttacatattttatggttcacaacatctcta

SEQ ID NO: 886191 - DNA, 605 bp, Homo sapiens
acaaaattaatttctcagaatgatcattagtatgagcactatatgcattcatgaatctccaacattatgtttccttccctttattttagatgcttttaaaacaccaaaataaattttccttttcctagcattagagcaatatgtgtgtgtgtatattgcattcatgtgtacatatataaaataagggaatttggagaatacatataagtgcaaaagatgaaaattaaaaagtccataatcccctaacccataatcattgaaaaagatattcttcacttgctataacataaaaatataccattcttgatgagaaaaaaattcagataagcgtttcaagttttacaccaccaaaatatcatcatcatcatcaacyaccacctcagcaacacaaacatacctcttctgtaaaaacataaagccacatgacatggccatatcagagttcaagcttaattcaaagtttttccatgaagatactgaatctgaaacttagcaagacaaaaaaggttataaatttggatgagaagcatttcttcaccgtttcatattgctatgtctggagaaataggggagcgaaggggtaaacaggtaaagaaccaggttca

SEQ ID NO: 886192 - DNA, 626 bp, Homo sapiens
aagagaaagtcacataaacacagacatagtaaagtgaaaatgtatgctctactggtgaagtattggtgtttcaatatggcagatcatagggttctaggttaaaatagcaaggtttacaaaatcaaagcagtggtaagagacagattatagaaatgctgaacaaaccaaaagaaagaagagaacaatagctgccagcaggaattctcagatgtcaacttagcaactagatgctaaacaactttagaagaaagaccatgactttcaggccgaatcacggtactcacactaatgtgcctggtagaattatggcttgttsaaattaaatgctcaataaatgcctgcttaatagaactatccagcaaaacaagaaaaccacaccatctaacttgttatatagcttgttatatacggaatatactctgtaagcaagagtgtctctcccctcaagttgtcaatggtgattgactttatcttagatccaatgaaaattttatatattagttaacttcaaccatgttggccatgttttgcacaacatttctggaggaagcagaggatattatttaaaaggataaagtatttgcaaaaaggaactgtaggtaatatctacaacacttcccactatt

SEQ ID NO: 886193 - DNA, 574 bp, Homo sapiens
agctcataagatctgggctcaaacaatcctctcaccttggcctttcaagtacctggaactacaggcatgcaccaccatacccagctaattttttttcttcctttttttttttttttgtagagacagggtttcaccatgtttgccaagttggtcttgaactcctggactcaagaactctgcccaccttggcctcccaaagtgctgggcttacaggcaggagccaccatgcctggcctatgattatgctttttcttgargtcatcatcttctatattagtttcctattactactgtcacaaatcatcacaaacttgaaagcttaaaacaacatgaatttattatcttatagttctggaggtgagaaatccaaaatcacaaccactgggctgaaatcagggtgtcaatagggttatgttccttctggaggctacaggacagaatcagtttcattgctttttctatattctagaggctgcctacattcctcagctcatggctccatccttcattttcaaagccagaagcatagcatcttccaatctctttctctgactctcaaccttctcccttctgc

SEQ ID NO: 886194 - DNA, 576 bp, Homo sapiens; identical to SEQ ID NO: 877485

SEQ ID NO: 886195 - DNA, 529 bp, Homo sapiens
gcaccgctaaagcgatgccgcgagcagcatccgcgccctctccttcccgccccagcccgggtttgttcagtcagggctccagcccggcggccgggaggaagaaaaggaagagggaaggagcctttacctggctctgacgcgacgggtcccaggcccccggctccgcttcccactcagagctctcctcccctctcttccccgccacccgtttctacgcagatckgtgccccagtccctggaggagcctccgccaactccgcaggaccccgccgggaagtagagcccacccctttaccaatcaccgcccgttttctatcgaccgatggggcccatagccaataggaagagctgatcccgagaggcccggaatgagggggaggagctggcaaaacttggaggtgtgactagcactgccgaggcgtggtcacagattaagctccaccccgggttgttgaacccctaagtagaactgatgggcgggattaaggtggaaccgacgaccaaacacaaactcttgagctgaggcacg

SEQ ID NO: 886196 - DNA, 591 bp, Homo sapiens
gcagtcagctgccttcttgctgtgtcctcacaggacatagagagagccctggtgtatctctctctctctcttgttttttctttcattttgagacagtcttgctctgtcacccatgctggagtgcactgatgagaaccatagctcactgcagcctcaacctcccgcctcagcctcccaagtagctgagactatgggtgtgtgccaccacactgggctaattttttatttttatttttatagagatggcgtctcaccatgttgcccaggctggtctcaaactctggrctcaagcgatcctcctgctttggcctcccaaagtgctgagattacaggcaagagccactgcacctgactctttctcttcttaaaagggcactaatcccatcacgagtctcccaccttcatgatctcttctaaatctaattatttcccaaatgccccatctccagataccatcacgttggcagttagggcttcaacatatgaatttgggaggggagggaacacaattcattccattgctcttcctctgtgtgtattcgttgttgttgttggcctcctcccccaaggaagaaagctccacagatttcg

SEQ ID NO: 886197 - DNA, 503 bp, Homo sapiens
ctcctgccctttctcctcttaataaacactgggctcatggtgtttcctttaacatgccaggcatgcttgaccctgtcctgtctcagggccctgctgttccctctgcctggaacattcttcccatagtgtctgcatggctcrctctctcactgctttggattgctgctcaaaagtcaccttatcaaaggcctttcccaaaggtttaaaaatcattctactataaagacacatgcatacatatgtttattgcagcactattcacaataacaaagacttggaaccaacccaaatgcccatcaatgatagactggataaagaaaatatggcacgtaagcaccatggaatactatgcagccataaaaaagaatgagttcatgtcctttgcagggacatggatgaagctggaaaccattattctcagcaaactaacacaggaacagaaaaccaaacaccgcatgttctcactcataagtgggagttgaacaatgagaacatacgggcac

SEQ ID NO: 886198 - DNA, 503 bp, Homo sapiens
ctcctgccctttctcctcttaataaacactgggctcatggtgtttcctttaacatgccaggcatgcttgaccctgtcctgtctcagggccctgctgttccctctgcctggaacattcttcccatagtgtctgcatggctcgctctctcactgctttggattgctgctcaaaagtcaccttatcaaaggcctttcccaaaggtttaaaaatcattctactataaagacacatgcatacatatgtttattgcagcactattcacaataacaaagacttggaaccaacccaaatgcccatcaatgatagackggataaagaaaatatggcacgtaagcaccatggaatactatgcagccataaaaaagaatgagttcatgtcctttgcagggacatggatgaagctggaaaccattattctcagcaaactaacacaggaacagaaaaccaaacaccgcatgttctcactcataagtgggagttgaacaatgagaacatacgggcac

SEQ ID NO: 886199 - DNA, 600 bp, Homo sapiens
gtaagatgttattaagcctattttaatatacccaatccatacttgcattggtctctataaagtatgaattaattgtgttgcttggattgcctttttctagatagcttaatccaagaactttcaaacaacattttgaaaagtggttttcttagatgcatattgctctgtcattaagccaatgtccaccattccytcatgtgctataattttgagccaagaatgatctttcctttatgtagagaaattaaagagagaatgttccagatatagcataataaatgtctgactttcttcttacaaatgattgtcaaaatactctgaaaaggaagagtacagttacaatgtcttcattgattttcctcctaagacctctaaaataacattgactagagacttatcgaaaatcaaattctcaattgacataatattcagttattcatttactcattcttgtctttattcatttagaacaatatgtatggaaaaattttgaaactgatccaacaagatctacaatattgtaatttctataagacagtgtaccatttatagattaaggcatatacatcatgagatacgtcacaagacgtatctcctata

SEQ ID NO: 886200 - DNA, 600 bp, Homo sapiens
gtaagatgttattaagcctattttaatatacccaatccatacttgcattggtctctataaagtatgaattaattgtgttgcttggattgcctttttctagatagcttaatccaagaactttcaaacaacattttgaaaagtggttttcttagatgcatattgctctgtcattaagccaatgtccaccattccctcatgtgctataattttgagccaagaatgatctttcctttatgtagagaaattaaagagagaatgttccagatatagcataataaatgtctgactttcttcttacaaatgattgtcaaaatactctgaaaaggaagagtacagttacaatgtcttcattgattttcctcctaagacctctaaaataacattgactagagacttaycgaaaatcaaattctcaattgacataatattcagttattcatttactcattcttgtctttattcatttagaacaatatgtatggaaaaattttgaaactgatccaacaagatctacaatattgtaatttctataagacagtgtaccatttatagattaaggcatatacatcatgagatacgtcacaagacgtatctcctata

SEQ ID NO: 886201 - DNA, 642 bp, Homo sapiens
gtagcacataatatatggaaactggcatttaggtaggtaagttttatatacagtgataagtgatatgttagaggaaattttgcatggcattacaacttttagaaggtgcatctctgatttgctaatctgtagtatctcttggacagtgttgtctacctgttccactctagtcagatcaatatgtgcatctgtactcatattcagtaactttaaaaaccattttattatgcaaatttttgaatgcacayaaaagtaaagagaacagtaattagttacgatctatccatcacatacattcaacaaccatcattactttggaatcttgagccttctatcacccaactactctttttaattttatttgagagaggttcataaaagattacagcattatgttatttaatcagaaaatacttaattatacatctctaactgatataatactttaaatagattttacatatcaccatgtcgttatcatacttaataacattaactcattatcctaagaaaattaaattctttaacaccatctaatgtcatctatactcaaatatctctcagatcatgcaattgattgagagagaaaccagaccatttgtcctatagaccatcccagatcctgaatttcacagattgttt

SEQ ID NO: 886202 - DNA, 646 bp, Homo sapiens
tgctgcttccactatggtaccctaaaaattcacactgttagttcattaggaaccccctcctccacttcacaatctaggacacccctgtggtctttcctactccttttctatctttgtaacagattattctcattttgagctgtggtttccttttcaattgaatcgtatctgcctttagtccatctggtattcttcactccacaaaagatgaaactgagacacagagaattatgtatcttattcattgtcacacagatagtgagtgagtggcagaactgggttttgaatctaggcaatctggctccagaatccatgctttcaacaattgaaccatagagccttccctttctgcctatagcccctttccattaaatctctcatttttaaaatgtgctattcccttaaaaagcagyattaattttcattaaaataaagataaaatcatagtaatacagctagagatgaatacctaattcttatctctccagggtgttactgtctattcatagaaatattttttgactcattgctattactgtatatttttaccttagctttttttccttcttataagccataataaagaagaaaagcctcattttaattagttgtgtgtacaacaagagcagcatacttggtcttttag

SEQ ID NO: 886203 - DNA, 686 bp, Homo sapiens
gaggtcctgagaacatgtgtccaaggtgattggtttacaacttggttttatatattttagggagacctaagacatcagtcaatacatgttttagttatagacttgtagcaattagcttgcaaaagataagtactttgttaaaactttttaagctacagaatttagagacttttgttgtgtcacaacgcttttagcagtctttttaatagtttgtcctaaggtgcttgatttaaaaaaactttatataacaatctgcataaatctcataactgggagcactatacccaggaggttttcttaccagaaaagttcatatcctctttgcaattttcttttaattctacaggaaagaggaaattatggttgggatggatgaaaaaggwccacatactggtccaggaggtaaagtatcttattttgccaactgtttgggcatctgtgtgcccattttttatttggaagatctaaattaattttgttgctcaaaaatcaacctttacaatcttacacatttacctcttccaagatagtgcctgagcctagagggaagatgcttatatagttttagcagtggagcattagcattgaaaatagatcgggcccagtgggattctgaatagttttaaatttcagagatattaagcagagagagagtgaaaaagtaacctttgttgttttatccaatt

SEQ ID NO: 886204 - DNA, 655 bp, Homo sapiens
atcttgggtggctataaatgtgccgggcacatttacttatttatttatttgtagaaattatcttatctaattcttggaacaatcctgcaagaggctgggtggtattcccatttcacatatgagaaaactgactttctcaagactgtgcaggttttagtggctaaaccaaaagttaagcttaggtccagctggcayccttgctttctttctgtatgtcaacagtttgccttttagttataaagttataaagaattacacaattatatacggcactaatataactatacaatatggtgagattgacgctgtgtctaaatacgaaaattctaaagccaacagacacttcaattggtcatatctttcactccctactaaaaccatgtaaaactgaaaaggctctgtcttttcttattgaaaaatcctggaaacatgcattcaaaatttgccttgtcccttttcacaattgctagtaactgttttccgcatgaaatccttttatctattaagatatccccatcaccctttaagctcttgttcgaaactatatggagatgataggatctgcacatagtaagcttctgtcagccgaagatagatgtcagaacaattgagcaaagagtaagatttcagcaaatccaccaattgtttggtttat

SEQ ID NO: 886205 - DNA, 502 bp, Homo sapiens
tctgaaagcaagtgtatgagcattttatggaaacctagtgcctcccatcccacttggaatctgaattgcttgcagtttcctgagatgccactccagccatccatgaggcctgttctcacttcacacatactctaagacaaacgacttgtcatattattgagaagatgggaaactatttatattaccacctaaagaaagcgcattataagaaatcaggctatgactttggttttgccgatagctgacatttcaaattcgggcaagtcacaaaaatttcatttccacttacttatrttaagtagggtaatgatcccgccttggagaccctatagaatatttgatgataataataataataactaaatgattatcgcttattcatgtgctgatttccagcctgatagtcaggctcttcacccatctatttcagagaaaagccaatatcctaccaccatctccagggccctatatcatctgacccctttacttctgaccttgtttc

SEQ ID NO: 886206 - DNA, 651 bp, Homo sapiens
gaagatgcaaagccagactccagtaaaagagataaaatggtttgccctgcatttgtgaagacctgtccaacatcttggctcccagatgatttactaagtatttcactatagtttcctctgagcaatgtcagcattatgagctggaatttatagcagaatatgattaatatcaggtcttgtatgccaaaatgctgacgttatctagcacagttattaacctagattcaaaaagaaatctcctttctccaggttcaaaagagtataatgatattaatttttaaaatctcccttaatatcaaaagatkaaatagattaatcacattttttatgcagggaaatatagatgcctgtatctttataacaagctggttcacattaaaagcaagtacatccatggtactagtgcaacacttggatcagaaaaaaaataagcttatttatttaaaaatccatgtatgctctcactaataagtgggaattgaataatgagaacacatggacacagggagggggacatcatacactggggcctgtcagggggtggggagcaaggggaaggagagtgttaggacaaatacctaatgcatgcggggcttaaaacctagatgatgggttgacaggtgcaacaaaccaccatgccacatgtatacc

SEQ ID NO: 886207 - DNA, 651 bp, Homo sapiens
gaagatgcaaagccagactccagtaaaagagataaaatggtttgccctgcatttgtgaagacctgtccaacatcttggctcccagatgatttactaagtatttcactatagtttcctctgagcaatgtcagcattatgagctggaatttatagcagaatatgattaatatcaggtcttgtatgccaaaatgctgacgttatctagcacagttattaacctagattcaaaaagaaatctcctttctccaggttcaaaagagtataatgatattaatttttaaaatctcccttaatatcaaaagattaaatagattaatcacattttttatgcagrgaaatatagatgcctgtatctttataacaagctggttcacattaaaagcaagtacatccatggtactagtgcaacacttggatcagaaaaaaaataagcttatttatttaaaaatccatgtatgctctcactaataagtgggaattgaataatgagaacacatggacacagggagggggacatcatacactggggcctgtcagggggtggggagcaaggggaaggagagtgttaggacaaatacctaatgcatgcggggcttaaaacctagatgatgggttgacaggtgcaacaaaccaccatgccacatgtatacc

SEQ ID NO: 886208 - DNA, 651 bp, Homo sapiens
gaagatgcaaagccagactccagtaaaagagataaaatggtttgccctgcatttgtgaagacctgtccaacatcttggctcccagatgatttactaagtatttcactatagtttcctctgagcaatgtcagcattatgagctggaatttatagcagaatatgattaatatcaggtcttgtatgccaaaatgctgacgttatctagcacagttattaacctagattcaaaaagaaatctcctttctccaggttcaaaagagtataatgatattaatttttaaaatctcccttaatatcaaaagattaaatagattaatcacattttttatgcagggaaatatagatgcctgtatctttataacaagctggttcacattaaaagcaagtrcatccatggtactagtgcaacacttggatcagaaaaaaaataagcttatttatttaaaaatccatgtatgctctcactaataagtgggaattgaataatgagaacacatggacacagggagggggacatcatacactggggcctgtcagggggtggggagcaaggggaaggagagtgttaggacaaatacctaatgcatgcggggcttaaaacctagatgatgggttgacaggtgcaacaaaccaccatgccacatgtatacc

SEQ ID NO: 886209 - DNA, 651 bp, Homo sapiens
gaagatgcaaagccagactccagtaaaagagataaaatggtttgccctgcatttgtgaagacctgtccaacatcttggctcccagatgatttactaagtatttcactatagtttcctctgagcaatgtcagcattatgagctggaatttatagcagaatatgattaatatcaggtcttgtatgccaaaatgctgacgttatctagcacagttattaacctagattcaaaaagaaatctcctttctccaggttcaaaagagtataatgatattaatttttaaaatctcccttaatatcaaaagattaaatagattaatcacattttttatgcagggaaatatagatgcctgtatctttataacaagctggttcacattaaaagcaagtacatccatggtamtagtgcaacacttggatcagaaaaaaaataagcttatttatttaaaaatccatgtatgctctcactaataagtgggaattgaataatgagaacacatggacacagggagggggacatcatacactggggcctgtcagggggtggggagcaaggggaaggagagtgttaggacaaatacctaatgcatgcggggcttaaaacctagatgatgggttgacaggtgcaacaaaccaccatgccacatgtatacc

SEQ ID NO: 886210 - DNA, 665 bp, Homo sapiens
gatttacttatatgtacttatatcacttatatttacagcatatttctcatatggtgcttgtttgtttttggtaccaggtttgttccttcctcataaaatgagttgagggtggttcattgcaatacacaaaactgttagaatctatagattacttttgggctcgttaggctctccagcggagtgctagcagtcataccagtggcagaggtagcgggtaggcaggataggggcatatatgttcagctgtgagttttctagaaactgagacgggaagtggtcttttattttcaccttttaatatgtgtagtgttaaaggtataatcttggaagcagcctgtctagccaattccatgctttgtcacttaatagatttgcattcttggtcaaatatcttaaccttactgtgtcacaggtttttcataygtgacatagagtagtggtgaggatgaaataaattgacacagttaaattgcttatagcctctgacatgcattaattactcagtgaatgttcgttttccttctcccgttttttgacctttttctttccttctttcttcttcctatcaactctccattttttctctcttccattttggtacaatgcccataggatcagttgtgtctggtgcctaggaagccagaatattttgctttaacatcttc

SEQ ID NO: 886211 - DNA, 628 bp, Homo sapiens
gagctagatttttaacttactaaagcataaaagtaaatcagagataatacagcaaagcattatattcttattaaaatgtccatcatttttaatattatgagttcagcataattacagaaaagcaactaatattttaagaacttcatattgtatttttgaaaaataacagaagaacaagttttcaatagtcaattaggtttttgttttccaagatggcagattggaggctttcatcatgcgtctgccacttgggaagaccaaaatcatgcataaagatcaactctgtaagctttaattcaacartgaaaacgggaatccaccgaaatactgaaagacactccagatcccgtagagaaggtggacaagcagcccccatgatggcgtttgatgaataaaagtgagtgaagcccataataagaaaggggcaggaagtctctgtgattcacctttccactggggatctaagcaacctagaagaagggagagaacattatttctccgaagtcttggagctgccttacagacaggctagaagacattgagaagggaagacagtggggagagctataagcattttcccagaccagagatggagagcaggacaccatttttattcaggcccatacaa

SEQ ID NO: 886212 - DNA, 609 bp, Homo sapiens
tttagcacctacttatgagagagaatatgcaatatttgtgtttctgtgtttagcttgtttcacctaagttaatgacctccagttccacgcatgttgctgtgaagaccatcatgttattcttttttatgaatgaatattccattgcatatataccacattttcgttatccagtcatccactgatagacacatgttktttccatgtctttgctattgtgagtagtgctgtgatgaacatattagttcaagtatctttctgatataataatttctttacttttgggtagatacccagtaatggaattgctatagtgaatggtagttgtatttgtagttctaaaagctccatttctgtttttcacagagattgtactaagttatattcccattaacagtgtgtaagaattccctttttttctgaatcttagccaatatctgtttttaatatttttaatattagccattctgactgatgtgaggtggtatcccactgtggttttaattcgcatttctctgatgattattaatattgagcttttctgtattcctgttgacatttgtatatcttcttttgaaaaatgtctccttacggttattgcccactttttaa

SEQ ID NO: 886213 - DNA, 609 bp, Homo sapiens
tttagcacctacttatgagagagaatatgcaatatttgtgtttctgtgtttagcttgtttcacctaagttaatgacctccagttccacgcatgttgctgtgaagaccatcatgttattcttttttatgaatgaatattccattgcatatataccacattttcgttatccagtcatccactgatagacacatgtttwttccatgtctttgctattgtgagtagtgctgtgatgaacatattagttcaagtatctttctgatataataatttctttacttttgggtagatacccagtaatggaattgctatagtgaatggtagttgtatttgtagttctaaaagctccatttctgtttttcacagagattgtactaagttatattcccattaacagtgtgtaagaattccctttttttctgaatcttagccaatatctgtttttaatatttttaatattagccattctgactgatgtgaggtggtatcccactgtggttttaattcgcatttctctgatgattattaatattgagcttttctgtattcctgttgacatttgtatatcttcttttgaaaaatgtctccttacggttattgcccactttttaa

SEQ ID NO: 886214 - DNA, 609 bp, Homo sapiens
tttagcacctacttatgagagagaatatgcaatatttgtgtttctgtgtttagcttgtttcacctaagttaatgacctccagttccacgcatgttgctgtgaagaccatcatgttattcttttttatgaatgaatattccattgcatatataccacattttcgttatccagtcatccactgatagacacatgttttttccatgtctttgctattgtgagtagtgctgtgatgaacatattagtkcaagtatctttctgatataataatttctttacttttgggtagatacccagtaatggaattgctatagtgaatggtagttgtatttgtagttctaaaagctccatttctgtttttcacagagattgtactaagttatattcccattaacagtgtgtaagaattccctttttttctgaatcttagccaatatctgtttttaatatttttaatattagccattctgactgatgtgaggtggtatcccactgtggttttaattcgcatttctctgatgattattaatattgagcttttctgtattcctgttgacatttgtatatcttcttttgaaaaatgtctccttacggttattgcccactttttaa

SEQ ID NO: 886215 - DNA, 592 bp, Homo sapiens
ccctaagatttttgcctctggagacgtcctggaatattaagagcatgcagaagttgctcagcactccctcatatgacctggcgtcccccttagatgtgggaagacaatgaagaggcctctttcagaaaaggtaacaggtaatcccctcaggagtagtgaccacctgccttcttggttgtcagaccaacaactaggattaagttcccacaaaacccaggtaggggagttttgagcctgataatggagaaaatggtttacaccctaaaggagctccaagaagtagctagctgtcttagtcagttcaggctgctataactaattgccattgtctgggtggtttaaacaacagatatttatttctcatagttctggaggctgggaagttgaagatcaaagcaccatcagatctggtgtctgctaagggycttcttctttgtttgcatatggctgtctttttgctgtgtcctcatattggagaaggcagagagtgagaggcaagctcttgtgtttcttcttatgaggacgctaatcctattcaggagggttctaccctcatgacataattatctcccaaagccctaccttttgatat

SEQ ID NO: 886216 - DNA, 588 bp, Homo sapiens
tttcattctctctggaattcttacattcatttgactgtatactttgactcatgagttctgatttacatactggtggattcattacttcagttggttaaacttcttaggattggcctggcacccggctatttgccctctgccttcatataacacatttcaagcaagatagactcccagaattttagaaaacatctccaaaggagcgacctaatctacacttgacctacctaatattggagagtaatcggatagtaagagttcattgcctatgctttgattagatacactcagaattaaaacagagtccttatactgacatcattctacataaacagagttaatatgacttatttgtgttattttacatctaagatacmgttcacacaacattggcccatgcaatattcaaataaacttatattttctgaaagatttatgttatacgatgttaaagtaaaaagaattgattctctgaattatttactaagcttaacagaacttagaagctgtttctgcatttttaaatgtatctctcccttgtgaaaatcaagagctgctcattttggcatttgaagcaaaggaatgaag

SEQ ID NO: 886217 - DNA, 549 bp, Homo sapiens
agttgatgaacatttgagttgttggcagtttttggtgattatcaataaagcttctatttacattctatggatctatgtttttgcttccattgggcaaataccttgataatccctgcataattatttaatattactaatatcagaagagagtttaagttttggmaagctttcaagcttactgtggtggatacaagtttttcaaaatactgctttttgctaaagaccttgaattttatcattggtcattattgtccttgaagttataggcccgttttggtcaccttccagaaactatttgccaaacaaccaaatctgacaaagatatagtttgcttgacagttgttattatcacgtgaattttctgtgccatgacaaaaatggctaattcaggttgcaactaaaacaatcacacaagtgctttttcctaatataagcatcctgcttctcctgccaggtaagtattaactatcctacttccatatgcaatagaagtgttttatgagtactcttcacgtgttacacagaatattaaaaagttagatcctcatg

SEQ ID NO: 886218 - DNA, 549 bp, Homo sapiens
agttgatgaacatttgagttgttggcagtttttggtgattatcaataaagcttctatttacattctatggatctatgtttttgcttccattgggcaaataccttgataatccctgcataattatttaatattactaatatcagaagagagtttaagttttggaaagctttcaarcttactgtggtggatacaagtttttcaaaatactgctttttgctaaagaccttgaattttatcattggtcattattgtccttgaagttataggcccgttttggtcaccttccagaaactatttgccaaacaaccaaatctgacaaagatatagtttgcttgacagttgttattatcacgtgaattttctgtgccatgacaaaaatggctaattcaggttgcaactaaaacaatcacacaagtgctttttcctaatataagcatcctgcttctcctgccaggtaagtattaactatcctacttccatatgcaatagaagtgttttatgagtactcttcacgtgttacacagaatattaaaaagttagatcctcatg

SEQ ID NO: 886219 - DNA, 549 bp, Homo sapiens
agttgatgaacatttgagttgttggcagtttttggtgattatcaataaagcttctatttacattctatggatctatgtttttgcttccattgggcaaataccttgataatccctgcataattatttaatattactaatatcagaagagagtttaagttttggaaagctttcaagcttactgtggtggatacaagtttttcaaaataytgctttttgctaaagaccttgaattttatcattggtcattattgtccttgaagttataggcccgttttggtcaccttccagaaactatttgccaaacaaccaaatctgacaaagatatagtttgcttgacagttgttattatcacgtgaattttctgtgccatgacaaaaatggctaattcaggttgcaactaaaacaatcacacaagtgctttttcctaatataagcatcctgcttctcctgccaggtaagtattaactatcctacttccatatgcaatagaagtgttttatgagtactcttcacgtgttacacagaatattaaaaagttagatcctcatg

SEQ ID NO: 886220 - DNA, 699 bp, Homo sapiens
aaaaaaaccacacaaaagttaaatgaccaccattgttgaggatatcaatcagacgacgggagaatggttactatctcaggtttccagggatattgagattaaacaacttttcttattatctgttgagtcaggcagaaaataaattacaacactgctttggaagtagcaaggaccaccacattaagtaaaaggggatttcaggaaggaagaaaggtggatacagaattttccttgaaataatttttataaaagacaaatactaaattaatcacactgtatatgatgatttaaaatgagggcattttcaaccacctttctggatttacattttattttattgtattctcagggaaacagattgaagtattgctatagattattgtaaacaatttgagaaaataartctgagtatgtggaagaaattatttcataaggctgtaaaactctgaataaaataactaaaagcattatgaactcacttgaagaactgggttcattgtaatcaatgcatatagatacacgcaaacatggaccagaagcatgagcataatacatgcaaatctgtgttttcaaatattagtggaaatactgctcgtccaagtcattaacattgttagtatgctctgtattgctgtggaagactcgttgactaatgggatatgtacaccaaaagtaatgtgaatattttcagaaatttgt

SEQ ID NO: 886221 - DNA, 699 bp, Homo sapiens
aaaaaaaccacacaaaagttaaatgaccaccattgttgaggatatcaatcagacgacgggagaatggttactatctcaggtttccagggatattgagattaaacaacttttcttattatctgttgagtcaggcagaaaataaattacaacactgctttggaagtagcaaggaccaccacattaagtaaaaggggatttcaggaaggaagaaaggtggatacagaattttccttgaaataatttttataaaagacaaatactaaattaatcacactgtatatgatgatttaaaatgagggcattttcaaccacctttctggatttacattttattttattgtattctcagggaaacagattgaagtattgctatagattattgtaaacaatttgagaaaataaatctgagtatgtggaagaaattatttcataaggctgtaaaactctgaataaaataactaaaagcattatgaactcacttgaagaaytgggttcattgtaatcaatgcatatagatacacgcaaacatggaccagaagcatgagcataatacatgcaaatctgtgttttcaaatattagtggaaatactgctcgtccaagtcattaacattgttagtatgctctgtattgctgtggaagactcgttgactaatgggatatgtacaccaaaagtaatgtgaatattttcagaaatttgt

SEQ ID NO: 886222 - DNA, 699 bp, Homo sapiens
aaaaaaaccacacaaaagttaaatgaccaccattgttgaggatatcaatcagacgacgggagaatggttactatctcaggtttccagggatattgagattaaacaacttttcttattatctgttgagtcaggcagaaaataaattacaacactgctttggaagtagcaaggaccaccacattaagtaaaaggggatttcaggaaggaagaaaggtggatacagaattttccttgaaataatttttataaaagacaaatactaaattaatcacactgtatatgatgatttaaaatgagggcattttcaaccacctttctggatttacattttattttattgtattctcagggaaacagattgaagtattgctatagattattgtaaacaatttgagaaaataaatctgagtatgtggaagaaattatttcataaggctgtaaaactctgaataaaataactaaaagcattatgaactcacttgaagaactgggttcattgtaatcaatgcatatagatacacgcaaacatggaccagaagcatgagcataatacatgcaaatctgtgttttcaaatattagtggaaatactgctcgtccaagtcattaacattgttagtatgctctgtattgctgtggaagactcrttgactaatgggatatgtacaccaaaagtaatgtgaatattttcagaaatttgt

SEQ ID NO: 886223 - DNA, 773 bp, Homo sapiens
taatatatggtctgaagaaaagtaaaacaggataatgaaatgagagtcctggagtgggtgtctacagcactgttttaaacagaatgataatctcataaatgaagcagcaatgcaagcaaagataaggagcaagaatattggggatcagaagaaatatcaagtgaaagactgaaacaggaaaacacttgggggcatattcagagaaaagcaaataaatcaatgtagcttttaggtatayggcacaggctttatgataagttagggactaaataagaagagtcttatacgccacaccaaagaatttttattttattttttaaataattgggatcatcacttggtttaaagcaaacttgactggaatcatcgttggcaatttagaagatgatttatcaaagtaaaaaactgaaggcaagtaatcaagttaggaggagagcagacagcataggctacgatattttcagcctattttaggacaatggccatgacatgggagaggacagggtgaattctagatgttatgcagaaacttttctttaacttttattttaggttcaggggtacatgtgcagctttgttatattatattggtaaactgtgggtcatgggggtttggtgtacaggttattttgtcacccaggtaataggcatagtaccagataggtatttttttctgatattcaccctcctcccactttccaccctcagttaggcccactttccaccctcagttaggttccccttttttgtccttgtgttcttgttgtttagct

SEQ ID NO: 886224 - DNA, 773 bp, Homo sapiens
taatatatggtctgaagaaaagtaaaacaggataatgaaatgagagtcctggagtgggtgtctacagcactgttttaaacagaatgataatctcataaatgaagcagcaatgcaagcaaagataaggagcaagaatattggggatcagaagaaatatcaagtgaaagactgaaacaggaaaacacttgggggcatattcagagaaaagcaaataaatcaatgtagcttttaggtatacggcacaggctttatgataagttagggactaaataagaagagtcttatacgccacaccaaagaatttttattttattttttaartaattgggatcatcacttggtttaaagcaaacttgactggaatcatcgttggcaatttagaagatgatttatcaaagtaaaaaactgaaggcaagtaatcaagttaggaggagagcagacagcataggctacgatattttcagcctattttaggacaatggccatgacatgggagaggacagggtgaattctagatgttatgcagaaacttttctttaacttttattttaggttcaggggtacatgtgcagctttgttatattatattggtaaactgtgggtcatgggggtttggtgtacaggttattttgtcacccaggtaataggcatagtaccagataggtatttttttctgatattcaccctcctcccactttccaccctcagttaggcccactttccaccctcagttaggttccccttttttgtccttgtgttcttgttgtttagct

SEQ ID NO: 886225 - DNA, 651 bp, Homo sapiens
gggcctctctatgaactagctgacataagctcatttgagcttcaccccgcataagaattttaataaacaaacctcgctggtcagcatattgctctagcatatttaaacataccacatgctttcagctcctcttcacagttctgcagcttttgcatgaaacragttctggttaacagaatttaatgagtctgagcggggggaaaagtctctccacatgcaatgataaagccacggtgggacagcgttaaaacagcagggctgcagcgggaaccaaggtttgagattcgagtctcagtgctcggaactgctgtttctcaactgcgttggcataaagaaccctgaggaatccagtgtgaactgtattcctgacccacgggacctgctccatgtgtgtctctacctagttctccttttctcctttcttttacgttttgtgttggaaccttatctgtttttctggcttttcattcatctacctagtctgttcttccggctcttgagtcagactgcctgatttccaatcctggctcagtctctaaagacctctgtgactttgtacatgttatttaaccttcttagccttggctctcccatctgtaatatgaggatgacagtagacctacctcttagggctgttaggaggattaccta

SEQ ID NO: 886226 - DNA, 651 bp, Homo sapiens
gggcctctctatgaactagctgacataagctcatttgagcttcaccccgcataagaattttaataaacaaacctcgctggtcagcatattgctctagcatatttaaacataccacatgctttcagctcctcttcacagttctgcagcttttgcatgaaacgagttctggttaacagaatttaatgagtctgagcggggggaaaagtctctccacatgcartgataaagccacggtgggacagcgttaaaacagcagggctgcagcgggaaccaaggtttgagattcgagtctcagtgctcggaactgctgtttctcaactgcgttggcataaagaaccctgaggaatccagtgtgaactgtattcctgacccacgggacctgctccatgtgtgtctctacctagttctccttttctcctttcttttacgttttgtgttggaaccttatctgtttttctggcttttcattcatctacctagtctgttcttccggctcttgagtcagactgcctgatttccaatcctggctcagtctctaaagacctctgtgactttgtacatgttatttaaccttcttagccttggctctcccatctgtaatatgaggatgacagtagacctacctcttagggctgttaggaggattaccta

SEQ ID NO: 886227 - DNA, 651 bp, Homo sapiens
gggcctctctatgaactagctgacataagctcatttgagcttcaccccgcataagaattttaataaacaaacctcgctggtcagcatattgctctagcatatttaaacataccacatgctttcagctcctcttcacagttctgcagcttttgcatgaaacgagttctggttaacagaatttaatgagtctgagcggggggaaaagtctctccacatgcaatgataaagccacggtgggacagcgttaaaacagcagggctgcagcgggaaccaaggtttgagattcgagtctcagtgctcggaactgctrtttctcaactgcgttggcataaagaaccctgaggaatccagtgtgaactgtattcctgacccacgggacctgctccatgtgtgtctctacctagttctccttttctcctttcttttacgttttgtgttggaaccttatctgtttttctggcttttcattcatctacctagtctgttcttccggctcttgagtcagactgcctgatttccaatcctggctcagtctctaaagacctctgtgactttgtacatgttatttaaccttcttagccttggctctcccatctgtaatatgaggatgacagtagacctacctcttagggctgttaggaggattaccta

SEQ ID NO: 886228 - DNA, 625 bp, Homo sapiens
aaggagacatgaatgagtgtccagatggtaccaggcccaatcactgtctgactgcagccacaaaagagaccttgagtgagaactgcccagctgagctcagtcagccaccagaactgtgagagataaaatttgaatttgttaaaaaataaacaaaacttttttaaatatctagtttttttcattataaatggcagcattatctttccagtattgcaaactaaagttatttccagttcagctctccttttcatgttacccatttgcagttaatttctacattctgtcagtttttcaaccagctctatttcctagaaatgcgtgctcctgctgttcttcaattatggactcagtctaggccttaatccataaactgagctgactgctgcagactagtctttyttccccttccagcactctaagacagaattttcctctcaaactttttatcatatgactacctctctcaaatctaagagctgttgtttccctcagcctgacctattctctctccccatctactttggccacataagccatcttaaatcacacactcagcacaaaggttccaattgttctcaacagcccaaatgtcacattctggttcctctttgtctccaaaggtccc

SEQ ID NO: 886229 - DNA, 556 bp, Homo sapiens
gtaaaaatgaataagtgtttgtattcaagtcaaaaatatgagtgcccaaatacaaatttacagaaatttgaaaatacagtaaaatctcacttatctatgtttgtctgaaatattaggaaaaaccatttaaatatattttaaaaaggtggtgagtgagagttgtggggaaaagaatataattctaataatcaataacaattaagattttattattgacctatttatayataaaaatatatttatatgtataataaagtaacttttagcaaatataatatcagagcactgtgtattggcaaatttaataagtttcaactcttattaagaaatacttgaatgtttccttttataaataatattttaggcaatataaagtgatgacatttcactgtatacttaaggagaaataataggttcacgcaaatttttcacccaatctattccttaagcattagagatttcatttcatctttctcaaatagttgtaatacaaattagaccttaacagcagcataggcattcaaagaatagcatttcttaaatgaaatatataact

SEQ ID NO: 886230 - DNA, 539 bp, Homo sapiens
agtttcagatcttagatttaagtccttaatccatcttgagttgatttttgaataaggtgagaggtgaggatccagttttattctcctacatgtagctagtcaattatcccagcaccatttattgaaaaggttgtccttcccccactttgtttttgttggctttgttgaagatcagtaagctgtaagtatttgggtttacttctgggttatctgttctgttccattggtctatgtgcctatttttacacaagtaccatgttgttttagtgactatggccttatagtgtagyttgaaatcaggtaatgtgatgcctccagatttgttctttttgcttagtcttgctttggctatgtgggctcttttttggttccacatgaattttagaattgtttttttctaattctgtgaagaatagtgaattttgatgggaattgcattgaatgtgtagattgcttttggcagtatggtcattttctcaatacggattctacccatccatgaacacaggatgtgttttcatttgtgttgtctatgattt

SEQ ID NO: 886231 - DNA, 670 bp, Homo sapiens
tccattacattaaaaagtcaatccagtaagctagcacacagtacaagctcatggttccttgaatattgaatacatattttctggtttatagaaaatctttatatcctgcttgtgatataaagtgggatttttttgctcccatgaagatggtgcctcggcacatactggtctcacttagaaaggtctgcacttcactctccttgcaggacattgcttggcactagttactaaattgttaccaacagtggaaaataaagctttgtaaaataatcggagatagctagataagcaaacaagttagtttatttaaactgtattgaaaaaaaattaagcaaaatcaattctttttrtaagaagtcccaatgacatgttacatattaatccaatgttttaaaattgtgaatcttaaatcatggaacttcataattcagtgcaattcagcccttaaacatttggtacacgttttcttcatgtatgtgtatgtgtgtggaccatatgtttaagttcaaacaggcatccttatactggaagcttcattttaagaaaacttaacataaaaatactaacttataaaacatgatattagaggcaattaaccacattcacaggtctgcttttagttttgaaatgatttggtgagtttaagggggatgctcttggagtatattta

SEQ ID NO: 886232 - DNA, 610 bp, Homo sapiens
aacaccccacaataacaaaacaatgggcagttggtctcatgtcttcctacgcatggtgccagaatattttctgatgtattccattcatcatgttccttttaaatcaaatccagtgttgttctaaagactgtagaccaaattctactgtggctcagagcctctcacagcccatgttctaattatgaacatgaaattttgttaaataaataatttatattggagtctagtgaattgtaattttgtgataacagcctggacaacattgagagacctcatctcttaaaaaattctaaaaattaaacaggcacagtgggtcatgcctgtaatcttagctactcrgaaggtggctaaggtgggaggatcacataagcccaggaggtccaggctgcagtgatccactgcactgaagcctgggagacagaagaagatatcatctcctaaaaaataaagaaaaataaaacaaaactttgctggaaaattatagcttgagtgtaagcggtacaattgtttgtcagtgccccaggaatgccaagccactgtttttctattgtcctcaaaatgcagtgttccaaaacgctgaatgacttcacttactttctcaaaggtaggg

SEQ ID NO: 886233 - DNA, 595 bp, Homo sapiens
caaagtcatacaaagcacttagaaaagtagcaggtctctagtaagtgctcattaaatataactaattattagaagtttgagagatagctgctatttcagcatgtcatcctttaaaaaaatctaaatcaatctaatattgatgaaactattctttgttattgatctacatccagtaacttaaaccttggagtaaattacaccttgtcctgagacaagagacattggttggaatggcagccagcaacaaggctgtctcaatttgatcagaagctcagagtggatgcaggtatttaatataaataggaaaatcagttgtgacacaacytttcacaaaggtcatcaaaaccttttacaaaaaatactcctgaaaaggcatctgtccagcaactccctgttcaaacttggcctggtgtcacccttgttattgatgtttgcagtgaatgataagtatttcaaaacatttacttaatccttcttattcttttgctttaaaaatctttttcttcctttatctccctaaggacatacatggtttactatggtacacacgtacccattacaaaactttgttcccatataaagagtctctttctgt

SEQ ID NO: 886234 - DNA, 595 bp, Homo sapiens
caaagtcatacaaagcacttagaaaagtagcaggtctctagtaagtgctcattaaatataactaattattagaagtttgagagatagctgctatttcagcatgtcatcctttaaaaaaatctaaatcaatctaatattgatgaaactattctttgttattgatctacatccagtaacttaaaccttggagtaaattacaccttgtcctgagacaagagacattggttggaatggcagccagcaacaaggctgtctcaatttgatcagaagctcagagtggatgcaggtatttaatataaataggaaaatcagttgtgacacaacttttcacaaaggtcatcaaaaccttttacaaaaaatactcctgaaarggcatctgtccagcaactccctgttcaaacttggcctggtgtcacccttgttattgatgtttgcagtgaatgataagtatttcaaaacatttacttaatccttcttattcttttgctttaaaaatctttttcttcctttatctccctaaggacatacatggtttactatggtacacacgtacccattacaaaactttgttcccatataaagagtctctttctgt

SEQ ID NO: 886235 - DNA, 613 bp, Homo sapiens
ctttgttcccatataaagagtctctttctgtttattaagttgacacaatatatccaaaagcagctgaatgcacaactcaaactgtcatccaagcacacaaagaaggcattgatgtgagtattaagcagtttttttttattgtactaaggacacatttaaaaatatttttctggtgacctagatgagatggtgtgaggcagtgtagaaagatttataagatcagtacttactttgttaaaggttatcgccctcgtggctcaacaacttaatttgaggtcctaatgtggttgataamctacacgttcatttcagtagctccctcccattgaaaggaatagattcaagttaaaaacagccactcccacatgtttcagggccacaggactgcctactagattctaagaaaaatggcaagtcatcctcttatcacaaggtaactggttaatatgttccttttcaaggttggcaataaaagtttaaccaaaaatttcagcagattttgctctctttataagtcagtagaaactggctttttgaagaaactcacttttcgtgacttggatgtaaggactaaggcagatgagaaatctctgctgggggcatagctgggagg

SEQ ID NO: 886236 - DNA, 646 bp, Homo sapiens
ctgggaaagcagtagcacgtgctttgacagccatttcccattgccccctttctccatcccctgtcaacaactgatttgctttctggactcaaatggtctggatggttcatacaaaagaattcatgtcacatgtggcctttggtgtctggtttcttttacagcacatgttttcaaggctcaccaatgttggagcatgcatcagtacttcatccctttttttwaaattttattattattatactttgagatttagggtacatgtgcacaatgtgcaggtttgttacatatgtatacatgtgccatgttgatgtgctgcacccacaacctcgtcatttagcattaggtatatctcctaatgctatccctcccccctccccccaccccacaacaggccccggtgtgtgatgttccccttcctgtgtccatgcgttctcattgttcaattcccacctatgagtgagaacatgcagtgtttggttttttgtccttgcgatagtttgctgagaatgatggtttccagcttcatccatgttcctagaaaggaaatgaactcatcattttttatggctgcatagtattccatggtgtatatgtgccacattttctttttttttttcctttttttttacttcaagaaatattttat

SEQ ID NO: 886237 - DNA, 622 bp, Homo sapiens
aaatgatctgtttcttattattcttgagacaaatgtagttaaatgaatgcaacacctggatggtaagaatgaagtgagaagaagcagagttgcttccttccttccttccttcctccttccttccctcccttccctcctccctttacaaattcttccttcttttctttgctaaccatatagaactttattgtatcaccttggatgagcttagyatcagcaaacagttatcacagtatttgggcatttatttgaaagaactatgtaattcacagcccaatgtttaaagaccgtgtggtgaaaattgctttttcttctgggaatcatgtaaagagttttctacaacttttccctaagtaaatgctcagtgaccccaagacaaaataatctgaataaatccacatcttacctctactctagctgcagccaagagccatcagatggattccatcctgcctcttccattgaagtagtaaagcttgggcttcccctccatgcttaaggatttttgaaaatcaacatagagagactgattgagactcttctgcacagagaaggataaatacaagcttacagagcagcacaaggttgatcacaaagctgtggacttgcaacttatgcccca

SEQ ID NO: 886238 - DNA, 640 bp, Homo sapiens
gttttctttgggctgtatttgtataaatgtgttattggtatatgtaccaaaattatggaaaactcctatacttctcatatgacttaatgtatcttattaataattgtaattgtcacataaaatcatttgtgccacagagaaaaccaaatttctttgtcaatcatgtttctgaatgtggctatcctaagaygttttgtcatccacaaacaattattgtcttgttttggtcctctttataaggtggtttataatcaactatagaactctaccaggtgttcttaaatgcaagtttctgataactttggaaattgtgacattaaaatagaggaagcaactttcagaactcttatggagggccgaaatgttcactaatatcaagcagagcaagagacaactgcatggactaaactaatggaagtctaaagtaatcttttaaactttttgcttaaaatgctgctaatcttttgttttgtttatcagaatcaaggaaacttttctttttagttatttataccttttagcaattaaggaaagtatatgcctatgaacaaaaattgaagcattttatttgtctctacctaatttctccagaatttggaagctatttgtgagtattcttaatttatggcgatatagttat

SEQ ID NO: 886239 - DNA, 613 bp, Homo sapiens
actctgtcctctttatatattacatattatttctgaggcttactgaaataatatataatgtaatatataatgtaatatatattgtaatatataatgtaatacttcaggtattagcctaatgcatgaaagaaaaaacaaataataaagacattcaawattaaggaagaaattttcctaagataatagcagttaactaatacatttaagaaaaagtttgaaaaaaatcctttagaattttgtgcaatgaaaaatatttctcttccatttataataaaaagaagatttatcatgtaattgattattccatacactatcattatttacagtttattaataagaatggactaaaaatgtgaaaaaataattttggaatgcccttagggtctttgtgattttgagacaatctatgtcttccagtcaatgtcttaagatagatgtccttctcatgtatccttctgtggagagtggatagattagcttgcttcacaaaccatgccttaatctcaattcttactgattatatggtaaaagaaaacaaataggcaagtcatcaaaacttctctgtatgtatcctacccatgttggaaaccataaaattatttaacagagtcaa

SEQ ID NO: 886240 - DNA, 586 bp, Homo sapiens
tgaaagatactcaatgattccaatattcatggaaatgaatgaggtcagtatttaacagatcagtgaataaaggtacccataagacccttgccaatctaatctatctatgacattaggtgattaattttcataacaaacgacacgtttaaaattaaatcctatttctgagaagaatgtgtattttctgaaatggataatcacagtgtctagaaagtaatrttacagcaccacaacctaagtcccctgtcagcccagtttgagtcatgtacctgtctggaggaagcaaagttaatataatgacttagctgagtcatccagtgagagcccagtaatatgggcaaagttggagacctcatctgtgatcaaatttccactggtggtgacttaattaaccattgaccttgtactgaacagcaaaaatcataactatggatttctgtcagcctactgcctttcttgttaatgccacatcttacccaagaataggaagtgagctctactttctagaaacagaaatgtatttgaaataatccagtaattatatttctaccctgtgatattattatgttaatcagttgctctctac

SEQ ID NO: 886241 - DNA, 520 bp, Homo sapiens
tgaaagaagaaatgtttttgaagaaaattgtctgaaaactaggagtcaacatagaaaaaaaaaaaaaaagaagcaaaggggaggaacaaagccaatggaaagaagttttaaatctggacaattcaaccctaaactatttccaaattcccaccatacacccacccctaccacattcccaggtgttataaccacactatttccaaaacacgctgtacttgttcccaattctgtgttcccttgtatagtacaagggaacttaatatacctagagttctcactctccgctaattctttcaaataccacttcctctgtgaaagtttctccactctttgccccacattgtcttacttgtcacacagttgtrttagagcactcagctccctgtatggtagttggttttgtgtatgtctcctccatttaaatggaaactccaggttggcatatgcgggccttagccatcttctaaacccgaaggcctaccacctagtcaacacctaaagaatgtttattgaatgtgga

SEQ ID NO: 886242 - DNA, 655 bp, Homo sapiens
tagcaaagaaaataaaagataaaagaaggcccactagaaacctacatgaagaaatgtagataatgtagattgtctgttacttactactactatccctcctaggcagatgactttattgcaaagatccaaactgttaactttaaaactttaggcaattmatctgagatgacactttatagttgatataaatactcaattttctgatttcatcatgtaaaactttaaaataaaagccttcaagtattcagattacttcctttcttccatttccatgatggctttattaacattttggaatttggagtttagattacagtactttatatttgttggatattcctatcggggatgtcttttcaccaaatatttatgtttctgctatgtatggttgctattacaatctggtagttataagttttcaaagaactaaataaaactgaaaggtaaaatttgctatctacaacagaagtgaactggccttcagaagcttttatttttattttaagagtctgtgttaatcattatctaactaatggtatgaagtgacagttcaatttctttgcctctaagtaatgattatttgttgattgattcaatattctttgatttgctagatgaaccctgaaattctctttttttttcaacatgccagatt

SEQ ID NO: 886243 - DNA, 655 bp, Homo sapiens
tagcaaagaaaataaaagataaaagaaggcccactagaaacctacatgaagaaatgtagataatgtagattgtctgttacttactactactatccctcctaggcagatgactttattgcaaagatccaaactgttaactttaaaactttaggcaattaatctgagatgacactttatagttgatataaatactcaattttctgatttcatcatgtaaaactttaaaataaaagccttcaagtattcagattacttcctttcttccatttccatgatggctttattaacattttggaatttggagtttagattacagtactttatatttgttggatattcctatcggggatgtcttttcaccaaatatttatgtttctgctatgtatggttgctattacaatctggtagttataagttttcaaagaactaaataaaactgaaagrtaaaatttgctatctacaacagaagtgaactggccttcagaagcttttatttttattttaagagtctgtgttaatcattatctaactaatggtatgaagtgacagttcaatttctttgcctctaagtaatgattatttgttgattgattcaatattctttgatttgctagatgaaccctgaaattctctttttttttcaacatgccagatt

SEQ ID NO: 886244 - DNA, 583 bp, Homo sapiens
ttgtaagcacaggaataaagatgccagagcagaatgacagctttgaatgaagaatgccagtaaagtagaaagagaactaaaaatgcaagacctcagcatttcgcaacagaaacggaagcttttgtgggatttctacaatgttgcaaggatataaagaggaatagagcaaagtgttaacactttagaagggcaggaagatctaatcaatatggtaatatcagcaagggagatatagatgggcataatttgtggaactctattgtgtacttttttttttttttttttgagacagagtctcactstgtcaccaggctggagtgcagtggcatgatctcagctcactgcaacctccacctcccgggttcaagtgatgctcctgcctcagcagctgggattacaggcatgtgccaccacacccagctaatttttttgtatttttattggagacagggtttcaccatgttagccaggctaatctcgaactcctgaccttaagtgagccacctgcctcagcctcccaaagtgccgggattacaggcgtgagccactgtgcctggcccctgtacatacttttttaaaaagt

SEQ ID NO: 886245 - DNA, 603 bp, Homo sapiens
tggtttcttttacccagcagggcaataaaaactttcagaatgtttaaaaacgaggcttttgtgatggagcaaatccaaattttggtagttaaatccttcaaacattcaccctcttctcatgacaaagatctgctttgcctgcagtgaacatgtgtccacttttttttttttgagacaaaatctcaccgttgtcacccaggctagagtgcaatggtgcaatctaggctcactgcaaccgctgcttccgaggttcaagtgattctcctgcctcagcctcccaggtagctgggattacaggtgcacaccaccactccaggctaatttttgtatgtttagtagagacagggtttcaccatcttggccagactggtctcaaactcctgacctcaggcgatccacccacctcagcctcycaaagtgctgggattacaggtgtgagccaccatgcctggccaacatctgtcacttttgttgtcccagaatttcatttcatccacttttcttccagttacagcacagtgatttttctttggggaaccactcctacctgctctgactgtgtgattctgctgggaccaaaccagtgcccagtgccaggggttg

SEQ ID NO: 886246 - DNA, 293 bp, Homo sapiens
ttgttaagtttccttctaacagtcagggcctactgctgcacgtttgctggaggtccacttcagaccctgtttgcctgggtatcaccagtggaggctgcagaacagcaaagattgctgcctgttccttcttctggaagmtttgtcccagaggggcacccgccagatgccagccagagctctcctgtatgaggtgtctgctgacccctgcgggaaggtgtctccctgtcaggaggcacgggggtcagggacccacttgaggagacagtctgtcccttagcagagcttgagcactg

SEQ ID NO: 886247 - DNA, 664 bp, Homo sapiens
gctttcagcctctcttggctttcaacatgccttccacactaggcttagttatttctagattttgatttaaagtgagacatgtgcaactcttcctttcacttgatcacttagaggtcattgtagggttattaattggcctcattttaatattgttatgtctcaggatatggggaagctttagcagagggagagagctagagaacagccagttgttgaagtagtcagacgcacacaacatttattatttaagtttgccatcttgtatgggtgtgattaatagtgccccaaagtaacttcaatagtaacataaaaaattactgatmacttatcaacataacacatataataatgaaaacatttgaaatattgtgagaattaacaaaatgtatcacagagaaatgaagtatgcacatgttagaaaaaatggcactgataaggcaacgtgcagtggttcattcctgtaatcccaataatttgagtggctgaggtgggcagatcatttgagatcaggagttcaagaccagcctagccaacatggcaaaatcccatctttactaaaaatacgaaaattaggcaagcgtggtggcatatgcctctaatcccagctactagggaggctgagacaggaaaatcacatgaacccaggaggcagaggttgcagtga

SEQ ID NO: 886248 - DNA, 582 bp, Homo sapiens
ctgctgctgcctcttgggcagcagaagctgcttctcctgttatcttgaaatgtattaagccaaactcttcctaaaattatcaagccatcctttgttggcattaaattttccagcttgaaatccttcaccttcattttgctctaagttrtcatataatgattttgctttttcttgcattatatcagagtctatagttatgccttccttagagcaatcctgaatctccataaaagctgcattttaaatatgagattaaaaataaatatatttcacaaaaagaagtgcagttttcacatctgctgatgtagctgcagtgatggtgtcacaaattttcttttctttatcacaatggttcttagtctgaattcatttatctcaaaatggcagcaactgcagacctcattctatggtacatatcaagcaatttaactttttcttgtaatgtcatgacttttctctgctctttgggagcacttgcagcatcactagtggcacttcatatgggttcagtggtgttattcaaggtttacgtattgtactaaacaggaagaaaaatctataagaactttgaaaaatcacttt

SEQ ID NO: 886249 - DNA, 567 bp, Homo sapiens
tgttggtcaggctggtctcaaactcctgacctcagatgatccacccgcctcagcctcccaaagtgctgggatttataggtgtgaaccactgcacctggccaaaaagatccttcttgaacgtttcatatgccactttcacttagagacttaagtcacatggccatatagagaaatgtagtctttattatatgtagcattctacttagttaaatagcaagggttttacttaaagataaaggagggaattgatgttgggatagacagcattctcagatagaaacccctttacttagccctcttagatttggcagcatagaaaagaaaatcccacaacagtagtttcaacaraatcaaagttttttgtttgttttttctgttacttaaaagtattcttggggaaatatctctcaaaaagcaaagaatggttttgttaggaatatgctatatttttgaatttggttagtaagtgctgagagagggtgggatattttgctttccttcagcattatcttttacaagcagctatatatgtcctgttaacccttgttcttcctcagagacaatgga

SEQ ID NO: 886250 - DNA, 622 bp, Homo sapiens
agggctgtctgacccccacttccctgaatcagcctttcaggttaaattttaagaatgccctggctgagagcacagtggctcatgcctgtaatcccagcactttggggggccgaggcgggcagatcacctgaggtcaggagttcgagaccagcctggccaacatggtgaaaccccatctctactaaaaatacaaaaaatagccrggaatggtggcaggtgcctgtagttccagctacttgggaaactgaggcaggataatcacttgaacccaggaggtggaggttgcagtgagccgagattgtgccactggactccagccagggtggggaaagcaagactctgtctcaaaaaaaagagtgccctggccgagaaggaagtccattcagatcgttggtggggccttaggattttttaatttacacctctatcgtgtttgtataactataaatctttacattatattttagtattactatagggtttataaatatgcatcgctaatttaataaaatttacttgaactaatctatcgctttgtgtataatgtaaaatccttccaatggtaaaatgccatttatctcctttcaacctttgtgttactgtagattatatctcttaaatc

SEQ ID NO: 886251 - DNA, 622 bp, Homo sapiens
agggctgtctgacccccacttccctgaatcagcctttcaggttaaattttaagaatgccctggctgagagcacagtggctcatgcctgtaatcccagcactttggggggccgaggcgggcagatcacctgaggtcaggagttcgagaccagcctggccaacatggtgaaaccccatctctactaaaaatacaaaaaatagccgggaatggtggcaggtgcctgtagttccagctacttgggaaactgaggcaggataatcacttgaacccaggaggtggaggttgcagtgagccgagattgtgccactggactccagccagggtggggaaagcaagactctgtctcaaaaaaaagagtgccctggccgagaaggaagtccattcagatcgttggtggggccttaggattttttaatttacacctctatcgtgtttgtataactrtaaatctttacattatattttagtattactatagggtttataaatatgcatcgctaatttaataaaatttacttgaactaatctatcgctttgtgtataatgtaaaatccttccaatggtaaaatgccatttatctcctttcaacctttgtgttactgtagattatatctcttaaatc

SEQ ID NO: 886252 - DNA, 622 bp, Homo sapiens
agggctgtctgacccccacttccctgaatcagcctttcaggttaaattttaagaatgccctggctgagagcacagtggctcatgcctgtaatcccagcactttggggggccgaggcgggcagatcacctgaggtcaggagttcgagaccagcctggccaacatggtgaaaccccatctctactaaaaatacaaaaaatagccgggaatggtggcaggtgcctgtagttccagctacttgggaaactgaggcaggataatcacttgaacccaggaggtggaggttgcagtgagccgagattgtgccactggactccagccagggtggggaaagcaagactctgtctcaaaaaaaagagtgccctggccgagaaggaagtccattcagatcgttggtggggccttaggattttttaatttacacctctatcgtgtttgtataactataamtctttacattatattttagtattactatagggtttataaatatgcatcgctaatttaataaaatttacttgaactaatctatcgctttgtgtataatgtaaaatccttccaatggtaaaatgccatttatctcctttcaacctttgtgttactgtagattatatctcttaaatc

SEQ ID NO: 886253 - DNA, 658 bp, Homo sapiens
tctgtacaaaacccacctgcatttggtggacagagtatagatgtcatggttgaatggtgcactactcccgccccctccaaaaaaaaaaaaaaaaaaagatacattgaagtcttaacccaggaacctggggatgtgaccttatttggaaatagggtctttgcagatgtaatcaagttacaatgagagcatactggattagggtggccctaaattcaatgacaggatttaggagagggaaatttggagacagagacagaagagatacatagggaagaatgccacgtgaagacagaggtagagattgaagttacactgcaccagggattgctagccaccaccagaagctaggaagaggcaaggaaagagtctcccctagagccttcagagggagcatggtcctgctgtcacctcgatttcagacttytaagctgccagaagtgcaagagaataaatatccattgttttaagccacacagtttgttacagcagatagcagccctaggaaactgctaagtgcttaaaaaaaaaaaaaaaaaaaaaagataagccaactccttttgcagcagagtggctggtctgagtgacaggcagtctgggtagactattcctctaccctgccccccaaccccctacaccttttctttgcctcagagtgttt

SEQ ID NO: 886254 - DNA, 615 bp, Homo sapiens
tttattcccactgtgacttcgtagtatcagtctctttagtttttgccaatatggtggatggtggagaggggactggttattgttttactagcattctgattaccatggaggtagcattttcatttctttattagccagttgagttttactttctgaatgacctcttcttcttttccatttttgctgttgggttattgcttttttttcctccttgatttgttaagttcttcataataatactttttatgttaatccttagtctcttattccattgcaaatgtcttcctagtatgctgcctctcttttacaaacagtgatgcacaaaaagttaaaatctattactttktatgttttgtgcatttgttttaaattctttcctcttggaacatcttagtgatagcctcctgaattttctgctaatagtttataaacatttactttttacattcatgtagttaatttatctagaccttatttttttatggcaaaatagatttctaatgttattttttccacatgccaagtcacttttcccagaccatttattgaccagtttacctttcccgatttgcgaaaccatctgactcaaatatgaacttccaatatatgcttatg

SEQ ID NO: 886255 - DNA, 611 bp, Homo sapiens
gtgatgctgagcatttttccgtatgtttgttggccatttgtttatttccttttgagaattatctattcatgtcctttggaggaaggctattttagagacatggtttagggaaagcttgtctgagaaagggatgtctgagctgagacctgaatgaatcaaaaaaggaagacatgsaaatatctgggaagttgaaataaatcagcttctaattctgatggcaattagctaagtcataaaaagaataaaaccatgatcaaacaatcattgaaaattgaaatgattgaaattttgcaatgagtgcaaaagactattaattatagccaggggatcaaaagacaatgaaatctaaacattttctacattgctattatttcaatgataactttcatttctgttcccagaaattgcatgaagagttgtaaatggcctgagaatgagatttagtggtttttaattcagaggattagttgtcaatatttaaaatcagagaaatttacattaaactccatattttcagcttctcttgaaaaactagaaaaattgtcaatggcgttccaccttcctatgtggagtcagttggagctaagggatattttcccctttcaacagga

SEQ ID NO: 886256 - DNA, 606 bp, Homo sapiens
tccaatgacaatttcgggaaacatgaggagacatggtgctcttgtggtggcctgtattggaatctggtttgcccctcaagtgaatagtgttgatttgaaaacttctaatattctttcttttaggagatcttcttgatagttgcagaaattctgactggaatagattaatgtcttgctatttggcttgtatagtagcagcataaaattccacttcttcttaactgaagaaagcatttaatttaagcacaagaagatgactcaaactgagccactgcaaagcaggtgaagggctcaaaacattatagtggtttctcaatttgagtcatattttcattctcttgaatcaaagggtcacttaacaaacatgatttaattatataygtcttgcctgatttttagtcacagagaaattccgagatgaaaactctggaaaggtgtcattaactcaaggaagacaagggcagagttaggctagcaactagacactctgtgtacagtttcatatacaagcaagactttcctttaatattgataaagaattgagtatcatgtatgcattcccttttatgatatacaattaattgtaagttatttccccttgtatgc

SEQ ID NO: 886257 - DNA, 724 bp, Homo sapiens; identical to SEQ ID NO: 884221

SEQ ID NO: 886258 - DNA, 648 bp, Homo sapiens
gatactggtctttcctttctatatttagtgctttcttcaggagctcttgtaaggcaggcttggtggtgacaaaatctctcagcatttgcttgtctgtaaaggatctaatttctccttcacttataaagcttagtttagctggatatgaaattctgggttgaaaattattttctttcagaatgttgaatattggtccccactctcttctgctttgaaggttttctgacaagagatctgctgttagtccaatgggcttcctgttgtgggtaatgagacctktctatctggctgcccttaacattttttccttcattccaaccttggtgaatctgatgattacgtgtcttggggttgctcttctcgaggagtatctttgtagtgtttgtagtgttatctctatttcctgaatttgaatgttggcctgtcttggtaggttgggaaagttctcctggataatatcctggagttgttccaactttgttcagtcgaccattctccccgtcactttcaggtacaccaattaaatatagatttggtcttttcacaaagttccgtatttcttgaaggctttgttctttcctttttattctttttttttctaatcttgtcttcatgctttatttcattaagttcatctttaatctctga

SEQ ID NO: 886259 - DNA, 648 bp, Homo sapiens
gatactggtctttcctttctatatttagtgctttcttcaggagctcttgtaaggcaggcttggtggtgacaaaatctctcagcatttgcttgtctgtaaaggatctaatttctccttcacttataaagcttagtttagctggatatgaaattctgggttgaaaattattttctttcagaatgttgaatattggtccccactctcttctgctttgaaggttttctgacaagagatctgctgttagtccaatgggcttcctgttgtgggtaatgagacctttctatctggctgcccttaacattttttccttcattccaaccttggtgaatctgatgattacgtgtcttggggttgctcttctcgaggagtatctttgtagtgtttgtagtgttatctctatttcctgaatttgaatgttggcctgtcttggtaggttgggaaagttctcctggataatatcctggagttgttccaactttgttcagtygaccattctccccgtcactttcaggtacaccaattaaatatagatttggtcttttcacaaagttccgtatttcttgaaggctttgttctttcctttttattctttttttttctaatcttgtcttcatgctttatttcattaagttcatctttaatctctga

SEQ ID NO: 886260 - DNA, 630 bp, Homo sapiens
gaatattaattttgctaccaatttactgtaccaaaatgaagacttcacagtaagtaaagttttctttaattaaataaacaaataaagtagactcagaagacaaactggcccatttcaagtttgataagaaaaatagagaacctatgagtgttgcttttggaacaaaacctgcaactgtccaggaagaataatgtgaaaaatgtttgaattttcctttggaaacaaaatattagtctcagcttagaaaaggagtcaatatattccacttgtgtaacaaaaatacatttctcatatcaaacatgtcaccagctagctgccacctaacgcttcctgaacttgacaaactgatgaaagtcagcacccatctgataytggccaggtaaagaacatcattctgctgcaacactaaatattacattaaaataatgcataatactagacttgtaatttttgatgataggctgtcttctatgagttatatgatatttacaggtcaaattttaacactgaatctttattaacattttaaattgttatttggtactctagtatattaaatacataccctaatttatctaacaaattcccttttgatggacaattaagtcatactaagttttttgctaatac

SEQ ID NO: 886261 - DNA, 572 bp, Homo sapiens
aaaacagcatggtactggtaaaaaaaaaaaaaaaaaaagacacgtagaccagtggaacagaatagagagcccagaaataaggccacacacctacagacatctgatttttaacaaagctgacaaaaacaagcaatgggaaaataactccctattcaataaatggtgctggggtaactggctagccatatgtagaagatggaaactggacccctttccttacaccatatacagaaatcaactcaagatggattaaagacttaaatgtaaaatccaaaagtacaaaaatcctggaagacaacctaggyaacaccatcctggacataggaacgggcaaaaatttcatgaagatgccaaaagcaatctcaacaaaggcaaaaattgacaaatgggatctaattaaacttaagagcttctggacagaaaaagaaactctcaagggagtaaagggaaaacctagagaacaggagaaaatatttgcaaactatgcacctgaaaaaggtctaatatccagcatctatgaggaacttaaacaaatttacaagaaaaaaaaaaccccattaaaaaatggacag

SEQ ID NO: 886262 - DNA, 614 bp, Homo sapiens; identical to SEQ ID NO: 869309

SEQ ID NO: 886263 - DNA, 621 bp, Homo sapiens
gctgtatatttagtatggtgccagagataggactgggtaaaaaaatgtgtaaggcaccacactcaatagtgtcttaccccaggggaggagatagagctattttatatatttttttaaaacccagaaaaattatatgctatgttatgtgcttctgactccacgtgaaataagaattccaggaagaaaaaatcatcttctttatagctccctatttctttatacttaagctgtatttttcacactttggaaataaagtttggatagttggcatgagctacttagggttttaaaaaccaaggtgaggaattctgacctgatgagaaaaataaaagaagccactaatatatgtgtgtataggcaggtgaggtgatggaaatgcagttttaaaattagtgtcaggcagtgggtatgcaagctgaactgcagakaggaagtgtgaatgaaggaaataaaagcagtttcagcaatcctagatgatgtaatgtggatgtgttaagatatgtaatgctgattgctgaaacaacttcaaaagtcagtggcttaacacaataaagtattattcctctctcatgttgcagtcccatatggattagtgggaggtttggtgcaataaaatcattt

SEQ ID NO: 886264 - DNA, 660 bp, Homo sapiens
ttgcctaggttggcttttttatagttttggattttacatttaagtctttaatccatctttagttgatttttgtatatggtggaaggaaggggcccagcttcaatcttctgcatatggttataacccagcaccatttattgtatagggagtcctttccccattgcttgtatttgttagctttgtcgaagatcagatggttgtagacatgtggccttatttctgaactctctattctgttacattggtctatgtgcctgtttttgtatcatgctgttttggttactgtagctttgtagtatatagtctgaagttgggtactgtgatgcccccagctttgttctttttgcttaggattgccttggctattcaggtccttttttgttccatataaattttaaaatactttttttctagttctgtgaagaatgtcattggtagtttrataggaatagcattgaatctgtaaatttctttagtcattttaatgatactgattgtttctatccatgagcataagatgtttttcatttgtgtcttctatggtttctttgaagagtgttttgtaattcttgttgtagagatctttcacctccctagttagctgtattcctaggtattttattcttcttgtgcaattgtgagtgggattgcctttctgat

SEQ ID NO: 886265 - DNA, 632 bp, Homo sapiens
tgctgggagaaccactactctcttcaaagctgtcatacagggagatttaagtctgcagaggtttctgctgcctttagtttggctatgacctgcccccagaggtggagtctacagaggcaggcaggcctccttgagctgcggtgggctctacccagttcgagcttcccagccgctttgtttacctactcaagcctcagcaatggcaggtgcccctcccccagccttgctgccaccttgcagttcgatctcagactgctgtgctagcaaagagtgaggctgcatgggtgtgggaccctccgagccatgcgcgggatataatctcctggtgtgccatttgttaagaccattggagaagcgtagtattagggtgggagtgacccgattttccaggtgccgtctgtcacagctttgcttggctaggaaagggaattccctgaccccttgcccttcccgggtgaggcaatgcctcgctctgcttcggctcacactcggtgygctgcacccactgtcctgcacccactgtccaacaagccctagtgagatgaacccagtacctcagtgggaaatgcagaaatcattcgtcttctgcgtcactcatgctgggacctgtagactggagctgttcctattcg

SEQ ID NO: 886266 - DNA, 446 bp, Homo sapiens
aggagccgctggagggaagattggtgctagaagttcatgtgagaacagggcagacccctgcataaatgcggggcgggcggggcgggggaggtctcccaggcactgcgggtgtttgaatcaaggcccaaaccctgtggcaggagtactctcagggaactcaaacatttattttactagggctttaacatraagtatcagttcttaagaaaatccacaacatgtgagtgaaaatctcatttaatcggctatgagatgttatacaggtggaaaactgggttaagtgttaaattgttatcaccaaattgttgcaacaaattaccaatgcagcaatcatgcatagctgtaagggctcaagtaatggagggggtggccagcaccctggcagagggagacagcacagaaggtctttgtgactcaggtcatagaatggaaaatggttttgtggg

SEQ ID NO: 886267 - DNA, 627 bp, Homo sapiens
gctaactggcacaggggcagaaagagcagaaaaaacagcacgggttctgcactttgacatgcctggggcccattgggtgatgatgtgagttctgtgtgtttacatcatcgtttggcctttgagagacaacgagggagagaaygagagagagaggagctggagctgaaggacaggctgttctggccctggttgcagggggagcgggcggtgcaggctgcagagtgaacactaaagaggccgaggttgctctcctggctctacagtggggagctcctgaccttcccgggcctcagtttccccactcataagatgagggctagggctccatctggaaggcggtgaggattagtggcttcacaggtaaggtgtccagcccacactagcagtcagtaaagtgctgatttgggccccttttatctctaaaaccctggggtcaagacctgcacactttctttaccgaggactcaaatgcagccacagaagtagctctgggtatcccaggaccctgtctgagccactgccgcagaaagcagagtgggcctcgcagccgtgaggcgctgcgccacgggcccgggagggcttacccgtcctgtgctctctcgcaggtccagtgtcacagctacacgg

SEQ ID NO: 886268 - DNA, 610 bp, Homo sapiens
ggtttccttctccgtcacagaaaagtaaatacttatcttcctctgcttatgtgatacataactaaatatttttatggtctaagcatataccacctctcactacttaatcttcatttttaaagaagacagaactatagaaaaggccctgtatttsatccaaactgttcttgtataatctggaagaaatcacctaacctctctgaaatgtagtttcgtagcccataaaataagagtaactggaacacctgtccactggactttacagggtaattgagagaattgcttaaggttatgtctggaaaggtgttttgagagctatttatatctgtctacctatacctgtacttatatacctatagctctatcaaaatgcagtgtgtaatagttagattgatgggctcagattatcaccataatatttctattttggggcaaactatttcttttcgtgagggtcacaaagatgtagtaaaattatttgtggattatttatttgcttcattgttttgtgagtggccccattcaacgtagcttgaagcccttctctccattcccaatagtcaagcattctgaccaccaatcctgcagtttaggtcaccatcaataaagt

SEQ ID NO: 886269 - DNA, 610 bp, Homo sapiens
ggtttccttctccgtcacagaaaagtaaatacttatcttcctctgcttatgtgatacataactaaatatttttatggtctaagcatataccacctctcactacttaatcttcatttttaaagaagacagaactatagaaaaggccctgtatttgatccaaactgttcttgtataatctggaagaaatcacctaacctctctgaaatgtagtttcgtagcccataaaataagagtaactggaacacctgtccactggactttacagggtarttgagagaattgcttaaggttatgtctggaaaggtgttttgagagctatttatatctgtctacctatacctgtacttatatacctatagctctatcaaaatgcagtgtgtaatagttagattgatgggctcagattatcaccataatatttctattttggggcaaactatttcttttcgtgagggtcacaaagatgtagtaaaattatttgtggattatttatttgcttcattgttttgtgagtggccccattcaacgtagcttgaagcccttctctccattcccaatagtcaagcattctgaccaccaatcctgcagtttaggtcaccatcaataaagt

SEQ ID NO: 886270 - DNA, 531 bp, Homo sapiens
caaagtagaaacacaaaatcagcttttcagtgtgctccataaggttttgttaggaataacttcaagcatggaaaatcaccagaagatatactaccaatttatgatattttttcttttttcctcaccttgattaaagtctaattgattaataaaaattgacatatttatgatatacgatgtgaagttttagtatatgtagacattgtgaattcatttagttaagctaactaaaatatccatcggctcacatacttttgtttgtggtaagaacatataagatctactttcttaacaattttcaagtatacgtcmttattaactatagacaccatgttgtacattacatatcttgaacttattacttttctctaactgcaattatgtgtccttttgaccaacatttccctcattcctccatcctcagcttctggtaaccgccattctaatttttgcttctacgagtttaattattttagattccatgtatgtaagtgagctctggcagtatttgtctttctgtgcctggcttat

SEQ ID NO: 886271 - DNA, 588 bp, Homo sapiens
ttcttctttctctccctctctctctttctctctcagtcttcctgccatgtcaagacatagcaagaaggtagcagtctgcaagccaggaagaaagccttcaccagaacccaatcatgctgcactctgatctcagatttctactctccagaattgtgagaaaataaatttctgttgtttaaaccacccagttgtggtattttattatggcagcccaagcagacttaaacagaaccagaactacgaggtccaaattctagccctgaagcatgctagctgtgtgacactgggcaagtaacttaacctctytgagcctgtttttttcatctgcaaagtgagaataatagcaattcccttataggagtgtttaagaattaactaaattgatgcacttagcacagtggctgataatagtaatcaattaacaatcaacaattaccattttttaattatttattagcagaaagtgttacaaaagccttttacccctccaaaaaatctgaaatccttaattaaaaaaagataataaaatcctgttttagcaaataccaaaagcccaaaaagaaaaaagccctgacttttaggtttaag

SEQ ID NO: 886272 - DNA, 703 bp, Homo sapiens
ctgtgatgtctaaggtcccttctcaacagggacagcttatgatactgaactggagaggcagtgttgtgcaataattagggggctcagactttggagaaaagatagcccttggtttagatcttggctctgcatttattagcatctgtgggacctcaggcaagttacctaacttttctgagcctccatttcctcatctgtaaaataatgattataataatactttccgtatrgggctgtcgttaggattagatgagatcattctcaacaatcatagtagcaggcaccaataaatgcttgctgtaattattcctgttcccacttgtccctgacataaaatatgtcttagaaccatagggaaatcttgatttgctgagatctccaggagatgttgccttggctccattagatagatactatattctattatagatgaatcaacactagaaatagtagtaacaatccctgcaacataaatacagataatagaagggatatgggggcctaacatttattttcgtctatgctaggcattttatacactatttatcttgtctgatgcacacactccctaggtgagccacatgtttttctgtttgttttggttttgtcctttttacagatgtggacactggggttcagaaatgtcagctaacttactgaaggatctacagctaataattggcagagctagaaatcttctcca

SEQ ID NO: 886273 - DNA, 605 bp, Homo sapiens
actcagcttaattaactgcacaaatagattacttccccaatacaaaagttatctggagagagaaataaaaggatagggagggaagctatgaaaagcagaagccagaagacaaatttatctgactcaggaagccatactggttatcataacaataacaaatayttatagagggctttcatcctgaagaatcccagagcctcagagcaatgaacacttgtggtaaatagattaaaggaactactcagccatccaagagaggaagccctctctcctaggcccagtgcactaagtcatccctgggacaacattcgattttagccaagggattttaaaggaagctgaatggaacttccaagtcataaaacgtggacagtatacataaagaacaacccagaatcttttcacaagagagagcctgggagcaacaggcatgcccatagtcatcttaagtctcatgtattaagatcaccacagcttctgaggccagtgaaacctcactgatttgagataaaaggagtcataaataccatcagatgttgttgtatatcttgaaactacagatttatcacaaacacacacttctaaattaattaactctgtaagta

SEQ ID NO: 886274 - DNA, 624 bp, Homo sapiens
tcccacagcagtacctagctcccttaatctcagtaactacaataaatgcacaagcccccttttgtgtgaaactcctatctaatcaaaactaatcaccaaacagatctttgcctaacatatctgagtaacagaactgaaatctttaccctagcagaggcccccaataagcccctgtgaatgaagaaaagggtgattgggctgtttgccttcctcagtgctctgtgaaaactctacattcacaagaataaaatcaaaggcacttggaaaataagaatgcagtccaactctccacatctagactgattgggaccaggcagattcagatactgacaaattgaaaatagcagagatgcctcaaaaccagttttctgggagggatgttgaggaagtctaagagtgtcagagggagggggttgctgttgtgtaaactgacatggaagacctcgatttcaagatgataaaagctcagtctctaaggaggagcyaaagagtcccctttgtgtaggctaatttgtctagcaaaacagtccaggcaaacgagggctacagtaattggaagctatgaatgactaccatttattgagtgctatggtaagccacatgtgctttgctcagattaattca

SEQ ID NO: 886275 - DNA, 464 bp, Homo sapiens
catagcgtagcctctcagagaaaacaaatatttattccctgtgtcagtcattcattgcctgcagctaatatttatggcattcatccagagcactagccagcagagagtctgctttgtcgagcttcagagattccagcagcagctgggcagaggagcactaaagtttcctggagagattcacaacctcacagttgggagaaagagctgacaggtgwcctgcatggagaaagacatgaatgatcccaaactgcactgatgagtggccttgggggagtgcttcccatgagggtactggatattgatcaggataaactgggaaaggcctagactgagttttagtgcccatgtagtgatttaacgtcatggcttcagacaagccacttcatatcctaggtctcagctttctcagaagtaacgtgaaaagggtgacccagtttcattgaagatctttacaattttatgct

SEQ ID NO: 886276 - DNA, 449 bp, Homo sapiens
gcaagctgctccaaaaagcgctatctcatctatttctctgtacctggtccactccttggcttgttagaacacctcattcatgtgatcatgccacctcacactgttagaacacctcattcatgtgatcatgccacctcacacaggaagcagagcaagcagagatacatataagcacacaccttctttttctctaccatggtcaccatcaccttgacagtatcctagtgagatagtgaaacytgaaagttgaaaaggtcttataggtacttgctccaatatagaatgtcctgtaagtgatcttttagaatcttcttgaatgtgttggtccctcccaatcacctttctgacaactctggaaagttagttatacaaaaccggcgatttctgcctgcaacatctattctctagcctaaatgcttccatgcaaggccacagaaagatgattacag

SEQ ID NO: 886277 - DNA, 449 bp, Homo sapiens
gcaagctgctccaaaaagcgctatctcatctatttctctgtacctggtccactccttggcttgttagaacacctcattcatgtgatcatgccacctcacactgttagaacacctcattcatgtgatcatgccacctcacacaggaagcagagcaagcagagatacatataagcacacaccttctttttctctaccatggtcaccatcaccttgacagtatcctagtgagatagtgaaacctgaaagttgaaaaggtcttataggtacttgctccaatatagaatgycctgtaagtgatcttttagaatcttcttgaatgtgttggtccctcccaatcacctttctgacaactctggaaagttagttatacaaaaccggcgatttctgcctgcaacatctattctctagcctaaatgcttccatgcaaggccacagaaagatgattacag

SEQ ID NO: 886278 - DNA, 629 bp, Homo sapiens
attgaagaatctgaacctagaggaagccaagccaagaaatagagccttgggtctttgtttagatcttgaatcaagccaggcctaaagcctcatttacctctttggatactatttttccttcattatctgtttgaatgtaatttatgtaatatttaatgcctacaaaggataaatattaataataacaatgttatgaacatccatgcactcaccagcaatctaccattgtaccaactacatgctcctccyttaacctgtgtccttgccttcttctccagcagcaatcaccattcttagtgttacgttaagccagcggtccccaacctttttggcaccagggacagattttatgcaagacaatatttccatggggggggctggggggatggtttggggatgaaattgttccacctcagatcatcaggcattagtttgattctcacaaggagtgcacagcctagatcccttgcatgtgcagttcacaatagggtttgtgctcctataagaatctaataccctgctcatctgacaggaggtggagttcaggcagcgaggcttgctcatcaggctctcacctcctgctgggcagcccagtttataacaggccatagaccagtactggtccgtgg

SEQ ID NO: 886279 - DNA, 640 bp, Homo sapiens
tctgagaaaaactaattaactttctaattatatcagaagttgtaaatcataagtttttacactcttagaaaaaaggctgagaggaaaagatgacaaaccggtgatttaaatatcacctaagaatacataactttcattttataggcagctctggtggtaatattataaaaagcattctggtttcctcaaattccttcttaatgaatggcttctcaattcaataattttatttcagttaatctatcaccttgaaagcacattttaagaaagcctagtagmgcactcttttagataattcaataaatgtttaatttttcccaacccccacccctaaagcattcaccttgtttggattatagccttaactgacaggcacaggttcacttacagcatctgagctgaggctgattcttctcttgccaaggtgcattatgaaaaatttaaaagtgaattatgagacagtatctgattattaactaacaattgtattaaaaatttaagaagttcgcttaagaaaaatgaagtataaaaacaataacacaattttagtggtaggtagtcagaaatgttttgtggttttggagcctcagagaacgtagctttgattttggcagtttcgtatttgttttctgatcttcag

SEQ ID NO: 886280 - DNA, 640 bp, Homo sapiens
tctgagaaaaactaattaactttctaattatatcagaagttgtaaatcataagtttttacactcttagaaaaaaggctgagaggaaaagatgacaaaccggtgatttaaatatcacctaagaatacataactttcattttataggcagctctggtggtaatattataaaaagcattctggtttcctcaaattccttcttaatgaatggcttctcaattcaataattttatttcagttaatctatcaccttgaaagcacattttaagaaagcctagtagcgcactcttttagataattcaataaatgtttaatttttcccaacccccacccctmaagcattcaccttgtttggattatagccttaactgacaggcacaggttcacttacagcatctgagctgaggctgattcttctcttgccaaggtgcattatgaaaaatttaaaagtgaattatgagacagtatctgattattaactaacaattgtattaaaaatttaagaagttcgcttaagaaaaatgaagtataaaaacaataacacaattttagtggtaggtagtcagaaatgttttgtggttttggagcctcagagaacgtagctttgattttggcagtttcgtatttgttttctgatcttcag

SEQ ID NO: 886281 - DNA, 645 bp, Homo sapiens
agaatggcacagtaagagaacgaaacacatacacgtgcacgtgcgtgcacacacacacacagacacgcaaacaatctgcattaggtcctgaagagtttttccaggcaaaaaggagacagtctggaccacaatatggagatgcctacttaagaatctgtctggtttgggaaatggttggtagtgtgacatgcctgaagcacatggtacttaactaagtcttgtaggagatggggctagataagcagrctgggacccacttgtgaagcacagaaatatgatgcagagctgcagagcttgggctttatacagctgtgataaggtggctcagggaacagccatcactattcctctgaggtttaagaccgattttattgacttccatgctcagtggcctggctgcctacctaccattacacttctgtcactatataagctcagggatgatttttttagttctacccaggactagctaaaaacagacattcagcttttaaatcacaggaggaaaaaaaaaaactacaaagataagatagcctagatagaagaaaaaaaaggaaaacaaaggaagtcccaagaaagcataaagaagagaaagcataaaacaaaaagacaggaataagaccaaacatatcagttatgacagta

SEQ ID NO: 886282 - DNA, 651 bp, Homo sapiens
ttaatgcttagagcaactccataagataagagctagtgtcattctcattttatagctaaggaaatagagacaaactacataagttgctgaaaaatcacagcaaataattagctgaggaagagactcaaatctatcagaactgcttgacttttgatcctgagcttatgcgcatccagtgggcaagtgagggtgcatgggtttgtgaagactccagcagtatgattgggggtaagttacttaacctcacagttatgtgtactgtatctaatttcttattttttaaaaaaatttatttatttatttatttatttatttawttatttatttatttatattatagacacagggtctccctatgttgcccaggctggtatcgaactctgttgcccaggctggtattgaactcctgcgctcaagtgatcctcctgcctcagcctcccaaaatgctgggattacaggtgtgaaccactctacccagcccctccttgctcattcgtaatgaaacaacgctttgtaaaccgtgaaagtgctatataaagatatctttaaaataccaaagaagtccctgtaattagatattctaatgctagctactgtaacaaataaacctcagtatgacagtggcttactcctgtagaagtttacttcttg

SEQ ID NO: 886283 - DNA, 657 bp, Homo sapiens
aaactaagcactgaagataatccctccagatgaaccatttattgtgtggttatgcctgctctctgaagaggtgtaaggccccctgggtccgctctgccatctacaagtatgtctatttgcacagatagatggtgacttaatgcccaagttccttatgtctggttcttgactacctggagccctacctcctgtctcccctctcacctgagctatatttaaaacatcacaccttgctgcctttgaacatgctctttttcagcttatagctcttttcagctctttttcagcttaatcartttctaccttgctctacgactcagctcaagggccatctcattcattcattcatccactcattcattctttcaacaagaactaaatgcttcccaagtacctgataccttctgggagtccttcctctgtgcttccgttatacctgcacttcctgctaatgaaacatactgctctgggacaggattgtttattaatgtgtgtctagctcattagactttagattccttgagggcagattgtgtcttgctgacagactagcatagtttttagaattaagcacatagcaggtactcaataaataattattaaaggatgaataaaagaataaatgaatgaactgcatttcaaattctatccaggttg

SEQ ID NO: 886284 - DNA, 622 bp, Homo sapiens
ttcgggtgtctataattacacacctaaacatatgtttggaacaaaattggaatcctgttgtatataaagctctgaagcctatctttatgtccatatgtcaataacaacatgaaaaattctttagaaatatgttttatttaatgactgcattatttaagtgtgaagaacttcagtaaaatctttttcttatttttggaaattttgattgtttgccttttgtcaacattgcaagtaacgtggaaacaaatttttattcacaaatttttgttatttctatttttaggatcgaataccatargaggaattctggactgaagagttatgaagtcatttcagacacttccagacaatttgtgttaattaaattctcactggttgagttccattctacactggaagagcatttttcctggaaaggctcctcaaaatggtaataaagggtaattcttttagatgatcttgcatttgtttgaatgggaactgagcttaatcaaacatgttaggaagactatgtctgtttcactttttaaaattattttggatggacacaataattatatatatttatggggtacagagtgatattttgacacatgtatacaatgtgtaatggtcaacttag

SEQ ID NO: 886285 - DNA, 671 bp, Homo sapiens
ttatggatattatattgagtaagagaatatttgaggaagcctttcctcacttgatggaatgcaacccacaggttagatgcaaagcactctaataaggctgaggctactttgcaccaagagccaaggaagaggcaaaaatgccagcaggctttctataataagttaaaaaatcaaaatcatcgtcaccttcttccattttttttaagagagtgaatttggctttaggaaaaggcaagagaaaaagtgttaactgagcccctgcatgtgcatggtactctgatgaggacttaattaataactatgatctcattaaattttcacaatttctgtgaggtagaayttatcctcaaaactacttggaggtgaagaggctgaggttcagcaagggctatatctcatctccgtccctagcccactaggctgcaggcttccttcaggtggctgaactgggaagtggaatggccaacagtaggtggagtacgtatctgaccatttttgtagtttacatatacaatgtacacaaaacatatcatgagtgaattcaagggtaatacctgtgaattcaacctataattatttgtcagataaatgtttcatagtgttggacaggaagtatcatgctgtccatcgtaatcataaatggaagattatttttagttgagattccaagt

SEQ ID NO: 886286 - DNA, 625 bp, Homo sapiens
gacagacttcagtggagtggtaagggaccagtctctgaccaaaccccagcttcaccacctcttagctgtgtgatcctgggcaagttgcttaacatctctgggcttaaggtctcttatctataagctctcccatctttatgacgtgagcattaacggtaaccttcctcatggaattgttatgagtrttaaatgagatagtatacataaagtatttagaaatatgcccctgagcacttaatgagtgtcagccattgtgattattattttattgtttctactgtgagtgtgtttgaggcaaaatcagaaaactaatgaaaacttgaagcactggattcatagtttgcatctgcatgtggcaaaaaagaagacctactccaaagaaaagagagatgtcaacactctcattattatagcattcaggcaattcaaagatgctatctggccatcctaatagctacaggctggccgtttaatgacttacaaaaacaacaagaaaaagaaaccatggtttgatccctaaaagttacagaacatgaaagagaaggtctgcatctgtaaaaaaagtattgttctattcctcaaggcaattagcgtaatcaggatggatagagcagagcacaccggc

SEQ ID NO: 886287 - DNA, 469 bp, Homo sapiens
ttcctctagttcccaactagttaccatttccatctgagaccacctcagcctggactttattgtccatatcactatcagcattttggtcaaagccattcaacaagtctctaggaagttccaaacgttcccacatcttcctgtcttcttctgagccctccaaactgtttcaacctctgcctgttacccagttccaaagttgcttctacattttcaagtatctttacagcagtgccccactacccagtaccaatttactgtattagtccattctcacactgctaataaagacatacctgagacygggtaatttataaaggaaagaggtttaattgactcacagttctgcatggccagggataccccaggaaacttacaatcgcggtggaatgggaagcaaacgtgtccttcttcacatggcagcagcaagaagtacagagcgaagtgggggaaaagccccttataaaaccat

SEQ ID NO: 886288 - DNA, 594 bp, Homo sapiens
cagacgaaatctgtggagctttcttccttgggggaggaggccaacaacaacaacgaatacacacagaggaagagcaatggaatgaattgtgttccctcccctcccaaattcatatgttgaagccctaactgccaacgtgatggtatctggagatggggcatttgggaaataattagatttagaagagatcatgaaggtgggagactcgtgatgggattagtgcccttttaagaagagaaagagtcaggtgcagtggctcttgcctgtaatctcagcactttgggaggccaaagcaggaggatcgcttgagyccagagtttgagaccagcctgggcaacatggtgagacgccatctctataaaaataaaaataaaaaattagcccagtgtggtggcacacacccatagtctcagctacttgggaggctgaggcgggaggttgaggctgcagtgagctatggttctcatcagtgcactccagcatgggtgacagagcaagactgtctcaaaatgaaagaaaaaacaagagagagagagagatacaccagggctctctctatgtcctgtgaggacacagcaagaaggcagctgactg

SEQ ID NO: 886289 - DNA, 616 bp, Homo sapiens
ggttgatgggatgtgatgaggaaagaaaagacctgttagtcttgggaaatgcaaagtttgtttgatttgagttttcagaatttgtttatttttctcatcaaaatcctcattaaaagagtaagggggaaaaactcccttttgcttttatggtaggtgacgtattctgcaaatcccaggacaatcagtctcagccaagcccttaagaaagccaactggaggctcctttctgcttcagctttctaaatgttctgaaattataaagctggatttttcctgctgtttctgtttgggaaggcacttttttaaaatttaaatttaaattttttatttccataggcttttggggaacaggtggtgtttgtttccatgagtaagtcctttagtgatgagttatgagattttgrtgcacccatcacctgagcagtatacactgaacccgatttgcagcctctatccctcaccccctacaaaggaactttttaagagaagacaagggtttataacatcttccggggaaaaaaatccaccagattattccgagagactttgtagtgaactggagtataatgtttgtgtgaagagttgaattttgaattttcaaagcaggtatatttct

SEQ ID NO: 886290 - DNA, 680 bp, Homo sapiens
ggtgttaagtacattcatccatgtgcaatcctcaccacaatccatctctagaattttttcatgttgtaaaattgaaactccatacccattaaataataacacctcattcttctctcccccagcccctggtaacccctagtctactttctgtctctgtgaatttgattagtctagatatctcatgtgagtggaatcatatagtgtttgtcttttgttactggcttatttcacttagtataacatcctcaaggttcacccatgttgtaacatgtaacmgttttttccttttttatggctgaataatattccattgtatggaaatgccacattttttttattcactcattcttccatggacacttgggctgcttccacctcccagctattgtggataatgctgctgtgaacacgagtgtgtggatatatgctcaattccaagcctctgattttgcacctttggtaatgaaggaatcccaagggagggttgcagaagctccagggcaggagccctgatcaggcagctctccgctctgcccatgagtctccaaaaggtcctctaggtatatgagcctgtccctaagggcctgaccaacttctcggttaataagaaaaactttgccaagactgcagatgattgcagaagcagcagctcaactcagcatgtccctaccagctttttg

SEQ ID NO: 886291 - DNA, 680 bp, Homo sapiens
ggtgttaagtacattcatccatgtgcaatcctcaccacaatccatctctagaattttttcatgttgtaaaattgaaactccatacccattaaataataacacctcattcttctctcccccagcccctggtaacccctagtctactttctgtctctgtgaatttgattagtctagatatctcatgtgagtggaatcatatagtgtttgtcttttgttactggcttatttcacttagtataacatcctcaaggttcacccatgttgtaacatgtaaccgttttttccttttktatggctgaataatattccattgtatggaaatgccacattttttttattcactcattcttccatggacacttgggctgcttccacctcccagctattgtggataatgctgctgtgaacacgagtgtgtggatatatgctcaattccaagcctctgattttgcacctttggtaatgaaggaatcccaagggagggttgcagaagctccagggcaggagccctgatcaggcagctctccgctctgcccatgagtctccaaaaggtcctctaggtatatgagcctgtccctaagggcctgaccaacttctcggttaataagaaaaactttgccaagactgcagatgattgcagaagcagcagctcaactcagcatgtccctaccagctttttg

SEQ ID NO: 886292 - DNA, 607 bp, Homo sapiens
ctcaccaacttccagcccagtctcactcatgctttgtggtgtgaactgcaggctgattttgattgttgagagcagtgcaaggaagacaagtctggccttccttatattaacaaatggcactcactgcaataggacctatctgggaccaatccaagctgtccatggaccctaactagctccttcctggttgggcagaagcctctggaaacagagtakgtttaagatttcagaacaggtcctcattatttgccaaattctttcttccctttgtaaacgattatgctagtttaaacaccaaaagggagccagccggagagacattaaaatgagtagcttcagtaatgtaaataatccattacttcaactagttctgctttattcctaccacaggcctaaaatttggcaaggaagttgagcaagcctggcggcataagccagagctcacaagaactagcctatctctgtgaaggtgtgcagtaaacacttcacattaaaatggcccagtaacttggacattttgggaagcctgtacccaaagggcaggtgcaagttggtgcccatattggtatagaggtagccagttaagtgagcatttaatagagccagc

SEQ ID NO: 886293 - DNA, 539 bp, Homo sapiens
gtgtcagaaaagcctcagagacggtaacacttaggcagagatctgaaggtgaagacagccagtgaagaccatttagaggaaagagaataataaaaacaaagtcccttgggtaggaaagtacatggatttttctaggaactgacagaaggtcagaacagcaatgatatagagaatgtgggtgaacatggcagaagacaaggtgggagacatcagcaggggccacagcattgagaccatgggaatagtctcgactttgggagatgcaagtatcagaaacccagtgtaaactggttcaaggaaaaaagggaatgtattggctcagttgtccaaaaagatcaagtgtggacaaaaacttgctcagatagtgtcactggcaatccatgtctstctcacctgtctgttttcctctggcttgcttcatttccagaaaggcaaaatgtggcaagaatgtcacaagttagtaaagaatataaaattcagccacatagtctagcagtttagcaatcctaaaagattgcactggttttcttttttttttt

SEQ ID NO: 886294 - DNA, 503 bp, Homo sapiens
agattaaacagtttattgcttttgaagtgtattttgtcagtccagttgagggactgagtctcagtccagatgagggactgccagtttgtctagcagttgatacaaactaattacctctggtaactttgcaggagctgaaaacagaagtgtgactagtaaggtgtgaaggtggcttgatttctagatatgaggctcttggtgcttgttggctgacagacactctccctttctttagttcagcagccactctggtagtcttaaacgtcagagtttttaagaggggtattcatagcccaaatctagggataaatgtaggagatggaggaaaggggagttgccrttttattggtgccactgtttagttaaaatacctaaaacattttctcattcccctttttcctgcctccactgcctttggatgtagatttattctggagttctgttgggaaaacacactattttggaatgttttacttgtctactgagagggttcttcggctatt

SEQ ID NO: 886295 - DNA, 667 bp, Homo sapiens
atacaataatggggctcaaaaatttaatagagggtttcaataccaatctatataaagcagaagaaagaattagcaaacttgatgacaagtcattagaagtcatccaatctaagaagtcaaaagaaaaaagaatgaaaaagggtgaagacagtgtaggggatttgtgggacaccattaagtggaataatatatacattatcagtgtaccagaaggagaaaagaaacagaaagggacagaaaacattcaaggaaataatggcagaaaatttcctaagtctggaaaagaaaatagaaatccatatccatgaagctcaatggtctgttataggataaattcaaaggracacacaccaagacacattacaatcaaattgtcaaaagttaaagacaaagagaatattgaaagcagtaagggaggagtgacttgttacatacatgggacctctagaagactgtcaatggattttccacagaaatcctgaagggtagaagggaaagggatgatatattcaaaactgaaataaaaaaaagaaccctgccaaccaagaatactatacccagcaatcctgtcccttaaaggtgaagaagagataaaaactttctgagacaaacaaaaggtgagggaatttatcaccattagacctaccttacaagaatgctaacaata

SEQ ID NO: 886296 - DNA, 477 bp, Homo sapiens
tgtcaaaagttaaagacaaagagaatattgaaagcagtaagggaggagtgacttgttacatacatgggacctctagaagactgtcaatggattttccacagaaatcctgaagggtagaagggaaagggatgatatattcaaaactgaaataaaaaaaagaaccctgccaaccaagaatactatacccagcaatcctgtcccttaaaggtgaagaagagataaaaactttctgagacaaacaaaaggtgagggaatttatcaccattagacctaccttacaagaatgctaacaatagtccctcaagcttaaggaaaaattgttaagtagcaacatcaaagtrtgttaaaacataaaacttactggtaaaagtaagtatgtagttaaactcagaacactcttagattggaacagtggtgtgaaaataaattttgtttctagcatgaaaattaaaagacaaaactataaaaacaactgta

SEQ ID NO: 886297 - DNA, 601 bp, Homo sapiens
tcaatggattttccacagaaatcctgaagggtagaagggaaagggatgatatattcaaaactgaaataaaaaaaagaaccctgccaaccaagaatactatacccagcaatcctgtcccttaaaggtgaagaagagataaaaactttctgagacaaacaaaaggtgagggaatttatcaccattagacctaccttacaagaatgctaacaatagtccctcaagcttaaggaaaaattgttaagtagcaacatcaaagtatrttaaaacataaaacttactggtaaaagtaagtatgtagttaaactcagaacactcttagattggaacagtggtgtgaaaataaattttgtttctagcatgaaaattaaaagacaaaactataaaaacaactgtagttacactaacttgttaagggacacaaactaaaaattacaaaacatgtcaaaaaaacaaatggagaggaataaaagtatagagtttgtgcaagtgatcaaagttaaatcattatcagcttaacaagggatgttcttagcatatgatgttttatataatcctcatagtggccaaaaaaaaaaaaaaaacaactccttagtggatacac

SEQ ID NO: 886298 - DNA, 558 bp, Homo sapiens
aattttaaagagggtaggtagcttcagtatgtagcatcactccctctccctatttcttttttcttttttttttttttgagacatagtctctctcttttccccaggcatgatctctgctcactgcaacctctgcctccagggatcaagcaattctcatgcctcagcctcctgagtggctgggattacaggtgtgtgccaccatacccggctaatttttttttttgtatttttagtagagatggggtttcaccatgttggccaggctggtcttgaactcctgacctcaagtgatccacccacctcagcctcacaaagtgctgggattacgtgcrcacacacctagctaatttttgtattttagaagagacggggtttcaccatgttgactgatctcgaactcctgacctcaagtgatccacctgcctgggtcacccaaagtgctgggattacaggcatgagccaccgcgcctgcctggcacctctccccattccttgtttttgtttgctgcaccaactcctagtgttgcacaaagcatgctttagggaatgtggtttgga

SEQ ID NO: 886299 - DNA, 606 bp, Homo sapiens
cagcttcactcattctctcaccctcctcaatatccagttagttatttggcctggcaattcaacttccaaaaatccctctcaattcagtatctcctttccatcctgagctaccgctgctcatgttctagctcatgaatttaatcccaacactaatgaggctccctgcttactggatcttcctttcttaataactcatcactctaaatccattaggtcattgttcttaagaatcttaatggagaaaatattcacaagaggttaacgtaatgcaaaagatggtgaaacgctctggaataaggatggaagcttaatgggaaacaaataccccatcctatttttgcatgtcctctgatctcctgctggggccacccactgccaraaacaaccaaaagttagagggcaagcaaaagagcatgggtgataccatctatctacaacagttagcttcttagggtacagactaggtggagagataccatggtggggaaaacgacatgtggacgccattcagcacagttactttttctgactctcccaagaagaacgcattttcccctcattgatattccaagagaaatatcattttattggtacctcaactgaggc

SEQ ID NO: 886300 - DNA, 633 bp, Homo sapiens
tcctccctcacataaaggctatattcaacagggaaagaacaggagtcataagaaaatgttattttgaggaagccaaagaggaacttgcagtaaatccctgtaaaatccatgcaagaccaacaaggtttttgaggatttyatatgagcagaaacactgccagtttggattgaaagggacagataacatataaaattgaaggagactgttggaccctcaaaattctactggcaagaggcaggctgttaaaactgctcagctacaaacaaagtactacctttcactgaaaaaggaaggatgacagcggtgtagctataagctcagagggtggagccatgagcccagagcaaaccaagagcaaacagggtagaaccaagagcaccgaggcagagctgagagccagaattattcccaggccttgaaaccttatcaaggaactgaagtctgcccagctgaatttcaaagctgccatgggctggtgactcctttttaccttctgtttttcctctttgtgaacctgaagtctatgccagtcccaccttgcatgttgggagggctgcaggcagatgacttgtctctttagtttcgtaggtccacagacatggagagaactatgttcaggagctgtagacaga

SEQ ID NO: 886301 - DNA, 633 bp, Homo sapiens
tcctccctcacataaaggctatattcaacagggaaagaacaggagtcataagaaaatgttattttgaggaagccaaagaggaacttgcagtaaatccctgtaaaatccatgcaagaccaacaaggtttttgaggatttcatatgagcagaaacactgccagtttggattgaaagggacagataacatataaaattgaaggagactgttggaccctcaaaattctactggcaagaggcaggctgttaaaactgctcagctacaaacaaagtactacctttcactgaaaaaggaaggatgacagcggtgtagctataagcycagagggtggagccatgagcccagagcaaaccaagagcaaacagggtagaaccaagagcaccgaggcagagctgagagccagaattattcccaggccttgaaaccttatcaaggaactgaagtctgcccagctgaatttcaaagctgccatgggctggtgactcctttttaccttctgtttttcctctttgtgaacctgaagtctatgccagtcccaccttgcatgttgggagggctgcaggcagatgacttgtctctttagtttcgtaggtccacagacatggagagaactatgttcaggagctgtagacaga

SEQ ID NO: 886302 - DNA, 498 bp, Homo sapiens
caaaactaagcagtcgaaggtgatttgagggctctgacctgtgatgtggccagtggatgtctccattaacagaagaaaggaatttgatcaaaaccacaacgtaataccatcttatccccccaagaatggccataataaaaaataaaaaaaaaaagatgttggcatggatgtggtaaaaagggaacacttctacactgctggtgggaatgtaaactagtacaaccactatggaaaacagtgtggagattctttaaagaactaaaagtagacctaccatttgatccagcaatcccactcctgggtctctacccagaggaaaagaaatcrttatatgaaaaagatacttgcatgtgcatgtttatagcagcacaatttgcaattgcaaaaatatggaaccagcccaaatgcctatcaaacaacgagtgggtaaaaaaactgtggtatatatacatgatggagtactactcagccataaaagggaattaatggcattcacag

SEQ ID NO: 886303 - DNA, 509 bp, Homo sapiens
ctccagaaaagaacatgcttctgaggaagggacctgaacagggtgacatgagtaagtgatgagaacagggcagaaaggcaaaaatatacgcccaaaaaacacttgcataaatatttcacacatttttctacagaataaatttagaagccatgagtgatggctcacatttgtaattgcagcactttgggaggttgaggtgagaggatcgcttaagtccaggcgttcaaaaccagcctggacaacatggcaagatcctttctctacaaaaaattttttttaattaaaaattagccaggcatggtggcacgtacctgtagtcctaactacttgcaaggytaagacaggaagataacttgagcccaggaggtcaaggctttcataagccttgatcacaccactgtactccagcctgggtaaaggagcgagactctgtccaaaaaaaaaaaaaaaaaaaaaaaagaatacacttcccagcctacatttttctccgtcccatgttatatgatctt

SEQ ID NO: 886304 - DNA, 626 bp, Homo sapiens
tgatgaacatcaatgtgaaaatccttaataaaatactggcaaaccaaatccagcagcatattaaaaaggttatccaccacaatcaagttggcttcatccctgggatgcaaggctggttcaacatatgcaaatcataaacataatccatcacataaacagaaccaatgacaaaaacaacatgattaccacaatagatgaagacaaggctttcaataaaattccacacctcttcatgctaaaaacattcaataaactaggtactgaaggaatgtrcctcaaaataataagagctatttatgacaaacccacagccaatatcataataatgggcaaaagcgggaagcattcccttggaaaactggcacaagacaaggatgccctatctcaccactcctatttaacacagtattgaaagttctggccagggcaatcaggcaagagaaaaacataaagcatattcaaataggaacagatgaagtcaaattgtctttgtctgcagatgacaggattgcatacttagaaagcctcatcatctcagcccaaaaactccttaagctcataagcaacttcagcaaagtctcaggacacaaaatcaatgtgcaaaatccacaagcattgctatacac

SEQ ID NO: 886305 - DNA, 597 bp, Homo sapiens
aataaaatccaacatcacttcatttaaaaaaatctgtcaacagactaggaattgaaggaacagatttaaaagagtaagagccatctacgacaaaccttcagcccacatgatactgaatgggcaaaagctcaaaccattccccttgagaactggaagaagagaatgacatagtactggaagtcctagccagatcaatcatgcaagagagagaaataaaaggmattcaaataggaaaataagaaatcaatctctccttatggatcatataattctatacctagaaaatcctaaaggctctgcgaaaaagctaccagagctgataaatgactttagcaaagtttcaggatacaaaatcaatgtgcaaaaatcaataacatgtctatacaccaacaatgtccaggctaacagtaaaatcaagaacaccatcctacttacaatagccacaaagaaaatgaattatctagaaatacagctaactaaggaggtgaaagatctctacaagaagagctgctgacagaaatcagagatgtcacaaacaaatggagaaacactccatgctcatggattgaaagaatcaatataatgcaaatagccata

SEQ ID NO: 886306 - DNA, 597 bp, Homo sapiens
aataaaatccaacatcacttcatttaaaaaaatctgtcaacagactaggaattgaaggaacagatttaaaagagtaagagccatctacgacaaaccttcagcccacatgatactgaatgggcaaaagctcaaaccattccccttgagaactggaagaagagaatgacatagtactggaagtcctagccagatcaatcatgcaagagagagaaataaaaggcattcaaataggaaaataagaaatcaatctctccttatggatcatataattctatacctagaaaatcctaaaggctctgcsaaaaagctaccagagctgataaatgactttagcaaagtttcaggatacaaaatcaatgtgcaaaaatcaataacatgtctatacaccaacaatgtccaggctaacagtaaaatcaagaacaccatcctacttacaatagccacaaagaaaatgaattatctagaaatacagctaactaaggaggtgaaagatctctacaagaagagctgctgacagaaatcagagatgtcacaaacaaatggagaaacactccatgctcatggattgaaagaatcaatataatgcaaatagccata

SEQ ID NO: 886307 - DNA, 614 bp, Homo sapiens
aatatcaacctcttactacacttggcttgtgttattctgagtgtgaatatcagcatatacatatatacatgtatggatagaaacataaataggtaaatgtaaatgtaaatatatatttgaaatgtttataagtaagatttagacaaaatatctctttacctccaagtatttcactgtatgtatttaataaacaagagcattcttctccataaacagattwcagttacaaaaatcagaaaattaacattaatgcagtactagtatgtaatctacagactttattcaagttatatgaattttcccactaagggctttagtctgatttgggattcaatttgttattacataatgtatttcattgtcacatctcttcaatttcctttaatctggaacacttcctcatctttgtttttgctccataacttagaaaactttaagattaaagaggagaattttgcagaaagttcctcaatctggatatgctcataataaaacattgggagatagcagaattgcattgctgtttcaacattcaaaacgatattctgagtaggcattttaagccatgtaatgtgaagagagaagctttttggttaccatcaccccaaagtgtc

SEQ ID NO: 886308 - DNA, 597 bp, Homo sapiens
ttggaaacattttagagacaggtttgaagtgggcccatgaaggtaggcagtaatgttggtgacattgaactttggccatctacctctctttcattctcccaaatatgtaaataaatagagggaaaagccaaagaaaaataacaggctgatgagaaaatcaaatgtctaatttagaaacataatgaagaaactaagtatgtgtaaactattcagaaagtacataattacatttttacattgtatagaaattgagatttgggtgatgataaaagagtgaataggctgggcgcagtgtctcatgcctgtaatctcagcattttgggaggccaggctggtggatcacttaagctcargagtttgagaccagcctggacaacatagcaaaaaaactgtctctacaaaaaatacaagaaattagtcaggcatggtggtgtgtgcctgtagtcccagctacttgggaggctgaagtgggagaatctcctgagccagggaagtcgaggctgcagggagccatgatagcaccactgcactctaggaatagattacagatatgatgaataaacactaagatgattgaggagggaagcagtggattgt

SEQ ID NO: 886309 - DNA, 576 bp, Homo sapiens
ataatttagtattgaaaatggagtaaaatttgctaacaaattataattcattgaattcaactggtggagtttttgtctagaaaatcccaaaaaatcacaccataaattcaatttttttaaatacacagaaactacaatatggctttttcttaaataatattaaaatgcaaccagcacaatatttttaataaagtcatacttaaacattaaaaaatgttcttttcttgatcacaaatgtrcaaaggactgaaaacttatgtttttatcagataagatggtagaatttacattattgagtattaataattgacaaataatgaaccaaaataaaatgtggtagatatccacatttgacagatgcagaaaaagaggctcatagagttcaagtcagaatactggtaaataatgaggttgagaaatgaactccatttatataacactagattttatactttttcttctgtatttaataattcaccaatgaaaaagccattaataaggtataattattctgatgcatttatagactgtgtggattcttgaatcactcaattttacaagcatttattgagtccc

SEQ ID NO: 886310 - DNA, 593 bp, Homo sapiens
tataaacttttctcttagtactgcttttgctgcatcctgtaagttctgatatattgtgtttctgttttcatgtgtttcaaaattttttcaaatttccttcctaatttcttcattgatgcattggtcattcgagagcatgttgtttaattttcatgcatttgtacagtttttaaagttctttttgttattaatatctagttttagtctcttgtggtcagaaaagttacctgaaatacttttgatttttttgaaattgttgacacctgttttgtggcctaacatattgtctgttttgcagaatgttgcacatgctaatgagaagattgtgttttctgcagcagtcagacaaacgtgggttacattcatttggtctacrttatattctaactctgatgtttccttgttgaatttctgcctgaacgatctgtccactgcttaaagtgggctattgaatccctctactggtattgcagtccttctctccctttagatatattaatatttggtttgtatatttgcatgctctgatgtaggataaatatacatttaatattgttatatcatcttgctaaattgactcctttattactgta

SEQ ID NO: 886311 - DNA, 579 bp, Homo sapiens
gaaaatggactaatacaccaccaaaccagctcaatccttttagtcctctacaaaccaaaagaaacctccttagtgagtcaaattttgtgctgagtaacaccaaggcattattaatgctcaaatagtggtcattttaagtccgtggtgtgtcattgtgactcaagaaccacactgtaccatagcaccgtgtgtgtgtgcctagatggtgtcaaaattatacttttattttaatttccgtatctcagaattttcttattaaatcaacaagaacaggtttgtttggagggcttttgtttggggaacttttttwaacaaaacttctggcattgtttttttcatctgcaaaaaacaaaaacctaacagtccttccctacttctcagaggtgtcatggggattaacataatgcaagtgtaagtgccttaataagcatcattattttaaaaaaaatcccttgcagatgtaagcatgcagcttgctgaaacggtagaatcccataaggcctacagaacataaatcacaatcccttaaatctgcgggtttgtaacccacgcactgtagccttgtagaacgacagagaa

SEQ ID NO: 886312 - DNA, 565 bp, Homo sapiens
ttccccatgttgcccaggctggtcttgaacatctgggcttgagtgatccttctgccttggcctcccacagttctgagatcacaggcgtgagccaccatgcctggcttacccatgatttttaatgaatattttgtgtgtgtattttatatcgagagccggtaaaacagggcaggggctccttttgcccaagtctaaaggtagactgcaggttggatgacataaacacacagctcaagtgggagatgaaggcagtgctgacacagcaggcaggaccacagaggtgacggatgtggcagaggctgtggtgacctggggagcctgtgctcgtctatagagcactgtcaacattctgcccttaccagtgactgactggtaggaaagtggaccaggccttgttgaaatgtttgatttctcaagagaatgccacaktttaaattttcatgtgaaaagtgaatattgatgaataattaaaatttaaaaaactgaaaagcacatttgggtggggatcacatctctgggctggatttgttcccaaagccaccatgatcagccctctggtctactg

SEQ ID NO: 886313 - DNA, 556 bp, Homo sapiens
atagaatcttatacttgaattagcattcagtgagaggagaagatagttgatatatgacttggtatcacacttaaacactgtacaccagaaaaaaaaataagggtgatggtgaaggtaagatggcaatatgagaaaatastacaatggaaaaagtatagctttcagacaagagaaaaacaaccatcaaaagacttggttggggcgactgggcatggtggctcacacctgtaatcccagcactttggggggccaaggtgggcagatcatgaagtcaggagttcgagaccagcctggccaacatggtgaaatcctgtctctactaaaaatacaaaaattagctgggcttggtgatgcacacctgtaatcccaactactggggaggctgaggcaggagaatggcttgaacccaggaggaggaggttgcagtgagccgagatcgtgccactgcactccaacctgggtgacagagcaagatttttttttttttttttttgagacagacttggttgggcacaatggctcacatctgtaatcccaacacttttgagaggatcac

SEQ ID NO: 886314 - DNA, 596 bp, Homo sapiens
tcaggggagcaggctcaataagagtttttgctgatggatctggagggcctgtatagtaccaggcacataactaacacgtaaccagtgcttaataatcatcagctaaatgaatgactgaatgtgctctaagcaatcctgcctgggagtctgcctttccagcgaagcttctgtcagcataattctgcttatttctaatttatatgttgagcataaaggaaggtgttcattaaaaaaagtaaagaatgattttatggttgaaaccaagtctgaaatatctattgataattctgtgttactatttctggttattatttaaaaacaacaacaacaaattacaacacctcttactctcattttcttctatgtattactaaattctatgagaaagctgtgtctatactgtattcatggtagaaagaargataatctgtgctttgacagataaatcagtgatgactagacagagaaagggaagatgggacatgccagtaaaaaggaaaagcatgtgtgaaggcaaagagtaatgggagaacatggcaagcttaggtggtgagaaaggtgatgttattggaaggcatggttggaggacggtagta

SEQ ID NO: 886315 - DNA, 646 bp, Homo sapiens
tttaatcaagccccattaatccctccctgtttcaaagctcagcacaggaaccacaaactcccacagcctctgacaggaatcatgtggctaaagccaaggggaactctttgaaaggtaattagcatctttgaattcagggccctttgattttgcttcctggctttaaacgatcacagaacattttgcagaaaagggggaaaacataaaggcagcagctacagccccttacactgggccttctgcagcctttcaagttgtgatgtggcctgagagaggaaacttgcaaatatgattaagtgtgggtgagttgttgagttgtaccaggggccatgcattcattcattcattcattcattcactcagkctcacaaggcaccatgctaaacactggatgtacagttttcattgatcattcattcaatcaatcattcatttactaatatccctggatcaaacactgagctaagctccagggctataagtttattgtttaatgggagaggcagacaagaattaaataaataaaaacaattgctgttaagaataaagtaccaagaactaaataaactgagtattcatccagcgaggagaaagagatcatctttacaataggtacttagggaaggccactctgaggagggaacag

SEQ ID NO: 886316 - DNA, 658 bp, Homo sapiens
agttgtttgtttctttttactactgagtagtagccttaagtatgctgatacttttttttttttttgagacggagtctcgctctgtctcccaggctggagtgcaatggcaagatctctgctcactgcaagctctgcctccygggttcacgccattctcctgcctcagcctcctgagtatctgggactacaggcgcctgccaccatgcccggctaattttttgtatttttagtagagacggggtttcaccatgttagccaggatggtctcgatctcctgacctcgtgatccacccgcctcagcctcccaaagtgctgggattacaggatactttttttttttttttaacgatttacttgttacaagctatctgggttgttttcagtttggggctattttgaacaacaacaaaaaaaactgttgtaaacatttgtatacaggattttgtgtgaacataaatcttcatttctctgggatacatacccaggaatacagttgctgggttccatggttaatttttaagaaattgccaaactgttttccagagtggctctaccatttaacattcccaccagcaatgcatgaatgattcaatttctacgtatccttgacagcatttggtgttgtcactttttttgttttagccattttggtagatgt

SEQ ID NO: 886317 - DNA, 606 bp, Homo sapiens
ctgagtgcccatttgcttacattagtgagaactaaccagtaatctggccttttcctaaggatatgctaaatctaaataatgtttccctaagatctcacctcactttccataagttacgttggcttcttgacctcatcacaaaatatattgtaactaagtaactgtcaagaccatctcagtgagaacttctaagcagataaattgggaagtaaatgataggaacgccactttttgatccaggggtcagcatcatccatgacaatgccacgtggtctagggacttcactgtatcctgtgcacattgaccacgccaagccaccatttccctcatgtgttttcctggacacaaagggatatgaatacacatatataggaaatgtctgactctttaggggactcagacttaaacacacaccttctgtgtcactgtcaaatcacaytgatgtgaagcctcagtaggaccatctctatgtgatgtagagaatgtcataaaatcaatgtatatcttttctgttatttaaagatagtcctaaagaatattccctttgactttaaacccctttgattctgagagtatttaaagtagaggtgtttatgcacatttat

SEQ ID NO: 886318 - DNA, 600 bp, Homo sapiens
gaatgtcaagacacatgaggcaaaaactgacataactccaagaaggaaaagatgaatccacttttagagttgcagacttcaatactactgtgagaaatggatagaatctttaggaagaaatgcactaaaggcatagttgagctccacagcaccatgagtcaactggatataatactgcttcatccaactgcatatagactatttcatccaacaacagaatgcatgtccttctgaagcccacatgaaacactcaccaagctagaccacattctargccataaaatatgccttcacaaaatcagaatagaaatcatgtcatctctgctctcacaccaaaaaggaattgcactggaaaacaaaaatgggaagatagttagaaaatctcaaaatatttgcagattgaagaacatacttctaaatacgtgtgtcatagaagaaatctcaaaagaaaatgaaagatattttaaaataaaatgaaaacacaacttattgaaattcgtgtgatgcagtgaaagcagtgcttaggggaaatttatagtgttgaatgcatatatcagaaaagaagaaagacctaaaatcaatcacctatgcttccctctt

SEQ ID NO: 886319 - DNA, 600 bp, Homo sapiens
gaatgtcaagacacatgaggcaaaaactgacataactccaagaaggaaaagatgaatccacttttagagttgcagacttcaatactactgtgagaaatggatagaatctttaggaagaaatgcactaaaggcatagttgagctccacagcaccatgagtcaactggatataatactgcttcatccaactgcatatagactatttcatccaacaacagaatgcatgtccttctgaagcccacatgaaacactcaccaagctagaccacattctaggccataaaatatgccttcacaaaatcagaatagaaatcatgtcatctctgctctcacaccaaaaaggaattgcactggaaaacaaaaatgggaagatagttagaaaatctcaaaatatttgcagattgaagaacatacttctaaatacgtgtgtcatagaagaaatctcaaragaaaatgaaagatattttaaaataaaatgaaaacacaacttattgaaattcgtgtgatgcagtgaaagcagtgcttaggggaaatttatagtgttgaatgcatatatcagaaaagaagaaagacctaaaatcaatcacctatgcttccctctt

SEQ ID NO: 886320 - DNA, 568 bp, Homo sapiens
tttatggcacaaggaatctctggtggtgggggtgggtgttaagagtgattggatttacattttagtgaaccaccttagctgccactttaagaatgtataagatccaaggcatgctagctaattgtttataacaatcataatcatccaggtaagaggtggtgctagtttggattagggtagtgaggatagtgttggaggagaaggaatagattggaaagagaaggtaatctactggattggttggtaaaggggaagacagggacagctctsggatcctggatcagacatttgggtgaatgttggtgccatttggttaacggagagttgggaagatcaagggtgggtgttcatttcaggtgagggatactgattattatttggaacacttgcagtttggggtgatttggggtatctgggtggagatgttccttccataagtctttgggcttgataagattgaatgtgttctggaatggaaaacaattgggagacctgggtggggtgtggctttgagtgctcacagggagcatttagcgcttagtgatggaaaggaggacctcacttaata

SEQ ID NO: 886321 - DNA, 666 bp, Homo sapiens
agagaccctggtcacccaaaagctttgatggagatggagattaatgctgtttccttgcctgctaacacaacctattttacagtcaaaaactgacttcaactttcaagtcttattatttaagaaatacattttgtaaggctacagctgccataggtagtgattctttagatgcatctgggcaaagtaagttaaaaaccttctggaaatgattcatcgttttagatgctattcagaacattcatgactcaggggaggagatggaaataacaatattcacgggagattggaagaagttggtttcaaacttcatggatgactttgagggattcaagatttcagtggagcaagtcactgcagaagtgctgggaataataagacaactagaattagaaatggactctgaaaatgcactcaattgttacaatctcatgataaaacttgaatagatgaggagtttcattttaggaatgaacaaataatagtttcttgaaatgcaaactawtcctggtgaagatgctgtgaacattgttgaaatgacaacaaaggattcaggacattccataaactcagctgataaagcagtggcagggtttgagaggattaacttcaattttgtaagaagttctactgtaggtagatgctattgaaatgttatcaaacagcatc

SEQ ID NO: 886322 - DNA, 580 bp, Homo sapiens
cctcatctcctgcttgctagagatggaggaattaggggtggggcaggaaaacaaaggagcaacatgttataaacttggccttttttctctaagcacagtctaggcccaaagcagacccagggcacagttccttccaggaagcgtcatcgatgagaaactggactgttactttccaccctgtgacttttcacagggtggagaagtgaggacgtttcagaataagggagcttattttgcctggaaaagaaaagcttgagaggagatcatttttcattttgacatttcccggggatatagtactggcctggtattgtttcatttcagagcttgtctagaatggaaaacaaacaaaagaaatgaaccaaaaaaaaaaaaaatgaaaagaaggaaaccaaataaactcaggccccagagagaagatctgaaccaggcctgcagcatggtcagtctctggcctcccacactcacttccgtgaggctgcctgcaggtccagccaattggcttgggtgccaagaacacccaaaagaayactccaaggcagtgttctcaagttgatccatcagggtaaacaaagtaata

SEQ ID NO: 886323 - DNA, 674 bp, Homo sapiens
ttccacacatctctagggcaggggaaaaatgcccccagtatctttgctaaaacataacaagagtcacctttgctgtggttcccaacaagttcctcaccttattgtccatgttgctatcagcattttgggcaaaaccattcaacaagtctctaggaagttccaaactttcctacattgtcttgtcttctttggagccctccaaactgttccaacctctgcctgttacccagttccaaagtcgcttccacgtttttgggtatcttttcagcaatgctgcactctactggtaccaatttactgtattagttcatttttcacactgmtgataaagacatacccgagactgggaagaaaaagaggtttaattggacttacagttccacatggctggggaggcctcagcatcgtggcggaaggtgaaaggcatttcttacatggcagcagcaagagaaaatgagaaagaagcaaaagcaaaaacccctgataaacccatcagatcgcatgagacttattcactattacaagaatagcatgggaaatacaggcccctgtgactcaattacctcccactgggtccctctcacaacatgtgggaattctgggagataaaattcaagttgagatttggatggggacacaaaccatatcaccacagcatcatgccatggagcaca

SEQ ID NO: 886324 - DNA, 636 bp, Homo sapiens
gctccccaacaccctgatgtcctcctccttcctcccattgtccatggatggagaagggaccaacggttcctccggggctgagctctcgtctcctggtgctcctgcttccctaccccccaacccccaggccagggctgcagcctgaaggggcactgggtccctgcrccctgtgagatgggcgctgccacccttgctctgcaggtgacgaatggaggcgaagtgaattgcagtgtcatatggcatttgagtcctagacagcgcccaggactggtccgaccaccgctagatgccaccaggggggctctgcctgtcccccaccccagcagacagcaggcccagccccatccaagctaggtggagacccctggtccataccctcctgggcttccctctgagttgtatccaacccacccagcaacagctgctctcagcaagcctcctggcctcacctgcactctcttccctcctctcctgcctcttgccttcctttttttgtgagacagatcttgctctctcgcccaggctggagtgctgtggcgcaagctcagctccctgcaacctctgcctcctgggttccaacaaatctcctgcctcagcctcccaagtagctgggattacaggcacccatcaccacgc

SEQ ID NO: 886325 - DNA, 538 bp, Homo sapiens
aataagatggacattgcctaggcaatcatagatggaaatagaggatggcaacagcattgaccaaattattttgtccatcttttaaaaaagtttgatcactgtatagtctcaacttggttgaaaatattaactaaccatggcacagaagatgtactcctggcagacagatactgcctgagctttttytttatcaagtgaatggaatcagagaatcatctactcaccttggccagtgaaaataattcatctgaataattcaggctttacattaaaacctagaatacccagatcagctaactacgctaaccaagaatctctatggaactgacctgtttttccctttgatttctagaacatagataagttttacaatttttagtaggtatattttgtagattttcaaaaaacaaaccttatatttcaagaagaaatattgatggatatatcatgtatgttctagttgttttgggcatctctctcctctctctctagatatctctctctagagatgtcatgcaatccatagtacataccaata

SEQ ID NO: 886326 - DNA, 642 bp, Homo sapiens
ctcacacctttttttgttgtgtcattcaactattcaaaaacctttctcagcatattttgtattactacctccgatttcatctttcttcccttcctgatttccaaggctacaccctacttatttattgtgtcttctcatttcctcatcaacatgcaatatgcatccctacttccaaccttttacctctactgttcttcctcrttgagatgacttacccttgcatctaggtatccagtctttaaggcccatttctcaaaacatacctcctccagtaagccctgactgtccaccacagatttctgtgatcttttcttttgacatgctactatcctatattctgcccaacttagcacctaattttctttggtagtttctgttgctatttcttgtttattaaggttatttccccagttagatttcaagttcagaatattactgaagtttctaatgaatcacccagaataacctgtcactacagtgatccacaattcaatatagttgctaactgactcactgattcaaaggaaaggaagctgggacagtagcaggaggaagttgtgttttagagccaaggttgtaaaatgcttgcctcatagaactagtcaaactatgtgtttatttttctttagaaaaattatttct

SEQ ID NO: 886327 - DNA, 659 bp, Homo sapiens
gtgcttctttccaggaggctggacagggaagagacatttattggcttgtttgttcttagtgagtatttacagagctatattaataccatatgtatatgcatgctctgatccttaggtagaaaatagttcttttcaagttgacaaactgtcaatcaataaattgataatctgcccagtatagattcaaggctctaagagcaattagtttgatttttaatgtatttcaaaaacattgaactttaaaatattaagtgaataatagtccactgtttttgagctcagtgagaagttttttaaaaaattacacttcatggttttttaagccatgacatgaatttatctctgaataagttcagagattgtattcaggtgagcaaktcctggccaccaaattgttgatgattctgatcatttgtgaaagatgtagtttcctcctatccctacatgcttaaatatttcatttcccttgttttatttctgaagaaaaacaatgaggagttaatacctgatctttaaactttgtttttgtcacaagagtacaaaaacagcatctgagcctccattggcccctcctgtgtctgaagaagaagatgaagaggaagaagaagaagaagatgaaaatgagccaccaccagttatcgcaccaagaccagagcata

SEQ ID NO: 886328 - DNA, 626 bp, Homo sapiens
agagatttcctctcttggctattatttatgcctgtgacttttaaagatgaaaaggaaagttctctatctctgagtctctttgtacagtcttcacaacctaaaatgaaaaaatcgaagcataaatcctgcttgccactgcagaaaggtctattttaaattcccagcaagttcatcattttaaagaatgataaagtagcagatagttcactcataggcccaacacaactttttaatacatccttagagggtatggagtcaattgtattcctacttttgtcttctttagtgtttagcacagtgcttttgcacttagtaggccctctraaataattttgtgcagttatgatcaacagctgggttcactttggccagattcaaagaactgcaaagctgtctgccaactccgtctctgtgggtctgtttttgcctcaataaatatttgttgagctaatgaaaatgtttgtctttccactgcatcttctcactcgtaagtgggagttgaacaatgagaacatatggacatggaggggaacaacacacactggggccagaaggggaatggggggcgaagggagtgagagcattaggacgaatagccaatgcatgcggggcttaaaacctagatg

SEQ ID NO: 886329 - DNA, 641 bp, Homo sapiens
acaagaagtcaaagagtgaaattttccaggacagaagcataagagcaatttacatgctggacgatagagtctcagccagaaggaagctgagaaattggctaaaaatggcagtgactagaatgatattttgaaactcaaatctgctattattgccttgyttcaatattccccattaccttctagaaatggaggtcttgttgagatcaaagaacaagtaaaataggagtaagcacttgaaacaattagcaggttagccagatgggaagctgagctcagagaatgagataacaaggttgaatattgcagagaaagggttattctggataataaaaagatctggggcaactatggttcttcactctggctgtgcattatctctggagttttaaaaattcatttgcccaggtttcatccccagaaatcctgatatagtaggttattggtgggctctagatattggtattttatggaactctacaggttattctgatgtgcagccctgcttgagaaccaatggtttaaaagatggctgtgggaatgattgcagaagtggaagggaggtaaaattcattagagttgagagagatcaaggatccataaggaaagggtatgaaggaggtgtccattaataccctgtttca

SEQ ID NO: 886330 - DNA, 654 bp, Homo sapiens
ccagtgtctattgttgccagctttatgttcatgcgtacccaatgtttagctccagcttagaagtgagaacatgttgtatttggttttctattcctgcattagatcccttagaataatggcctccagctccatctatgttactgcaaaggacatgatctcattctttttatggttgcataatattccatggtgtacatgtaccacatttttctttatccratccagcattcatgggcccataggttttttccatgtctttgctatcatgaatagtgctgcaatgaacatacaagtgcatgtgtctttttgataaagtgatttattttcttttggatacatacccagtaataggattgctgggtcaaatggtagttccgttttaagttctttgagaactctccaaactgctttccacagcggaagacctaatttacattccctccagcagggtataagtgttctcttttcttggcagccttgccaacatctgttgttttttgactctttaataattgccattctgactggtgagagatggtgtctctttgtggttttgatttgcatttctgtgatgattattgatgtggagcatttttttcatatgtttgctagctgtctgtatgtcaaaaggcatttttaaatcatattttgcaa

SEQ ID NO: 886331 - DNA, 612 bp, Homo sapiens
agtatcataggcatcttgtatactgcctgcatcattaccactaggagtctaaaattgaattgtacccttggtatgccaaaaaaaaaaaccattgttcttagtaaatggttaagtgttttcatataaagcttgcaaaatccatgttcaaaccaaatatatgtggctttctatgcatgtaaagagacctataaactaactgtctagttgttttgcagttaaacattttgtatttgggaactgcattccctgtatayggagaggaggacagcttcctcctggctctctcctaactcctctctggtacttggcctcttgttttattccctgtgctgattagaaaacaacagatatgagggaatgccctaatgaatgctataggctatttctctgatctcatgcaacaatctggaaatgagatgtgcacattgattagctgccttcagggctgagtggaaaagaaggggcattttcccaccgtttgtgggttagccctccatggatttaatcaagtccacacctggcctatggtccagcgcatcaggataattacatgggcttttccttattgtttaaccaccttcacccattaagaaatagcagtgaaagaacaca

SEQ ID NO: 886332 - DNA, 595 bp, Homo sapiens
attgctcttatttacatttggctgtgtaagaaagtcactgtgcctttagcccgtgacaccccttagcggtttggttttggctttctcttttagtgtctgtggattccagcagctctctggcttcagccctttcaaggattcgggcctctctgcatcccagccttccaggcccttctgctccccactttttagcacctaggtttttctacattctgcagtacctcagatcccttccttggtcatcactggatatgtgcttttgtagttcaaattctgggaggcattgttaggaataaaataagctctttgccatttctgaggcggaggggagcaggagagacagaggtgcttgcctctctgcctgctggggccatggtggttttcaaagaaggccctggccgtagggaacatggtggtggtgaggagcagcgtaaaccagagaaraaggctcagtaagtgcttcaaggagaaacaccggcaggtgagagcaggggtaatcccagtttctcaggaaagcatgctccggagacctcatagggagaggaggttgccctgaagggtctgggggcgatggcggaagccccaggagagcatt

SEQ ID NO: 886333 - DNA, 491 bp, Homo sapiens
cggaggttgcagtgagcagagatggcgccactgcactgcagcctgggcaacaagcaagactccgccaaaaaataaaaataaaaataaaaaaggctaacaaaattggtaagacctcagcaagactgataataaagaacacacacacgcacacacgcacgcacacacacacacacacacacatagagtgaggtaagggaacggaaagctgctaatacacaatatcagaatgaaagagaggatattaytaagggatgcacagatgttaaatggatattgctaaaatcttgatgttggtaatttttacaacttagatttaatggataaatttcttttaaaaaataacttaccaaaacaagaagaaatacaaaatctgaagagccctaaagctatgaatacattgaattgataattaaataccttttttacaaaaaagctctaggcccaggtagcttaaatgatgaatttaacatcaaactaagaagtattaccaa

SEQ ID NO: 886334 - DNA, 565 bp, Homo sapiens
tggccatggcagagccaggcaccctggctcaaggcagagccctcacaggctctgggcgggctggcacttcaaggcttgcctggtgctgtgggacccacctccaagttcactcacatggttattggcagccttaggtcctcactgcctgctggagagtcatagaccagtccctccccaggacagcttacrgcatgacagctggcttccattagagcaattgagggggagaggctgatggagcgcccgagacagaaggcatcgtctttctgtgaccttatcttggaagtgatatccatcaactttttctacattttattcattagaagcaagtcacggggttcaacctgcattcagaagaggggcattctccaaggaggcagggatcactggagtcatcttagaggctgcccaccagtgtccatacacacatcccctatacacgtcccatgcacacacacatgcccacacacacacagacacccctcacatgctcacatacacacatgcacacactcacattcacaccacacataccataccacacactacagacagactcacacca

SEQ ID NO: 886335 - DNA, 565 bp, Homo sapiens
tggccatggcagagccaggcaccctggctcaaggcagagccctcacaggctctgggcgggctggcacttcaaggcttgcctggtgctgtgggacccacctccaagttcactcacatggttattggcagccttaggtcctcactgcctgctggagagtcatagaccagtccctccccaggacagcttacagcatgrcagctggcttccattagagcaattgagggggagaggctgatggagcgcccgagacagaaggcatcgtctttctgtgaccttatcttggaagtgatatccatcaactttttctacattttattcattagaagcaagtcacggggttcaacctgcattcagaagaggggcattctccaaggaggcagggatcactggagtcatcttagaggctgcccaccagtgtccatacacacatcccctatacacgtcccatgcacacacacatgcccacacacacacagacacccctcacatgctcacatacacacatgcacacactcacattcacaccacacataccataccacacactacagacagactcacacca

SEQ ID NO: 886336 - DNA, 514 bp, Homo sapiens
tggaggcttctgggcaggtgcagccacgatgacagccggcatcaaggcccttcctctgcaggccccaggtgcaggccctggtggtttgggttcagggtttatgggtgatgggcgcccagcccagtcaggttcagcggggagaaatccaaagccattctgaggggcaggctccaggccggtgcgaaacagtggggaatggcttcccgagaagccactggagctgcgcctcttgccctctgtccggtcctcctccacactccagcagaggggkgtcttccagggtcctttcctcctgtggcctgggcgtgcccgtgtgcagaaggaggaaggcgaagccgtccggcatctcggaaatggagcctccagggtctgcgtcactcggaaaggcgcgggctttcccaggccagagtctttcagtcccaaaaggctttgtccacctcctccctgagtcattgcggctttgtgtgggtccaggggcagagaccagcaggaaggacgctgctcctgcctgcgt

SEQ ID NO: 886337 - DNA, 650 bp, Homo sapiens
gcccaagaaggctagaatgctagcttagaaggattccttggatccttcctgctgattagtttttgaggctgtcctgtgtcttggttgtcaatctagatacttcaggtttactcatgagcctggtaactgctgactagcgtcatctgcttggaaagacatcttggcattcattatctggaggttatactgacaaaggtgtgctactcacatgtggataattattcctacgtctattaactggtgcccagtagaattcctggcaccamcacactgcaaagcaaaaatccttctaatggagaagctggcacaaaataaaagacaactttttataaagggttggcatgggggggaactactttatggtatacaacacagcttaaagaaatgacaaattagaattgatagtgttgtattttgaaaaaaatttaataaaaaattaaaacaataaataaattaaccattttattcttcctctttgacccttcccttacatacctcacccgcctgagattctgaaagttctagcaggaaaggaatttctgtgtcaaaattagcgaagaagctagtccactgatgttcaaaagccaccaaatcctgggaaaaaaaggaaaaagataacgtgtttggtcatataaaggaggtattttaga

SEQ ID NO: 886338 - DNA, 593 bp, Homo sapiens
atcatcttccttcccattgctttaatctacttggccccttcctctgtattctggaaaagcttttcaagtgtgtcaactgattagattttttatatctttttttaatgtaagttttcattctactaataaattttgagacttcctacaatcttttcttatatgtcttccatctccctttttaattttgattgctcacctcattgctagatctcatttctctttttataaattctgttcctaaaaagtaccaaaaagagaaattttctcaattatttttgttccttgaagaaaatctttttttttttttttttttttttttttgaractggagtctcgctctgtggcccaggctggagtgcagtggcgctatctcggctcactgcaagctccgcctcccgggttcccgccattctcctgcctcagcctcccgagtagctgggactacaggcgcctgccaccacgcccggctaattttttgtatttttagtagagacggggtttcaccgtgttacccaggatggtctcgatctgctgacctcgtgatccgcccgcctcggcctcccaaagtgctgggattacaggtgtgagccacc

SEQ ID NO: 886339 - DNA, 627 bp, Homo sapiens
gtgctatgaattgagttaaagtcacatggtttaaaccccagatttgaagtgacacagttctctttcacttgtgtacacttgagtacgtgaatctgaagtctatctcagtcagaagatcaacacaccagcacaggtgttggccagtagaatgggatctatacacagagtcaacatttctctcaggaaagaactttggattgtcttaagtagttaaaataagtaactgtctaaaccttggtgtcatagagcacgactcttaaaaacattttaagtcaggctgaatcaattgcgagctttcctggaagactataaaaaacaagaagaacctcaagacagcttcaytggatgtctggtgtaaaggtacctatccttgtattcaaaggaagattttgaaataaataagtaacaatatatatccagataatcttacccacagccttggttttaattacccccttcataccaagggaatgctcaaatgtttacttctagacaagactaatcctcgcaaccctagacttatgtatctaacccactgccgcctcagctccactggggtgtctcacggtcatttcaaactcactgtctaaagtgaacttcacacacatccaatctgactctcctcag

SEQ ID NO: 886340 - DNA, 630 bp, Homo sapiens
taacagacacaaagttggctcctttcccttaagaaacacagccaatcaacttcctcaagggaaaactactaaatcaaaaatgttcctttcttgttaacaatagcttcaatgtgcaaggttttttctttttgttgttgcaatacaagcactgctaaacttgatagtttttccctgtattttacacatcatttaaaaacatgtcagcatatctttttagaagttatccaaatccctctttcttattaccaagatgccccaacatctatactatactctttgtatagtaagtgatacagccatgtcaattgtgctaaattctgtatcagttcttctacctgattttgggcagcctgctgtgttgctgcagaaacttcacagtaattaatacaagcttgcacagaaaagtccccatacttaattctgcttgatgtctttggtaaaaayagacgaaggggtttctcagctgaatgcccccaatgaaaggaaaagtagtgacgttcaattcacacaccacctaagcaaggttctagaaggcttgctgtcagatactcaccttgggagctgtaaggaatgccaattctactacagtctcgaaccatgtccacaaagctggtaattttaaattcttct

SEQ ID NO: 886341 - DNA, 680 bp, Homo sapiens
caaaaccagccaaaaagttatgatgttacagacgacctgtgaggcaggtcggcgaccccaatagacaccacgatcccttttgctggacagaggaactgcaattcacaggcaattgggcggaaattatttcctctctggggcagttgaaccagcataacaaaatcatgaatgctctgactgggttagcttagttgtttcagaaacaatgctaatgatgtcagggttkccgggtcaaaccccatatgggctcattgtctttggagagggaaacatagtgttctgtggcctgggtcactttgggagcaaatgtctctggtcgaacaggggcctggcaccaggattcaccaaaacccatcagcagttcaggacaagttatctccatctaattatacccaataagtatgatctctgaaagaaagacacaggttataatagaatcttgtcagcccagagtacaaacagacagggaaatggtctgacttttatcttatgtcgccaagcagtcacagaagagacagctaggaaatcaggaccggaagcataattgttttagggagagaaggtctctcaaaaataaagattgatcgaacaatcacaaatgacttcaatgggaagaacaaggagaacaaggtaagaaggcatagagagctccaaagacaggagggtatatcatggcagct

SEQ ID NO: 886342 - DNA, 606 bp, Homo sapiens
gccatgtggaactgcgagtccattaagcctctttttctttataaattacccagtctcaggtgtgtctttattggcagcatgaaaatggactaatacagaacggataaagaaaatgtggtacatatacacaatggagtactattcagcctgagaccctgtcatctgcagcaacacggatggaactggagatcattatgtttagtgaaataagccaggcacagaaagacagacattgcatgttctcacttatctgtgggatctaagttaaaacaattgaactcatggagatagagagtagaaaaatgattaccagaggttaggacaggtagttrcggggggagggcacagtggtgaaggggaggtggggatagttaatgagtaccaaaaaatcagaaaaaaatgactaaaacctagtatttgatattggctatagtcaataataatttaattatacattttaaaataactaaaagtataattggattgtttttaacacaaagtataaatgcttcaggggagggacacccacaatgtgattatttcacattgcatgcctgtatcaaaacacctcatgtactccataaatatatacatctactatgtacc

SEQ ID NO: 886343 - DNA, 606 bp, Homo sapiens
gccatgtggaactgcgagtccattaagcctctttttctttataaattacccagtctcaggtgtgtctttattggcagcatgaaaatggactaatacagaacggataaagaaaatgtggtacatatacacaatggagtactattcagcctgagaccctgtcatctgcagcaacacggatggaactggagatcattatgtttagtgaaataagccaggcacagaaagacagacattgcatgttctcacttatctgtgggatctaagttaaaacaattgaactcatggagatagagagtagaaaaatgattaccagaggttaggacaggtagttgsggggggagggcacagtggtgaaggggaggtggggatagttaatgagtaccaaaaaatcagaaaaaaatgactaaaacctagtatttgatattggctatagtcaataataatttaattatacattttaaaataactaaaagtataattggattgtttttaacacaaagtataaatgcttcaggggagggacacccacaatgtgattatttcacattgcatgcctgtatcaaaacacctcatgtactccataaatatatacatctactatgtacc

SEQ ID NO: 886344 - DNA, 651 bp, Homo sapiens
catatagatctttggggacattttagttactttccattctttttttttacattttacgacatgagaaatagattcagttattagcatcaagtgctaaggaccaaaatagaagataagtacctttacccacctttatttggactcactgacattactggatagcagtttagggttaataattggtaaattacatcattaatcatgagaaaagctcatttatggttgagaggagtctccatgtacggaacactaaatttttttagatggagtcttgctctgtcacccaggctggagtacagtggtgcaatctcagctcagtgcagcctccacctcctgggttcaagcaattctcctgcctcagcctcctgagtagcggggattacaggtaccaccaccacacccagctamtttttgtattttttagtagagatggggtttcaccatgttgcccaggctggccttgaattcccgacctcaggtgatccgccggccttggcatcccagggtgctgggattacaggcatgaaacactgcacccagcccggaacaccaaatttttttaacactgtattctcacgtgcacatgtcaatgaaaaaaataatgagttagcaatataccacaggacagccgaaggacagattgtaaacagt

SEQ ID NO: 886345 - DNA, 530 bp, Homo sapiens
ccttttttttgctctttaaaatttttttatacccccccccaaaaaaaaatgagatgaggtctcagtatgttggccagggtagtcttgaattcttggcctcaagcaatcctcccacctcggcctcccaaagtgctaggamtacaagcatgagccaccacacccagcctaggtgcaaattccttttaagagcttgttcaatgatataaaagcccagcttgaaaatttcaagtgtaatactttctctagttagagataatacatctctatttctgtatttgagttaaaacatgtttgttaaggatatgacattcaaatattttgaatgttaacattttttaatatttacttcttgaccaagaaagcaattcttttcatatgcatgtaaactactgtgaaagtacagattggctgatgctgatgctatgtaatagcattttaaattttgttttgtcttgtgaagtttagatgataaacttgtttatggattctccttaaaacttgcttcccttgattaaattcaataaaaacag

SEQ ID NO: 886346 - DNA, 576 bp, Homo sapiens
tttactatccttttacttgcaagttatatttgtctttagacatacagaaagtctcctgtagattttgtattgaaattgttgcatcatgttttttaaaaattaattctgcctattgttctttgattggaattgttaatctgttcagatttaaagtaattactggtaacacagggcttaattttgccactttgttgcttgttttttatttttaaattatactttaagttctagggtacatgtgcacaacatgcaggtttgttacatatgtatamatgtgccatgttggtgtgctgcacccattgactcatcatatacactaggtatatctcctaatgctatccatcccccctccccccaccccatgacaggccccaatgtgtgatgttccccaccctgtgtccaagtgttctcattgttcaattcccacctataagtgagaacatgcagtgtttggttttctgtccttgtgatagtttgctcagaatgatggtttccactttcatccatgtccctacaaaggacatgaactcatccttttttatggctgcatatactccatggtgtatatgtgccaca

SEQ ID NO: 886347 - DNA, 677 bp, Homo sapiens
gggttattcttcaacaacaggacactgccagggaccagcagagactgttcacaaaatgaccccgaagaaaacgtcacacttcatgtattttcaaacccatgaagaatagttatgaatcaaagctgagtcttaaatctcatttcaattccaactttcctcctaccaaaggaaaggaggcatattgttaagttcaaaagacccaaacaagatatcaaaaagttgcctgtgagcaccaaaaaaaagatatttcatataatttatctgcaaataccaaaaatgcagttcatggcaattacgcctgtgccaacatgtcgttgtgttttgtcataggtatttctaaatgatgcagtctgaatgaaatgtccatttttccaaactcataaaagggcgaggagaagaaaaactaacattctggtgattgtctacctaccatgtataccaaaccttgacacgataagtctttgagattgttaaatatcccttaatatccattctccctttcttccttataacaaaaccsccagttcttttaactgatacccagaaaaagaaccatagttcccggactcttttgcagctaggagtggctacgtggctatgctctaacccagcagtgctaaaagtctcatatggctcttatgattacatagggcccacctggacaattcaggatgtgc

SEQ ID NO: 886348 - DNA, 645 bp, Homo sapiens
gtcattaagaaaagacaaaggctgaagactcagaaggatattaactaaggaaagcaaattggaatcgggatacaatttaagcaaagcctggcaccttttccatttcctgcagtgagtcctgctgtatctgggaggttggcacacggagagtggcaycacatagtgtccagcacatcacaatatttgagtatacttacagaataatatagtaatatataatagaatgataataacatctgctgtgtatttaacgcatactatgtgtcaggcatgtactaaagcactagacatatctaatgtgcatatatatacacatatatatgacagatataaaaatctgtatatttatgtgggtataaaaccaatatttatatatagaaatcttatgaatgtgtaaatacacacataagtatatgcacacatacatataatctcatttaatccttaaaatcactccgaggcaaatggcatcctcattttgcaggtaagaaaaataggagtttagaaggttaagtaactttgatacggtcacagtcacagcaattgcacctagatctgtcccatctgtttcagaacctgggctcttacacatcaccaaagaaggttctaatgacaactgaagaccaacaaaggaaaatgagagag

SEQ ID NO: 886349 - DNA, 645 bp, Homo sapiens
gtcattaagaaaagacaaaggctgaagactcagaaggatattaactaaggaaagcaaattggaatcgggatacaatttaagcaaagcctggcaccttttccatttcctgcagtgagtcctgctgtatctgggaggttggcacacggagagtggcaccacatagtgtccagcacatcacaatatttgagtatacttacagaataatatagtaatatataatagaatgataataacatctgctgtgtatttaacgcatactatgtgtcaggcatgtactwaagcactagacatatctaatgtgcatatatatacacatatatatgacagatataaaaatctgtatatttatgtgggtataaaaccaatatttatatatagaaatcttatgaatgtgtaaatacacacataagtatatgcacacatacatataatctcatttaatccttaaaatcactccgaggcaaatggcatcctcattttgcaggtaagaaaaataggagtttagaaggttaagtaactttgatacggtcacagtcacagcaattgcacctagatctgtcccatctgtttcagaacctgggctcttacacatcaccaaagaaggttctaatgacaactgaagaccaacaaaggaaaatgagagag

SEQ ID NO: 886350 - DNA, 574 bp, Homo sapiens
ccacacaatagttgtgggagacttcaacactccactgacagtattagacagatcattgaggtgaaaaattaacaaagatattcaggacctaaacttagcactggaccaaacagatctgataaacctttacaaacatctccaccccgaaacaacagaatatacattcttctcatctccacaaggcacawactctaaaatagaccacataattggacataaaacaatcctcaacaaatgttaaataaccacatactctcagaccacagcacaataaaaatagaagtcaacacaatgaaaactgctcaaaaccatacaatcacatggaaatgaaacaacatgttcctgaatgacttttgggtaaataatgaaatgaaggcagaaatcaagaagtttattgaaaataatgagaacaaagatataccagaatctctgggacacagctaaggcagtgttaagagggaaattcatagcactaaatgttcacatcaaaaagttagaaagaacaaccccaaagctagcaggagatgagaaataacaaaaatcagagctgaactgaagaatattgagacatgaa

SEQ ID NO: 886351 - DNA, 620 bp, Homo sapiens
actcatgtaatgctcaaaagaactcagaaaataccagtactcccaactcactgttaaggacactgaagttaaaataactagcattggtctcagggctagcaagtaacagagctatcatttgctctcaggataaattccaaagtccatcttcttcctaccgtgctacacattgtctcctctgtttgatctcctgagagaaatatctcgattcatacaggttacttatcagctgaggcatctggagtttctattgcatcaaacatctcagtyggtgagtcaataacatgggggatgcccattgtaaaatccagcataaacgaaacattcaaaaggatatattcatggaactggaaaggccagctccccctgtgcatgatggagagaagggaagagtggtattacaaaaatccaattgctggatatataggcagatgaaaatcttttcatcctgctctaaaggtatcaagaaatgtggggtcctttccttctaaaacacagcctgcatctttcactgggttccaattagtctgtccttgaactgccagaagtccttagcattaacagtgagctgctgctatcctggctatcatttagggaggagcataagagcaggcactgca

SEQ ID NO: 886352 - DNA, 620 bp, Homo sapiens
actcatgtaatgctcaaaagaactcagaaaataccagtactcccaactcactgttaaggacactgaagttaaaataactagcattggtctcagggctagcaagtaacagagctatcatttgctctcaggataaattccaaagtccatcttcttcctaccgtgctacacattgtctcctctgtttgatctcctgagagaaatatctcgattcatacaggttacttatcagctgaggcatctggagtttctattgcatcaaacatctcagttggtgagtcaataacatgggggatgcccattgtaaaatccagcataaacgaaacattcaaaaggatatattcatggaactggaaaggccagctccccctgtgcatgatggagagaagggaagagtggtattacaaaaatccaattgctggatatataggcagatgaaaatcttttyatcctgctctaaaggtatcaagaaatgtggggtcctttccttctaaaacacagcctgcatctttcactgggttccaattagtctgtccttgaactgccagaagtccttagcattaacagtgagctgctgctatcctggctatcatttagggaggagcataagagcaggcactgca

SEQ ID NO: 886353 - DNA, 647 bp, Homo sapiens
ccaccgcgcccggctgaccgagcaggatttttttgaagggtgtaatgaaaggattctaaaactgattgtggtaatggatgcacaattgtgactatactaaaaaccattgagttgtatactttaagtgggtaaattgtatggtgtgtgaattatatctcaataaagtactttttaaaaagcaataaaataatgtcttggctgtaatgtaaatgaaactaattcataataatataaaccataacatgtaactacatgcacagctacacaagaagacatgatcaagtagtcaggggcttcagcctgtgtagaatccccataaatgtgacatttacaaaatacagactgaattggtgttttatgttggtcactcaactatcatgaacaatattgccattcatgaagtgattttccaaaatgatgaacgatccttgggtaggcaaacaatttgcttgggtgagtacgcagctttctctcttttctaagtagtrgttattattttttgaacacttacaatgtgccaggcacttttcataaatttatattcaattttcactgcaaccttaagagacaagcagtcattattcccggtttccagatggaggaacttacctgtggatttaaataacttgcagaagtccattagccac

SEQ ID NO: 886354 - DNA, 636 bp, Homo sapiens
atatccaaattgttgtcccagccattgccttcgtcccttgctgtgcagagcatttgtgaaattatgtcattcactaatttgtttatgttctctcatctccatgagtcaaagctccatgagccaaaggatggggatttggtcttaggagaccaacactcagaccatttcctggtacataataggtgctcaacaaatattgaacaagctaacaaaatgagaaaccgtaactggcaaaaagcttgatttgtatttgaggtattctcaggagtcagggaaagggagagggaatatgcttcaaagccagatgcagtggaactatggctgggggaatcattgaaacagattgggtcatagacatgcaaagtctaatgctgtgattgaatgatggctgtcccttcagtcttcagatgtcttgtgtggttctttgggcttctccaggaaagggaatgagacaataagkcacattgttttcctcccctttaatccacagcgcatcttgtcatagtaacaatggccccagtcttgtctaccatcgaaggggaaatctcagcactggtggacactcagccttgttccttgtagcctgaacacctggaatttcaaaagcagcatgctagtgtaaaacttgcaagaagc

SEQ ID NO: 886355 - DNA, 595 bp, Homo sapiens
aagtaggttgtatttagctgtctcatagtgggtgatccctgggaggtggttgtttaaggcagatatctgaactgaccattttgaggcactgggaggaggagaagcacgagaaactgtgtcaagcaatggtgactgagccctgcttctggagtgagaaaattaaacttctgttcaaagtgaatgccaaggcaaaaaaaaaaaaaaaaaaamaaaaaaacaaaaaacgaaaacaacaacaacaacaacaaaaaactgaattcattgcaaatgcatccaaagtttaaaaatgactgaaaataggaaagaaaacattcagtggcagtgaaccagttgccatgttcctgctgcaaagctttgtttgtgagagcaagtgaggttttgggaaaagttcatggaagagagaacagtggagatagatggaggcctaaaattgttccaaagccacttccagagagagaatccacataagtgagaaagccacacaactgtcctgctgggctgatggcagcattgactatgatggcaggggtgtggtggtgggggtgtggtggggtggggttacttgggagagggtagaagtgagaagacaactttg

SEQ ID NO: 886356 - DNA, 632 bp, Homo sapiens
ccaaatcctatgtccattagaaacattcttcaaaaaaggaggctgaaataaggacatttttgtgataaataaaagctggaagaatatgttgtcagcagacaggaataacatgacatactaaaggagaaacctcagagtgatgaattaccagatgaaaactcagtctgtaggaaggtaaagtagcaaatatgtagataaatagaacatattaacagaatactgtttcttctatttttctaaaaaatgaatgagtggttcaagcaaaaataatactagggtaagatagggtttgtatcatatgtagtgattaaatatgaaaacagcacaaaggatgagactatgtagaattatagttstatatattctatagttataagtttcttacatttgtgaagggtagagtgaagtgttaagtggaagaacattaattttcagtagataagtatgcatattataatccccagggaaactgtaaaaagagtaaaaaaaagagatttgctctttttacagtttccctagagattagaatatgcatatttatctactgaaactgtatagcttttaaaagtagacaaaaatattgaatagtaaaagtacatttgataaaaccacagggaagcaggacaagagga

SEQ ID NO: 886357 - DNA, 630 bp, Homo sapiens
atggaatactgtactattcagcaatttttaaagttatgaactctgaatcatgagacaacatggttgaatcacacaaatgttagtttgagcaaagtggttacatactactatatgatactattgtaatgcagttctacaacaggcaaaacaataatgttagtgattgtgctggaatttaaactggcagttgctggggttcgatgagggacattgactagaaaacgaggtttctgggtgataaaaacattacttgtcatcattggtgtggtcattacagactgcatatattttcatactcactaatatccttcaaatttatgcatttcattctatataacataacctaaagtataaaaaaagtatgatctataaatctgcattttgtaaaatacaaagcattttgtttgaagtattttgttcttaagatgtcgattacctcagtatcactttaaaggaaatcattaaaagattaayatggaatgatccttaattcaccaagtgagatcttatctcactgtgaggtgattaggaattgataagctcatggaagcaatccacagaattctacattataatgagtaaagttataatctacttaagaattaataatgagttcaaaattcacacatt

SEQ ID NO: 886358 - DNA, 792 bp, Homo sapiens
ggttcccacctggaggcaggcacccgcagggctgtgcatacacagccaagcagagagcagcggggccaggacggaggtggggagccaggacaacttgccttcacgatactccctgatggcatggttccatggaaatctgatgaatagacatcctttcattcaaccttttgatgaagtggaaaaaaatggcaaatacaggccaagctgaaaataataaaacaaaaggatgtaagaaagctaaagaaacatgcatggtgagccatttggaataaacactctgctgctgacacaccctgggattctggaaaaagacagttaacacagggaggcggacacaagcttcttgtcaggctaaggttaaaaggtctgccaaggtaacagaagctggctgtttagggaaactgcatcttctatcagaggcytctgcaaaaagaaagaacttcaggagtgttaataaagtttcaaacgtgcaaactcatgggcgcaccatttcgtgatctgagtttattttgggagagcaagagatgaaaaaggggctacatatggttgaccagagcagagggaggggtgctggcctgtttttaagccatgaaagccttggttaatagcagagagaggagactggggagaatcttatcaaggagttcctgcctaccatgcccacatgcccacccttccataggtatctattgccatgaacactcaccagcacccacaacttccctctggttgacagcccaaaacaaggccttcattataaagcctcatggcagagcctgccaagcctcccaa

SEQ ID NO: 886359 - DNA, 622 bp, Homo sapiens
taatctgctttattacgcgccaatttctggcttcctttccttccctgttttatttctttactcttttattggtgtttcctggtattccctcccaaaaaaattatttattctcaactctgtctcaggcagtctgaggcaggggaaaccaacctgataaagatataatctctaatcacctaagataatatctagaataaaatatgcattcagtaaatgctaattttcyttttcctcactcttgtttccttgcccccaagtcaaacatgcataataaaaatgttttagaaagtcatctctagactagattatagtcttggaggtaggtaaagttagagtcatagagacttgtgaggaagcagactcttgctttagaactaatgaagtgcaataaagacccagacagaccaaggtgagatgcagatttcattttgttataatggtcagtttatgactcctctgtatccttcactgcacattatatactctgctggaccacatggttctaacgggtggtataagagagtactcattttgcaaagaaacccttgagtatcctttatatacactattaggctaacaaaagtaggctgagagatcagtcatgttcagtaaaattggtcag

SEQ ID NO: 886360 - DNA, 650 bp, Homo sapiens
catgttactatttattttctctttaactcacctacttatatttttttctctcctttattaatttcttttggattttggaaataaacagatacttcttgttattccatttttaatttgttaatttattagatatgcattcttatactgttcttatagtggttactctagagattkcacattcatcttcaacttttacagtctaacatgaataattactactagcaattccctgatattgctagaatcttagaaaattttaactccatcttgtgccattatgaagacatttttcacagtttaaggattacttagaacctatttctattcgtgtttatatagtcaatatccatttatatttacctgcacatttacttttccattgtcattcatttcttttgcatatctgtgtttccatctgaaaatattctccttgtgtctgaaggagtcattttaggatttcttttagtgctggtatcctggaaactttctgtgtttatttctctggaaattctttattgtatctatgtttctaaaccttatttttgctggttatagaatttctttcagcaccaaagattacattccattgtcttctagctttcatcctctctgttaagaacagtcattaatcttattgttgctcctttgat

SEQ ID NO: 886361 - DNA, 579 bp, Homo sapiens
aaaaaccactatagccacttctaatgccttaccccttactttctgattactaatcagtttattaaaatttatcaaatgtggccatgcccagtggctcatgcctgtaatctcagcactttgggaggccaaggtgggcggatcacttaaggtcaggagttcaagaccagcctggccaacatggcaaaactccatctctactaaaaatacaaaaattagctgggtatggtggcaggtgcctgtaatcccagctacttaggaggctaaggcaggagaatggcttgagcctgggaggcggaggttgcrgtgagctgagatcacgccattgcactccagcctgggtgacagagcaagactccgtctccaaaaaaaaaaaaatcaaatgtacacatcactcactttctctcagacttcatctaaaaaaaaagtatttaacagaaaacttaacaaaaatttgtatgataatccaatatctaacattcaaaactcaaatgatgaattcaaaaattcatcaattgaatttcaataatatcctagattttaaaactacaaactaaatcatgcattatgttctccctgata

SEQ ID NO: 886362 - DNA, 610 bp, Homo sapiens
ttcttctctaatctcgctaagtcttcttagctgtctccttgatttctactggcagtgtttccttggatacttttttcagacctcctttattcttactaaatatcttctctccgaatgacagcttccattttcatggctgctacctgtataccaatgactttaaactgctttcttcatccctgaactttcttgagctccggatcttaaatgttgacaaccctgatgtcttagcagtttggggtctactcaaagcccagttatcattgatgaggtctataaaacatttatagaagaattaatgccaattctagagaaactcttacatataatcaatgagaaaggaatattccaaaatcactctcgaagaggccagtataaccctgatgcgaaaacctaacaaaaacattaaagtgttagagtgtttgagaaaagtgaaaattacctttctgataaagactatgtgaagatctctygaaactaagcaataggaaaattaacaactcaataaaaatgaatgaaggatttgaacacatatttcatgcacatggaagaggcccaacgtcattaattattagggaattgcaatttaaaaccaccattagatgccact

SEQ ID NO: 886363 - DNA, 602 bp, Homo sapiens
tggaattttttcactactctagaaaataactatgtgtgagtggagggaaagagagatgaaccaagattaaggtattgataatcttaatctggaagctgggtgataggtccaagggggattcattacattattctccttacttttatgtgtattttgaatatttcaatactaaaaagttttttaatttaaaaaagacagactctgaaaaaaactagcagaagcttccagagtattaatagttaattgtygttagtatgcaaaactttcttcactttttttgccaagaaagatgtgccattgggaagcatctaagaaagttaaggcatacgttattttaatcatagtttcaagatggaaactaggctgggtgcagtggctcacatctgtaatcccagcactttgggaggccaaagtgggcagatcacctggagtcaggagttcaagaccagcctggccaacatggtgaaaccctgtctctactaaaaacacaaaaattagctggcgtggtggcacacaactgtaatcccagctactcgggaggctgaggcaggagaatcgcttgaactcaggaggcagaggttgcagtgagctgagattttgcc

SEQ ID NO: 886364 - DNA, 625 bp, Homo sapiens
tggttggcagtattccagttcatgaatctggaaatgttttgtttctatttatttcactattatccttcataatttatatatatgttacatatagtttatatgcgttaactatatacaaagaaaactttagggccaggcacagtggctcatgcctgtaatcccagcactttgggaggccgaggcggttggatcacctgaggtcaggagtttgaaatcagcctggcaaacatggtgaaaccccatctctactaaaaatacaaaaaaaaaaaaaaattagctgggtggggtggcgggcacctgtaatcccagctactcaggaggctgaggcaggagaatcatttcaacccaggaggtggaggttgcagtgagcagagatcacgccactgcactccagcytgggagacagggcaagactccgtttcaaaaaaaaaaaaaaaaaaaaaaaaaggaaactttagaagttatgtattacaaataagaggaattatattacactaagacaaaacacagaaattataatgttctcactatcagtgataatcatggttaatactttggcatatttcattttaggacacacacacacatttcccttgtcttatttttctaaatagaatcacattgt

SEQ ID NO: 886365 - DNA, 610 bp, Homo sapiens
agaagacagtaaaaaggagtataaacaagaggaaaaaaagtataaaacctgattatcatcttcaatccaaacatctcagacacaggtagacccaaggctttggagaatccattccttgcatacaactcaattcctgctgagcctatgtgaccagacagacaagtgcagactggctttgtgtttaaaccctaaatgataccattaacatgaggctttcagttctcctgcccaagtatttcccrgggaaatcactccgacaaataagctttcctgggggcaactggcatcctctttcagctctaaatatgctttagttaacagcatgaggcctgttcatccctgccctgctcatatatcctaaatgagataggagctagaagacctaggctcaaggacctgctgtgtcacaatttgactatagaaattagactaattatgggatctccctgagccagtggctatcagtaagaacaattgctaatatttcctgagctgctggggtactatcaactttatgttaagcattttacatggattatttcagccaatccttccagtgttttatggtgcccatttcaaagggaaggaagtggaggctgtcagtgggagt

SEQ ID NO: 886366 - DNA, 574 bp, Homo sapiens
agactgaggctcagaagaataactcatttgccccagccacacagccagagaagctctaagagtctgggtccgggggcctctgccctggagctcatgctctttcctgactgtgtgttccattctagaagaaatctgtctttcctgacccacagaaagaaccatccaaggaagtcccagatgggggtacacaaaagtgatttcctcaggcagccaggtcacaatagcttctcagtacaagagcccagactttggcataaagttcaggaccaaaacgcacctagaaggaaagagggaaaccccctccctttgatgcatcttgtagaggcagggatggctgaaactaaccaggagctgagccctattcacgawtgctactgctgttacctgcctggtatgtgttgtaggctggggaacacgggaatgcctggtgtggctactgcagaaaaagtcaggactctccaaactcctacagtcctccaagggcaaacgaaccttccaggaggtggaattaaataaagctgagagatgatgtcttcactaattaaaaaaaaaaaaattaaacagcctcaggatt

SEQ ID NO: 886367 - DNA, 617 bp, Homo sapiens
cgtgatatcatacccttgttggtctccttctcttccatctgtttttcctgagaacacttctgaatcaaccattctcacatgaacccttgtctgggggtctgctgctgggaaacccatcgtaagacagtaaaaaaatctgacctaaactgcttctgtggctacacctgacctgagcctatttatagcattatttatctgacttagctttgcagtcatatgtttggctgcataaatattaacatgtttgattaaggagcacttcctcagactccactggggttgttacataacattcacaatatacgtatcatattacctccctaaaatctaataaaatacgaattacaaacayatttcgcccaaagggtttcagacaagggattaaggagctgtataaaatactagtagatcaaatctagcactatattaaaggaataaaaaccatagacaattaaagttaattacaacaatggtttaatatttagaaatttagtcatacaatttgtaaaaataataggtcaattgagtaaaaccacatgacaatctcaacattcgttcctgatataaaaataacctagaaatagcatgcgagttcctcaaaatgattaagaatattt

SEQ ID NO: 886368 - DNA, 591 bp, Homo sapiens
gcacctggggccaccatctgtgtgtatttgcacaacctccccatagctgcatgggttttctctgagtactctagtttgctctctcattccaaagtcatgcacattaggttaattggcatgtctacatggactcagtgtgagtgaatgtgagcatgggtgtgartgtgctctgccatgagagattgtcctgttcagggctggttcccacctcactccgtgagctgctgggatgggctctggccacccatgaccatgaactggaaataagcaggtaaagaattatcttacttggttttattaatctttcttaaatgtatgtatagttcacatttatttcaatgtttaatattagaaatgttttgcctttatttagaagtttggtattttgtgatcagaaatctgccataggaacttcattatagtttatatcaattagcctatggaaaaattgtttttgttatatgtcattttgcttaaagctgcagtttccaggactctatcaacaacattaagtgaggactttgtgtgatttgcggggccaagtgcaaaatgaaattgtagggtaccttgttcaaaatgcaagaaaaaagt

SEQ ID NO: 886369 - DNA, 591 bp, Homo sapiens
gcacctggggccaccatctgtgtgtatttgcacaacctccccatagctgcatgggttttctctgagtactctagtttgctctctcattccaaagtcatgcacattaggttaattggcatgtctacatggactcagtgtgagtgaatgtgagcatgggtgtgagtgtgctctgccatgagagattgtcctgttcagggctggttcccrcctcactccgtgagctgctgggatgggctctggccacccatgaccatgaactggaaataagcaggtaaagaattatcttacttggttttattaatctttcttaaatgtatgtatagttcacatttatttcaatgtttaatattagaaatgttttgcctttatttagaagtttggtattttgtgatcagaaatctgccataggaacttcattatagtttatatcaattagcctatggaaaaattgtttttgttatatgtcattttgcttaaagctgcagtttccaggactctatcaacaacattaagtgaggactttgtgtgatttgcggggccaagtgcaaaatgaaattgtagggtaccttgttcaaaatgcaagaaaaaagt

SEQ ID NO: 886370 - DNA, 659 bp, Homo sapiens
gtggggatatgcaggtgtttgcatggacggaagccagtgagcttgcatctaagactgggcactttatgttccttatgaaatctctcagttaagaagatgaagaaaaaatcaaagcaatgcacataacagatcataacctggaaaggaaattggagtaaaatcagtggcttttctcattcagtcatttattcccttaacaaatgtctgccgaggctgttggtgccagcccgcactcccccagcactcatcccttctgcacacgcggacagtgtcccgggggagagcgccctccaccctctgctctagggcttcctctccggctgtgcaaggcaggctgcacgcttgggagccatgtactgcaggaggaaccttctggtaatgataggatagggttggaggataagtaccccggcctcctcattccccagtgggacgactctgcggcatgtctgcgctggctcccagggaacagcaccccagmtgcccacactaataacctggtctctcactcatcctgactgggctgccttcccttccctgtctctcttcccctttcttctccctctcctcctgggatcacctcccatacaaactcctcaccctcatttccttgtcccaagttctacttttcagggaacccaggatactttcctcctggt

SEQ ID NO: 886371 - DNA, 627 bp, Homo sapiens
actggcctcatagaatgaactatggaggtgtccctccccctcaattttttggaatagtttcagcaggaatagtaccagctcctctttgtacatctggtagaatccagctgtgaatcttcctggtcctggacttctttttggttgataggytatttattactgactcaatttcagagttctttattagtctgttcagggacttgatttctttttggttcagtcttgggtgtgggtatatgtgtccaggaatttatctatttcttttggattttctagtttgtgtgcatatcggtgttcataatattctctgatggttatttgtattttggtaggtcagtggtaataatccccttgtcatttctgattgtgtttagttgcatcttctctcttttcttctttatttgtccagctagcagtttattttattgtttaaaaaaaaaacagctcttgcatttgttgatcttttgaaaggtttttcatgaagggtactgaaaccttttagttcagctttgattttggttatttcttgccttctccaactttggaattggtttgctcttggttctctagttcttttagttgtgatattaggttgttaaattgagatgtttataactttttgatgtg

SEQ ID NO: 886372 - DNA, 720 bp, Homo sapiens
gtgcttgaggaccaagcacagaggtgggcaaagatcgtcatcagggcttctgctacctgtcttagccccagcattcttcaaaagagatcctcagggcagtgattctctgtgaggcacctgccttaagcccagatgctgaaaacaagacaggaactaacctcattctatgcccacttaacctttctaatagctttagcactgaatgactcatatgaacccattttacaggtgagaaaattgaggcctagagaagttttgaggcacatctgcttatagctagtgaaaagtgaattaaaactctgaactagtctcaccttatagccagagctatccatcatggtagcacgcagcrtctaggtgagtttgtgctctggagagttcatgtttttcactgctcacagctcctgtgttctaggtggtacgtaatggtgaacagactgggcccgagattaagattacatgattggaagtgcaagttcatcacttttggagcaccttgggcaaatcacttgtccttcatagtcatttgtttctgcataagtaaaattgggataataataatagtggataatagtgctggctcatagagttattgggagttaattacatgagttaaatcatgtaaagtgttgagggcagtgcctaggcacgtagtaagaaatgtgagtgattactgtttttataaccttattgttaatgctaatttgctccagatggcat

SEQ ID NO: 886373 - DNA, 720 bp, Homo sapiens
gtgcttgaggaccaagcacagaggtgggcaaagatcgtcatcagggcttctgctacctgtcttagccccagcattcttcaaaagagatcctcagggcagtgattctctgtgaggcacctgccttaagcccagatgctgaaaacaagacaggaactaacctcattctatgcccacttaacctttctaatagctttagcactgaatgactcatatgaacccattttacaggtgagaaaattgaggcctagagaagttttgaggcacatctgcttatagctagtgaaaagtgaattaaaactctgaactagtctcaccttatagccagagctatccatcatggtagcacgcagcatctaggtgagtttgtgctctggagagttcatgtttttcactgctcacagctcctgtgttctaggtggtacgtaatggtgaacagactgggcccgagattaagattacatgattggaagtgcaagttcatcacttttggagcaccttgggcaaatcrcttgtccttcatagtcatttgtttctgcataagtaaaattgggataataataatagtggataatagtgctggctcatagagttattgggagttaattacatgagttaaatcatgtaaagtgttgagggcagtgcctaggcacgtagtaagaaatgtgagtgattactgtttttataaccttattgttaatgctaatttgctccagatggcat

SEQ ID NO: 886374 - DNA, 629 bp, Homo sapiens
gtgtattaagggaagttgtcaagatcaggcgcttgaggctgttgctctggcctctgaaggtagtactgtaaagtactgagtcagaaatcagagagagattctcattttaattcttaatgaagacttgtgattttctttctgtgaccagtctctaaataggtagaaactttggttgttttctactgaaagcaaaatgcctttagtaaataatgatacctgtttcctcaaaaataagagtaacatttaaaagacaaacaaaaaatgccgtaaagatgtttggtcttaaatcacaaacagtatgaggggagagtcattccaaagttagagagatttttagatatgcagtgatatgagttgctgctcacactggatcatttctgttaaatattacatatttactaatcatactccaaaatgcacctatttccataatcaatgataattatttgggatagtaaaactcagtagawtgtaaaatataaatgtgagtgtgtcattatcaaggagagaacatcaagaataattgtatttgaaggtggctttattttaaatatgtgtaattcattatcttactttactggaattatcatggccccccattctaatttcccaaatgttataattaaaag

SEQ ID NO: 886375 - DNA, 634 bp, Homo sapiens
cattctccttaaggagacattaaggtaaataattaaccaaatgaatgtgagtgaacagggggattagaaggcttagctgaatgatggttaaggaattcttaaactttctcactagggtgatggctttcaggactctcagtctacctaacttagtgcattctttactgatcttggtttttcagaaagtctttaagaacatttaagcaattatcaratttcttcacaaagaaagtctaacacatgaaccagaagacatataggtatgttcaagaatgtttacagagaagtagtcacaacagcaataattgggaaactacccaaatattcatcaacaggattctggaaacctgataaggtgacatgccaagtttgttatgagacaatgttgctcatgcttatggtaaaaatgacacccctgactccctgcctcaataagttgcatctggacaggcagaaatgacagctgtctggtgggaagccatagctttaggattctctgagtgagatgactggtaactcagcaggctgttgggactctagaaattctgcctatggagttgttataagagacactggctcccttctggcacgggattctaggccagagtggttctcacacatgcccatgtggggc

SEQ ID NO: 886376 - DNA, 634 bp, Homo sapiens
cattctccttaaggagacattaaggtaaataattaaccaaatgaatgtgagtgaacagggggattagaaggcttagctgaatgatggttaaggaattcttaaactttctcactagggtgatggctttcaggactctcagtctacctaacttagtgcattctttactgatcttggtttttcagaaagtctttaagaacatttaagcaattatcagatttcttcacaaagaaagtctaacacatgaaccagaagacatatagrtatgttcaagaatgtttacagagaagtagtcacaacagcaataattgggaaactacccaaatattcatcaacaggattctggaaacctgataaggtgacatgccaagtttgttatgagacaatgttgctcatgcttatggtaaaaatgacacccctgactccctgcctcaataagttgcatctggacaggcagaaatgacagctgtctggtgggaagccatagctttaggattctctgagtgagatgactggtaactcagcaggctgttgggactctagaaattctgcctatggagttgttataagagacactggctcccttctggcacgggattctaggccagagtggttctcacacatgcccatgtggggc

SEQ ID NO: 886377 - DNA, 634 bp, Homo sapiens
cattctccttaaggagacattaaggtaaataattaaccaaatgaatgtgagtgaacagggggattagaaggcttagctgaatgatggttaaggaattcttaaactttctcactagggtgatggctttcaggactctcagtctacctaacttagtgcattctttactgatcttggtttttcagaaagtctttaagaacatttaagcaattatcagatttcttcacaaagaaagtctaacacatgaaccagaagacatataggtatgttcaagaatgtttacagagaagtagtcacaacagcaataattgggaaactacccaaatattcatcaacaggattctggaaacctgataaggtgacatgccaagtttgttatgagacaaygttgctcatgcttatggtaaaaatgacacccctgactccctgcctcaataagttgcatctggacaggcagaaatgacagctgtctggtgggaagccatagctttaggattctctgagtgagatgactggtaactcagcaggctgttgggactctagaaattctgcctatggagttgttataagagacactggctcccttctggcacgggattctaggccagagtggttctcacacatgcccatgtggggc

SEQ ID NO: 886378 - DNA, 652 bp, Homo sapiens
ggcaaccagaaacctgtcagtatgtgctcttaaggttctaaaattgcagacattggttgtttcaaagccacaatgatatttttttaaacttctagatatatttttctttccatcaattgcagaaatctatccagcattgacaagattataataaataattaaactggatcacagtaaatcgtagtggttattatcttgtctttgaggtagttccccccccatccyctcgcaataaaatcattgatggtcattctagagaattcagctttgaaaattgaacaggttcttctgtttggctattctgtgattgtaatattaattatttaaaaaatttttagtgattattaagctatcatgtactgttgaaaagtagtaattttatgtatcagtaaactattcagaacacatgtatctaagtttaactgaagtaaacagttacagactttagtgtttacctatgtcatcttttagcatgaagtgattcactcctgagttgacacatacaaattaaaaatgaaaaataacaattttaatccaagcccaacatagtatgcatcatatttttaaaaattattaggtgcatattaatgagctccaagtaatagctattattccaatagacttccctgacccccactccaggtcaggaaag

SEQ ID NO: 886379 - DNA, 629 bp, Homo sapiens
ttgggtgcaggtgtggtgaagtctagttagttgacttgggtacgggtgtggagaagtctagttcagttcttgagcatcctgaattagggaatctgtgctgttaactctagcagtgaggtgatgagcacatagtaaaccaatcacaatgtacctttttaaaaatacaattcagattgtttaaatgtagggagaaaaaagatttyttggtatgaaatgaatatattacactgtccttttttacttccatgttaatatgtcattattataaaaagataaaaatactagacaagttatgaacaaaattgataacatccatgagggcacctgtaatcccagctacttgggaggctgaggcaggagaattgtttgaacctgggaggcggaggttgcagtgagccaagatcacaccatcgcattccagcctgggcaacagggcaagaccctttctcaaaaaaaaaaaaaaaaaaaaaaaaaaaaatatatatatatatatatatatatatatatatagcaatttggagagtagtttatttcatgctttacattttgttttagacttgagttagaatagaagaaagactgttggggtatatagatgagaattataaagcagcaatcatattcttatt

SEQ ID NO: 886380 - DNA, 629 bp, Homo sapiens
ttgggtgcaggtgtggtgaagtctagttagttgacttgggtacgggtgtggagaagtctagttcagttcttgagcatcctgaattagggaatctgtgctgttaactctagcagtgaggtgatgagcacatagtaaaccaatcacaatgtacctttttaaaaatacaattcagattgtttaaatgtagggagaaaaaagatttcttggtatgaaatgaatatattacactgtccttttttacttccatgttaatatgtcattattataaaaagataaaaatactagacaagttatgaacaaaattgataacatccatgagggcacctgtaatcccagctacttgggaggctgaggcaggagaattgtttgaacctgggaggcggaggttgcagtgagccaagatcacaccatcgcattccagcctgggcaacagggcaagaccctttytcaaaaaaaaaaaaaaaaaaaaaaaaaaaaatatatatatatatatatatatatatatatatagcaatttggagagtagtttatttcatgctttacattttgttttagacttgagttagaatagaagaaagactgttggggtatatagatgagaattataaagcagcaatcatattcttatt

SEQ ID NO: 886381 - DNA, 629 bp, Homo sapiens
ttgggtgcaggtgtggtgaagtctagttagttgacttgggtacgggtgtggagaagtctagttcagttcttgagcatcctgaattagggaatctgtgctgttaactctagcagtgaggtgatgagcacatagtaaaccaatcacaatgtacctttttaaaaatacaattcagattgtttaaatgtagggagaaaaaagatttcttggtatgaaatgaatatattacactgtccttttttacttccatgttaatatgtcattattataaaaagataaaaatactagacaagttatgaacaaaattgataacatccatgagggcacctgtaatcccagctacttgggaggctgaggcaggagaattgtttgaacctgggaggcggaggttgcagtgagccaagatcacaccatcgcattccagcctgggcaacagggcaagaccctttctcaaaaaaaaaaaaaaaaaaaaaaaaaaaaawatatatatatatatatatatatatatatatagcaatttggagagtagtttatttcatgctttacattttgttttagacttgagttagaatagaagaaagactgttggggtatatagatgagaattataaagcagcaatcatattcttatt

SEQ ID NO: 886382 - DNA, 657 bp, Homo sapiens
aacagttttatgaatgggttatttgtataatagtgagagtcacttccacttccaccttggcattgttagacccgtgttctctggcagtgggagaaacagcactgtggttggttcaaagtacatactgtatcctgtaggacagcactccacattgcagtgtctcctggctgccactgtaccagtcttcaagagaccatttcagtgttcgataagaccagctgcttctagataagagagtactttcttctagataagagagtacatggtaaggccacaatatcccatgggtataaccacattgctgaatttcttttgcgataatatcaactctttggtcagaagcaatgttatgtgcaataccaacactggaaccaaggcattcataagtccatggatatagtggtcggagaaggcaaacccatagagagaataagtgagtacaaactgctgcttcctctgtgatggaaggggttcaatrtgatctatctgccctcagagagctggttcctatggcgaatggtgtcatattaggaactgtgcacacggggcactctgcagtggcattcactaaatcagtcttaatcagaggaagtccgtgttgttgtatccatctataacctctagctcaattaccatggcccttttgtacatcagcct

SEQ ID NO: 886383 - DNA, 592 bp, Homo sapiens
tcagttttttgtttgagatggagtctcgctttgttacccaggctggagtgcgtgacacgatctcggctcactctgcctcccaggttcaagtgattctcctgcctcagcctcccaagtagctgggactacaggcacgtgccaccacacctggmtaattttttgtattttcagtagagacgggtttcaccactttggccaggctggtctcgaacttctgacctcaagtgatctccccacctcatcctcccaaagtgctaggattacaggcatgagccactgtgcctggcctctttagtatttttgttttaaaattttgtttgtagagacaaagtctcactatgttgccccagctggtttcaaactcctacactcaagcaatcctcctgccttggctcccccaaattttgggattacaggcgtgagccaccatgcgcagccttttagtgttgacacccttgttgaaaattagttcagtgtagacatactgatttaattctgggttctctattctttcccattggtctatctgtctgtttttatgccagtactatgctgttttggttacagtataatttgaagccaggtaatgtga

SEQ ID NO: 886384 - DNA, 667 bp, Homo sapiens
aaggagctatgtattattttgtagatttatttggtcatctagtaaacattcactacatgcaagcactggatggtagagactcagtgtgaatcaaagagtctctgctttcctgggccttctattcaagtgggaagaggctaacaataaacgaataatcacattaatatgcattctgccagaaggtgatgaatactataggaataattaagtaaggtgagaatgatagaaagtgctagtttgatgaggttgtcacttttataggatggtcagagaaggtatctctgattaaatgacattrtatcaaagacctgaggaagtaaaaaggtcagatgtgcagatggctagagagagaggatgccaggcagagcccacagcaagcaccaaggccctggggtgggaatgtatttgtcttgttcaagaagaagcaaggaggctgggctagtacggtaggagagatcagaaagtgagcttagaactttatcccgccttggcaacagctttggatgttcttccacatgaaatggaaagatgaaggatttgaagaggaatggcctgacctgattcacatttttacaaaatctctctagctgctgagttgagaaattgacagttggggaacagatagaagcaggatcactagttaagcagctcttgcaatacttcaaga

SEQ ID NO: 886385 - DNA, 606 bp, Homo sapiens
tgaagatctaagtaagatccctagatgactctggcaggagaagaactgtaatctttgtgcaataaatccagagccttcctcaaaacaaaggcccacattttgaaattattgccccagtcaagctaattaacatacattgtgcaccctaaatatatacaattcttatttgttaattatacctcagtaaagatggaaagataaataaataaaatcctaactgagcacatagggataaaaagtgggggagcggggactcctctccaggataaatacattcccagagctttatcccggctggtaaaagggcattctcccactccagcccctccaatcctcctgcctcacctaagaggggtaaaacatagttatgaaggktcatggctgcaagaatatggactgggaacgctgcattcagggaagagagtaggggctgagtgaataaaactatggagaaacacttgtgaaggtcacagcccaggagacaggtgcactacaggactgggatttaactggtagattttagaagtttccccctcccctattacttactaccatgccaacaggactccagtgtaatgatagtgtgttacagctaaaagagctcca

SEQ ID NO: 886386 - DNA, 585 bp, Homo sapiens
ttttctaatgtgaattttatctatgggaccttttgtcctatctaccacccagtcttgatcaaggccacacagcattatggcaaatgtttcaataattttaaactacaagtaaaggagtcaaatgggcaaatgtttttatgaatatcctctcagaatgcccccatggtcttaggcatattgctgtaacacctccccataaacctcaaagttgcagtgamaatgaagtccacacgttccatgaaaccctcattccagaacaatggttcagtgtttgtttttcatttgtgtaatgaaagagctcaatctactatttttcaagatataaagaaggagtcttccaaaggagtaataaaggcttctgtcactagaaaaaaatgtatacctcactttttaatcattggttctccaactttatgaataagtaaagtcccacctctaccaagtactttattgtatatgttgctaacattctggagatattttcatttcggtagacacataatgtacattgaattaatgaaaatgaaatgacaatgtttattaaaacagagatgtgattggtttggggcccacataattcacttt

SEQ ID NO: 886387 - DNA, 705 bp, Homo sapiens
attaggctgcaaattttctgaacttttatgctctgcttcccttttaaacattccaattccaaaactacataaaactgaatgctttcaacagtacccaagtcacctcttgaatgctttgctgctcagaaatttcttctgccagatatcctaaatcatctgtctcaggttcaaagttccacaaatctctagggcaaaatgccgccagtctctttgctaaaacataacaagagtcacctttgctccagttcccaagaagytcctcatctccatccaagaccacctcagctcagactttattgttcatatcactatcagcatttttatcaaagccattcaacaagtctctgggaagttccaaacttgcccacatcttcctgtcttcttctgagcccttcaaactgttccaacctctatctgttacccagttccaaagttgcttccacattttcaggtatctttactgcagcaccccactctattggtaccaatttactgtattagtgtgttctcatgctgctaatagagacatacctgataccgggtaatctataaagaaaacaatttttaatggactcacagttccacatggctgggaaggcctcacaatcacggcagaaggcaaaggagaagtaaaggcacatcttacatggtggcaggcaagagagcttgtgcaggggaactcccatttgtaaaaccatcagatct

SEQ ID NO: 886388 - DNA, 658 bp, Homo sapiens
ggaaactgtaaatttgacataaggaatatttatttaaaagagttcttataactgtttcattatggaagtgaagaggcatcagacaaaatgacctctttcaagagggaaaatactacaaaatggtaccaaagaaaccygacttaggaaaagactctgaattttagaaggtatattctgtttatagactacttttaggttgctttggggcagattaatatctaagcttttctacaaatttttttcacttaggttattagatttttttcatgaaaatgtcagttttctagtacaaattaaagaaagttacaaaaattgttttataatcaatttgttgaaatatatgtatttcataattttaagtgtgtgtttactataagacaggtattattttatgtagtcattagtcatttttctttcttatattgtaatgcttcaaaaataagaacactgtataagccctgggaagaagaaaaaattgacctaagttactaacaacatgttaatgattttcagtttgttactcttgtgaaagagagtgagaatttacatttaataactcacctaaaagttaatattggccattttcacaatcagaaaacactctcctacattttaacagaagcatagcaaaaaataccatatttaatcatttgttttt

SEQ ID NO: 886389 - DNA, 726 bp, Homo sapiens
ttttctgcatctattgagataatcacatggtttttgtcattggttctgtttatgtggtggattacatttattgatttgcgtatgttgaaccagccttgcatctcagggatgaatgagccaaactgatcatggtggataagctttttaatatgctgctggattcggtatgccagtattttattaaggatttcacattgattttcaccagggatattggcctgaagttttctttttwcattgtgtctctgccaggttttggtatcaggatgatgctggcctcataaaatgagttagggaggagtccctcttttccgatagtttggaatactttcagaaggaatggtaccagctcctccttgtacctctggtagaattcggctgtgaatctgtctggtcctgcacttttttttttttggttggtaggctgttaattactgccttaatttcagaacttgttattgatcaattcagggatttgacttcttcctggtttagtcttgggaggggtgtgtgtccaggaatttatccattttttctagattttctagtttatttgtgtagaggtatttatagtattcttccatggtagtttgtatttcttgggattgatggttatatccccaagacttcatgactaaaacatcaaaagcaatggcaacaaaagccaaaatcgacaaatgggatctaattcaactaaagaggttctgcacagtaaaagattctaat

SEQ ID NO: 886390 - DNA, 726 bp, Homo sapiens
ttttctgcatctattgagataatcacatggtttttgtcattggttctgtttatgtggtggattacatttattgatttgcgtatgttgaaccagccttgcatctcagggatgaatgagccaaactgatcatggtggataagctttttaatatgctgctggattcggtatgccagtattttattaaggatttcacattgattttcaccagggatattggcctgaagttttcttttttcrttgtgtctctgccaggttttggtatcaggatgatgctggcctcataaaatgagttagggaggagtccctcttttccgatagtttggaatactttcagaaggaatggtaccagctcctccttgtacctctggtagaattcggctgtgaatctgtctggtcctgcacttttttttttttggttggtaggctgttaattactgccttaatttcagaacttgttattgatcaattcagggatttgacttcttcctggtttagtcttgggaggggtgtgtgtccaggaatttatccattttttctagattttctagtttatttgtgtagaggtatttatagtattcttccatggtagtttgtatttcttgggattgatggttatatccccaagacttcatgactaaaacatcaaaagcaatggcaacaaaagccaaaatcgacaaatgggatctaattcaactaaagaggttctgcacagtaaaagattctaat

SEQ ID NO: 886391 - DNA, 551 bp, Homo sapiens
gggaggctgaggcaagagaatagcttgaacccggaaggcagagattgcagcgagccaagattgtgccattgcactctggcttgggcgacaagagcaagactccatctcggaaaaaaaaaaaaaaaaaaaaaagtagccaggcatggtaacacatgcctacaatcccagctactcaggaggctgatgtgagaggatcaattgagctcagggggtcaaggttgcagtgagtcatgattgtgccactgcactctagcctgagtgacacagcaagaccctgtctcaaaaaaaaaaagaaaaaaatatatatatacacactcacatatatacacacatatacatacacacacacaccacacgcatatayatacatacatatatatatatatatatatatatatatatgtttttacctattaatgattaggattcagaacagcttgcaattgaaaaaaaggcaaccaaggcagaaaccaagcaaaatttgaaggaaaattatttctaacctagcattctataacaagtcaaactatcaagaattaggcagaagaaaa

SEQ ID NO: 886392 - DNA, 551 bp, Homo sapiens
gggaggctgaggcaagagaatagcttgaacccggaaggcagagattgcagcgagccaagattgtgccattgcactctggcttgggcgacaagagcaagactccatctcggaaaaaaaaaaaaaaaaaaaaaagtagccaggcatggtaacacatgcctacaatcccagctactcaggaggctgatgtgagaggatcaattgagctcagggggtcaaggttgcagtgagtcatgattgtgccactgcactctagcctgagtgacacagcaagaccctgtctcaaaaaaaaaaagaaaaaaatatatatatacacactcacatatatacacacatatacatacacacacacaccacacgcatatacatacatayatatatatatatatatatatatatatatatgtttttacctattaatgattaggattcagaacagcttgcaattgaaaaaaaggcaaccaaggcagaaaccaagcaaaatttgaaggaaaattatttctaacctagcattctataacaagtcaaactatcaagaattaggcagaagaaaa

SEQ ID NO: 886393 - DNA, 634 bp, Homo sapiens
aactgaccaagctctgtctagtgctggaacttagaatgccttaaatattgctacagcattaaggggtgatagggagaagaagatcccaaaacgcagaagcaaaaatatttatttcttagtgccaccaagaagacatagtagagcttaaacagaacaactttaaaattacacatagattatgtctcacagaggataagtaaaatgaactaaataatccaagatgttgaaaattcatatttctttcaaggaagacatggctggtaacagtactgtataaaaacagtctaacagctgcaactgtgtattacttaaggaggactaaagacmccacctaattattttttaatatcaaaatagtaaatataaacattaaaatgagaaaaggagattgaaatccatgaaatgatatatgctaaatttcagggtaacctaacatgactagaaaactaacgaatctcaaaaaaatccattaaacagttttatgtctgaaaaattggaatgcatcttttttgcaaattaaagacagactgtaaagaagggttagagttggaaagttccctgctcatcaaattaaaaacaagaactctattcattaaaaacaaaaaaaaatacttatgtggtcaagtcacattct
